United States Patent Application Publication US 2026/0191916 A1 - sequence listing, part 109

SEQ ID NO: 707 - DNA, 2130439 bp, Lawsonibacter asaccharolyticus
  source 1..2130439: mol_type = genomic DNA
agcagaaaaaagatcaccacctggcgcagcaggcggcggcagccgccgaaggcggtgagcaccatcagcaccgccgccgacagccggcagaggggccgccccaggaacccgaagccgggcagaaagagcgccaccgcataaagcccgcccagcagcgcccccagggcgaagcggagccggctcagccgctccccggccagccgggcggagcagagcaggagcagatagtccacaatggcgttgagcaggaacaaggtatccacatagatcacagtcaagccggccatctcctctccgcgcggagccggtccggcccctttttgttctccccggccgccccctggggccggtccgacaagccctattatagagtccgtccatccagaaaaaggtcacaatcgagatgtcattttcaggagaaatcccccgcccctccagtacgggacagagggcctgcccgtctattggtcagaccagcggcggcaccattcccttttcctgaataaaaacagtgggaccgggaggccgtgcggcctcccggtccctgttttggacagagggtgtgcttactgggtggtgatgacccggaccttctcgccgtaggggtctacgtagatagtcaggtcgtcggagtaggcgcggatctgatacagcgggtcatcgccggtgaaccagaccttggtcgtggtgttgtagcaggccaccttgttggacacctggtacaccttgccgcccgcgttgacgtaggaggcgccgttgctgacgaagaagtcgctgcgggacacgccctccacagcctccagggtgacccgggagcggagcttgccgtcgccgtccaccgcgatgccgccggggacgccgttgtccccgatgtagcccacattggagaagctggtggtgccctccgggctctcgaaccgcagagtgcggacataggagaccttgccggactcatctccttcgacctctctggtgtcggagaagaacaggccgtactgataggcgtcgccggtggcgccctccaggatgatgaagtccaccatgtcggaggagttcaggtgataggtggcgatcttgtcgccggggatggagtgggcctggatgtcagccagctccagctggaccaccgtgctgccgctgacccgctcgaagacgtggacgccggcggtgacgggatagctgcccagtgtcattttctggaggtcgaagacgccgcccacagagcggtcagacatgcggctggcgctgatgacccccgccttggaggaggagaccgtgaccagctggtccttcacgctgtcggagaggctggaggagctcttcagctcgatggtgccccccgcggggaggaagaccttcacggagctgccttcggccaggccgatggcggtggaacgggtcttggctccgggctccgccatgccggccacgttgccgtccgcagtgagaagcaggactaccgtcttgcccacgtcaaagctctggatggattccagggcgctctccaggacggtgaactcgtgtcccagcaccgtgatcttctggggcgctctggggttgggctcggcgctctcgtagacgcagggcagccgcaggtcggagacgatcagcttattggccacgctgtcgtaggtgaccacgtcatagggctggatatcagccatggtgatggtctggccgttcttctcgatggtgtagttggacgcgccgccggtgagctggtggaacatggcctcggtggcggtgccggagaccaccaccgcgtcagtggaggcgccggaggagccatagtacaggcccaccaccttgccgtccgcggtgtacagggtcacctggctgccggagcgcagctccagatacagcttctcataggtggtcaccgggttttccttggaagaggtataggccggggtgtcgccgtcgatgttgtaccgggtgccgttggtgcctgtgagataggtgggctgggcggcgccggacagggtcacggtgacggaggcggtctcgtcggggaggaaggtgacgatgcggtctttgtcgtccagcaccagcacgccccggcgtccctgaagggcggagggcaccacgccctcctgcgcagggagataggtcccatccgaggtgcggatggcgccctcggaattgttgtcctccgcggtggcgttggcgtccagcaggatgactttctccttcacagaggcgcccagggtctcgtagtaggggcggccggaggccgtcttgcaccgcagggtgttgacaaagagctgggcggtctgggcccgggtgatgggggcgctgtacgcaagggaaaccccgtcggtgagccccagggagttggccaggttcagatagccctccggccagacggctccggcgtcggtctcatcgtaggagagcagccggatcaggatggtcaccgcctccgcgaaggtgatcttctcgtcgggggcgaaggtgccgtccccccgcccggagatcagcctggtctgggcctgagtcccctctccgccctcagaggaggagccggagccggaacccgaccctcccaccgtgatggaggcggccaggttgatgtagcccctggcccagtgtgaggcagtcacatcggaaaagatggtgcgggtggtgtacatgggcaccttggactgctgccgcagcagtccaaccagcatggtgcagaactgggcccgggtgagcacatcgttggggcggaaggtgccgtcactgtcgccggacaccgcacccatcagccgcagcacgtccacgttgacggcagtgctgtggtcgttgatgtcggaaaaggagccgccggaggccgccgccggcagggcaagggagagaagtgccgccgccgtcagcagcgcggcgaggatccgttttaatttcatactcatatctcctgtctttctctgatctccaatttcattttgtgttcctgggaaatctctaccttccggagctcccctccctgccgggaaggagcgcacaaaaggatggtgaggtccctcattcggcccgcagggccaccacaggctggagcccgctggccttgacggccgggtacatgccgaagatgacgcccagcgccaccgagaagaggaaggcccccagggtgatgatggggctggggagcagcacatcggtggtggtggacagcagcagctttccggccaccatggtgcccacatagccgatggcgatgccgatcaggccgccgatgctgcaaatcatggccgcctcgatgaggaactgggcgatgatgctcttgcgctcggcgccgatggccttgcggatgccgatctcccgggtgcgctcggtgacggtgaccagcatgatgttcatgatgccgatgccgcccaccagcagcgagatgccggcgatggcgcccagcaccagagactgcatgttgctctgggactggacctgctcggcgctgctgttgttgctgttgacgtaaaagcttccgttgtcccggtttccgtcagcattcataggaaacaaaccgttcaggaaagcgtccagctttgtcatggcctccacagtggcctgggcgctcttggccttgaccacgtagctgtcgatgttgtaattgttgttcatggagcggttgaaggtgtagggcaggacgatgatattgtccagctcgttccacccctccagatcgaccgcctcatagtagcccaccaccttgaagggctgtccgttgatggtgatatactcccccaccggatcggtgaagtcgaagagggcctccttggcgccggcccccaggacgcagacggcgttggtcttctccacgtccaggtaggacatctcccgcccgccggccagggtgtagttgttgcacaccccgtactggtcagagcccagcttgatgtgcatggcggtctgccagtcgtagttcccgttgttccagtcattgatgcgaatggttttcgctccatactggactgtagcggtctcgttgatctccacatcaggggtgatcccctccaccaggtcgctcatggtcaggcagtaatcgtacagcttctgggaggtctcattgttggtgtcgtagtagccgtaggcctgtacggtgatcttgttgtcgcccagcttttcaaacatctccatggtctgccggttctggccctggaccacggacaccatgatgaccaccgaggccacgccgatgatgatgcccagcatggtgaggaaggaccgggtctttttcatagagatggacttgaaggccattttgaaagcctgccacagattcattcccaatccacctcctgtgcgtggtccgcgatgatctttccatcggacagccgcaccacccgccgggcggtggcggcgatgccatcgtcatgggtgatgagaagaatggtggtgccctcccggtagaggccccggaggatctccagcacgtgtcggccggtcctggagtccagagcgccggtgggctcgtccgccatgatgatggggggatgggtggcgatggcccgggcgatggccacccgctgctgctggccgccggacatctcactgggccggtggtgggcacgctccgccatgcccaccttttccagcgcctccatggcgatgtcctcccggtcccacacggacaccccctgatagatcaggggcagggtgacgttctccagggcatccagctcctggatcaggttatacccctggaagatgaagccgatctccctgttgcggatgtgggccagctgcttgtcggacagggaggtgacgtcggtgccgttcaggtggtactccccataggtggggatgtccaggcagcccagcacattcatcagggtggacttgcccgagcccgactggcccacgatggccacgaactccccccggtcgatgtggagcgtgactccgtccagagcccggacctcactctccttgccctcgttataaattttgtaaaggtctttgatctcgatcagcatgagagcacctcgatcaatagccggagctgtaatcggtgaccatgaagttgacgaagacctcgtccccctcctgaacgccggaggtgatctccacgttttctgtgtccgagatgccggtggtgacgatgacggggtagaagccatcctcctccgaggggaactggcgctgctggccgggctcgacctggggcaggtccagctccggcacatcgtccggccgggcgtcccgcttgacgaagaccaccgcctgacggtttccatccgcgtcggagacatatttcaccgcgctggtgggcaccaggatgcagtcactggactcgctggtaacaaaggagtactgcagccaggccccgtccatcagggagccgtcgtagttctccaccgtcagggtgacgggatagttggtcatgccgctgccgctctcagcctttcccatgtcgatggcggtgaccacgccctgataggtggtgccgttccagtccagatccacgtagtccccgggcttgatgaaggagatgttccggtcgtccaccgtgatggtgaccagcatggtggtggtgttggagatgatgaccaccgtgtcgccgctcttcacctcggccccctcggagagggtgcaggaggtgacggtcccgtcgatcggggccacagcgttgaaatccgccagggccttggaggcctcatccagcgcagtctgggcctcctcgatctctgactgcttggcccggatgtcagagtcaatggtggaggaccccaggtagagcagggcctctcccgcctccacattggcgtggtcgagcaggttgcccatgcccaccacggggccgttggccttggcctcgatggtgcgggtctcatagaactcggtctgcccattctggtaggggtagatctgggtgccatcgccggcggtgagcatggcggaggcgtccatcccggcggtgagggtgccggggttgtcaaagaccactacggcctcaaagtggacggccccttccggggatatgtagctgaccttgttgatcttctccactgttccggtgaaggtgcgcatcaccgcggggatggacacgtccacgctctggcccacagagatctggtcctcataggcgtagctgaagtagagggacagcttcagctgcttgtcgttgaccagggtggccaccacggtgcccttggacacgtcctggtcgatctggaactccttcacgtcctggagcttacccgcaaagggggcccggatcgtcaggttggcggcatcctcttggaggtcagacaggtccttgtagaggttctccaccttctcctgggcggtcttcaccgcatcctcagcggcctggctgaagatggtgtagaggggctggcccgccgtgacggtttggccgggagcgatgagcacctcctgtacggtgccgccggcgttgagggtgatggcggcggtctccttggccttggcggtgccgctgccggacaccttgctctggatggagccgaggaaggcgggctgggagaagatctccccctcctcgccgccggtgctgaacaggaatcggtagagtgcaaagccgccggccgccagcagggcgagcacaacggccagaatgatcaggtttttgaccatctttttctttttccggccgccgttgggcttgaccggaggccgcggagtcgtctgtgcgggtgcgggcgcggtctcggtggtctgaggtgtggtgatctctggcatttcaagttcctcctacgttttttgccgggcaggcacaaggtcaggtgcgagcctgtccagcatgtccattatatgcccagggccgccgggtggcaactacataagaattacaattttttaagattatcttaagaaacgtcctcttctgcagaaatgtgccccgggcaaagtatctctgcttatctagacgaagaacgggcacaaaatgttccagactttaaaaatttttctggccgatgggctggagttgatgcgagggcgcttttcttccgggcagagctggcaggagattgttgacgaattttcttccttccgctacaataaagccagttccctgcctctggggcaggaattttcattccgccgcagcctggtctgcggctccaggaggtatgtccccgatgtcttctgcccgaaacaaacggctggtggtctccgccctgatgctggcactggcccttgtcctgccctattttaccggcggcatccccgccatcggcaatctgctgctgcccatgcacctgccggtgctgctgtgcggctttctgtgcggcggcgggtggggggccggggtgggactggccgcccccctgctccgctctctgctggcgggccgccccgaattctttcccaccgccttctccatggcctttgagctggccgcctacggcctgatctccgggctgctctaccgccgcctgcccaaaaacgccgccggcgtctatgcctctctggcaggggccatggtgggcgggcgaatggtctggggggcggtgcgggccctcatcaccctggcctcccccacccccttcggcctggccatcttctggaccgaggccgtcctcaacgccatccccggcatcctgctccagctggtgctgatccccgctctggtcctctccctccagcgcgcccgcctctccccagtccaatgacggccctggaacagatgtgcgcggccctgtcccctctggccgggggcggcgggagggtgctggctgccctggacggcccctgcgcctcgggaaagaccaccctggccggccaggcggcccggcagctgggctgccccctggtccacatggacgacttcttcctgcccccggcgcgcaagacccccgcccgcctggcccagccggggggaaatgtggactgggagcgggtgcgggaccaggtcctggtccccctgtcccggggagagcccgcccggttctccccctaccgctgccataccggggcgtatgggcccccggtgtccctctcccccgcccccctggtgctggtggagggggtctacgccctccaccccgccctgcgggacttctaccgcctccggatctttctggaggccacctggccggtgcggcgcgcccgccttctggaccggggcgggccggagctgctggcccgcttccagggggagtgggtcccgctggaggaccggtatttccaggcctgccgggtccgggactgctgccagctggtgctgagcggtcaatgacacgcgccccatccccctgcagctccgccttgcaaagcgcgtcaaggcatcgtatcatcaatagacatcaaacagcttctgttttctgcggtcggaaagaggaggtcagtgatgtacagggtcatcgtgatcgtgctggcgtttatgctgggagttttcattttcttcggagccgactccgcgaaaacccgcggtcagaaaaagtgggtcaacgtgatcggcaccctgctcgtctggatattggcggtccttggggcaggtgttctggtcctgtgctgtctggcggcatgggactactggaagaccggcgatccagaaacggccgtctccttagggatcaccgccgtgatcctcgctgtcgcgatttatgtcctgctgcggtcttatttcaaaaaaacatagccgggaaaacagcctcgtcaccgccccgcaggtcccgatctgccggtgtgtccctgccccgtgcggggcgggcgcggcaggggtgcccttcccccggggccgcaaagcgaacttgggcgtcatggagcagaattggaaaaggtgcagccgaaagatcggctgcaccttttccggtatcacggggcatatgggctcagaccgcctcgtagatggccttcatgcccttataggtcatatagcagtccagcttggacaccgtctcaaagggggcatgcatggacagcacgggcacgccggcgtccagggtgtcgatgttccgctccgccatgaagacggccaccgtgccgccgccgccctgatcggccttgcccagctcggccatctgccacaccacgccggcgccgtccagcacccggcggacataggccaccagctcggcggaggcgtcggaggccccggacttgccccgggccccggtgtacttgcacaggcccatgccgtagttgacaaaggcgttgttgcgcttctcgtacacctccgcgaagttggggtcataggccgccgtcacgtcggcggacaggcagaaggacttctcatagcaggcccgcaggggcacgctctggctctggcacaggtcctccatgaaggtgtcgaaggccctggacttcatgccggacaccccctcggagccgatctcctccttgtccgccagcatgcacacggcggtgcgctccggcgtgcccagctggagcagggcggccagggaggcataggcgcacacccggtcgtcatggccgtaggcgccgatcagggagcggtcgaagccgatgtccaccgcccggaaggcggggacggcgcacagctcggcggagaggaagtcctcctccacgatgccgtacttccggttgagcagctccagcactgacagcttcacccggtcgctgccctcgtcgtcccgcagggggcggcttcccaccaggatgttcaggctctccgcggggatggcctcccccaggggcttcttcacctggtcggtggccaggtggggcagcaggtcgtcgatggtaaacatggggtcgtccggcccgttgcccaccgagacccgcaccacctctccgttcttcagcgccaccacgccgtggagctccaggggaatggtcacccactggtacttccggatgccgccgtagtagtgggtcttgaagaagcccagctcatcgctctcgtacagggggttctgcttcaggtccagccggggggagtcgatgtgggccgccccgatgttgaccccgtgctccaggcctttccggcccatcacggccagcatgatggccttgtcccggttcacctggtagatccggtccccgggcttcagctccatcccccggacataggcccggaagccggcggcctccgcctgggcgatggcccggtccacgcactcccgctcggtcttgcccgcgtccaggaactgcttgtagccggtgcagtacgcctccagcgccgcgccctcctccgcgtccagccggtcccagccgttcttccgctcatagaccagggcccggcggagctgctcgccccgggtcagttctttttcttcactcataaaacagtcctcctttgatctcacaggggcgctttgcgcgcctcattgttctcttattatgccgcgcacgggcgcacactgtgcgcccctacacgatctctttcaaaaactcctctgccttccgggaaaactcctccgcggtgccgcagtcgttgtacaggatatgggcgcagccctccgcaaagaactggtccggccgctgggccctcacccgggcccaggcatagtcctccgaaatgccctcccgggccatgatgcgcgccacccgcgcctccgccggggccagtacggccactgtggtggtgcacaggtcggccagaccgctctccagcagggcgaaggcgtcgatggccgtcaggccgatgccccgggacctgttctctttgaccatctgccgggtgcgctgaaccacggcccgctgggcgatggcgttcagccgctccagcttggccgggtccccgaacaccagggcgcccagcttttttctgtcaatggccccctgtccgtcccggagggggccaaaggccctctccaggctttcctgtaaggctctatcactttccagcatttcgtggtacacggcatcgcagtcgatgaccgcgccccccagtgcctcgatctccttcaggacggtggtcttccccgccccggtagggccggtgatgccgatgacagtcatggtgatccctcccacttcaaatgcggacatgcctcccggagctgctcctccagctcccgggggctgcacagctgcttccggaccttggcgaacctccggccgtcccggtcccgtatcaccacacaactccgctttttggtatagctcccgatttgggaatatggcagggccttcatgcgacccagcaggtcgaaatagatcagctgatctgcgtcgccgtccagtccctcgtttcgcacccgcagatatcgcgccagcagccacaggacgaacagccccagaagggccatcagggcaatctgccccggcccccatacgtccagcacgacacacagcgcgagaaagaggaagaggaatttcagcagggagcgccgggcgtgcctgcgctccatacgccaccggaagcgtttccatgtgtactcttccatcgaagcacctcctttccgggccggtcagggggccttggcgatgcggcggcccacccagtaggacacggtgaaaatgaggatcagcagcaccgccgaggcgatgcctccccacaccaccagcaggctgcccatgtaggtgccgtccacgatgcacaagggggtgaccagcatcatcgccccgggcaccacgccggagataaactggccgaagagggcgatggggatgctccgggcggcgtcgtccaccagccagaactgccatgccccgcacagcacgctgaggagcaccccccagtggccggccaggaggctgagccagaagggccgcctctgccgcccgcagtccatccccagccaggcccaggtcagcaccatgagccagggaagcagggtgaacagcagcgtccccaccaccgggatggccgtcgagtagacatagcagccccccagggccaggggaatcagccccatccaggggaaatagtgggaccgcttcactgccctcgctcctttccttggtcaggcctccacgatgtggaagcccgccgctttgttcaggcggttggtgaccgccagcccgatccctccgctgtccgggcactgggcccagatggcggagacggcggtgtggtcgaaggcccgcagggcgtcgaacacccgccgggcctgctcccccttgtcccccgccggccccaggctcatgacgggccgcgcgccccccgcatacatcgggaggaactcctcaaagcagatgaccccgtcccccggtccggcgtgggcggcgatataggccgcgctccgctccggctccccggtgaccacggtgacgggggccttgggggcgtagtggcggtacttcatcccaggggcccggggcctctcccccgcccccatcagccgggtgaccgccgggtccaccgccacctcccccagggccgcccgcagctgctccagggtgatcccccccggcctcagcaggcgggggggcgtgcatgtcaggtccacgatggtggactccacccccacggagcaggggccgccgtccaaaatggcgtcgatcctgccgtccatgtcctccagcatgtgggcggcggtggtggggctgggccgcccggaggtattccctgagggggccgccaccggcacgtccgccgcctggatcaccgcccggcacagggggtgggcgggacagcgcattcccaccgtgtccagccccgccgtcacctgatcgggcacgttgtcccgccgccggagcaccatggtcagcggaccgggccagaagcgccgggccagctcataggccgccgccgggatgtcccggcagtaccgctccagccagtccgcccccgggatgtgcaggatcagggggttgtcctgggggcggcccttggcctgaaagatccggcccaccgcagcggggtccagcccgttggcccccaggccgtacaccgtctcggtggggatgcccaccaggccgccggcgcggagcaggtccgcggcggtctggatgtcctgttgggagaggcgctttgtctccatccttttccacttcctatctctcttgggcgcgtgcccgttttccgagggtcccatccgggcggggcgtgccccctgtgcagcgcacagcggcccggcgcgctgcttcgtcggaccccgttttccccgccggtctccctatggggcccgcgccctgcgtaggggcgggcttggcccgcccggcttcagcggcagggtgtccccaaatggattccgccccgcagggcggaaccccctctgacaaatcctgtgactgagaccggctcggtggaaggacgccccctcatccgtcacggcttcgccgtgccaccttcccccctctgggggggaaggcttgaggtggggacacggcatatgccgcgacacctttcctctaaggaaaggtgtgtgggagcttctatggggcccctcaagggcttccagcaggcggaagctgttccccctgccggacggagaacacgatgtggagcatatccatcccatagtagtgctttatgaaagagccccgctcctccatcccgatgcaccgagctactctttgggatgcaaggttgctgtcccggatgatggagaatacctcctcaaatttcagggctgaaaaggcatggtcccggcaggcccgggccgcctcaacggcgtagcccttgtgccaggccgtccgctccagaagatagccaacctcgggtatccgtgtgccatctcccagcccctgccaagtgagtccgcactggcccaccatctccccggatgttctctccactgctgcccacaggccgaagccatcctttcgataccgcgcctgctggcggcaaagccattcccaagcctcctggtctgaaaaggcatgctcataggcgtacattactgaccgatcctgaagcatccggcacagggcaggaaaatctctgtccgtcatttcccgcagtatcagtcggtcagtctctaaaatagtctcagccatctcccagcaccgcctttaccagctcctccggcgtccgggccagacagtcggccccctccgcctccagctccgcccgtccgcggaagccccacagcacgccgcagctggtcaggccgccgttcctggcggtgcggatgtccacatcgctgtcccccacgaacagagtatcctccggggaggcccccatctgctccatcagccggtgcagcagggtggggtccggcttggtgggcaggccgggcagggccccctgcacccaggggaactgccccgggtagtagtcctccaccaccgggcccgccagcgcgtgggccttgttggacagcaccgccgtccgcacccccgccgccctcagccgctccaccgcctccggcatcccggcgtagggggcggtcttgtccgccctgtgggcgccatagcgctccgagaactcctccagggcccgggccagcccctccggcgtccgctccggggccggagcaaagcgctccaccagcctgggtatcccgttgcccacgaagcgcttgtactcctccaccgtgtggaggggccacccgtgccgggcgcacacccagttggccgcatccgccaggtcgtctatggtattgagcagagtgccgtccagatcaaagatcacattttggaacatagcggcccggcctcactcgtagaccccgatctccatgccccccagctccacccgggtatcccggggaaactgggcccgctggagataggctttcaccgccatctgggcgaatttggggttcaccttctcgtcctccagctccagatccagccgtccgccggggccgtccgtctggccgccgcacaccgcgccgccgtcctccagcacctcgttcagctcgcccaccacgtccgccaggctcttcccctggggcagggcggtatagtgaatataaaaatccatgtcggtccctcccgatcctttcgtcgtcgtttactgggtctgcttcagccgctccgcctggtcggcggcggccagggcgtccatcagctcgtccaggtccccgtccatcacgctttcgatcttgtacagggtcagcccgatgcggtggtccgtgacccgcccctggggaaagttataagtccggatgcgctcgttgcgcatccccgtgcccacctggctgcggcgctcggcggtgaactcgctgctgcgcttctcctgctccgcctcgtacagccgggaagccaggatgcgcatggccctgtcccggttctggaactggctgcgctcctgctggcactccaccaccatgcctgtgggcctgtggatgagccgcaccgctgaggaggtcttgttcacatgctggccccccgccccggaggcgcggaacacctgcatctccacgtccgccgggtccaggtccacctccacctcctccatctcgggcaggacggccaccgtggcggtggaggtgtggatacgcccgccggactcggtctccggcacccgctggacccggtggacgccgctctcgaacttcatccgggaccaggccccgtccccctcgatagtgaaggagatctcctttacccctcccagttccgtcatgttcaggctggccacttccgtcttccagcggcggctctcggcatacatggagtacatgcggtggagggagtgggcgaagagggcggcctcctccccccccaccccggcccggatctccacgatgacgttcttcccatcgttggggtccctggggagcagcaggagctggagctcccgctccagccgctccagctcctgcctggcctgctgctgctcctcctgggccagctcccgcagctccgggtcggagagcagggccccggcctcttgctcccgctcccgggcccggaggtaggcccggtatgtctccaccaccggggacagctcgttctgctccttgttcagccgggccacctgggcggggtcgtcataggtctccggcgcggccagcctggcctcgatctggctgtatcgggcctccacggccgccagcttgtccagcatgggcatgctcctttccgcttgatgcccgccccaggcggtccaccatgatatattcctcttctgtctcccgtactatgcggaatcccactctccgatacaggcggaccgccgggttccccttctgcacggacagggagacctgacggaccccctcccgctccaaagcatccatcatggcgcgcagcagctctgttccgatgccctggccccggtactccggatacagcgccgccgcaagggagggcgtctcatcgtcgatatgtccgtagtcatccataagccggcaccatacactgcccaccacccggcttccgtccaccgctgccagagcccggtccagcggtccacttccaaatccttggaaatagacccccagctccggccggtctgccaccgacctgggcggcggagcgtcccccggcgggacgtagatcgcctcatagaggaggtccttcagcgtcgcatactcctccacccgcatattccgaatggtgatctgatccacagctgcctcctctcccccggcccctcaccggtccaggaaaaatgacttgaccagggccagcggctcccgcacatacatgtgcagccgggagggcaggtggctggagggggccgccagggtggagacactgtcatatccggcccgttccgccagcatccgggcccgggtcaggtggaagccgttggagaccaccaccaccccctgggacagatcacagccctctgcctccagcagctcccgggaatagcgcaggttctggtcggtgttgtgggaccgctcctccagaagcagctggtcctcctccaccccccgctccatcaggtagtccgccatgcaccgggcctcggtgacgggctcgttgtccccctggcccccggagaccaccaccgtcaggtccgggtggtcctccaggtagtccagcgcccggtccagccggtcccgcagaaggatggagggctccccgtcgggcatcacctggcagcccagcaccaccatcgcccgggggtccccctggatatggtcgtaggagccgtagagcaccgcgccgaacagcccggcaaaggtcacggccccggccagcaccgccgagagcagcagcttctgccagagacagagcttctttcctttataactgctgatctgccgcttcatcctctggcctcctccagctccgccgacaggcgctcccaagtcccgtacagcttcaggatctcctcctccagcgcctcccgctgctcatacagctcctggagcttcagatagtcggaggcggcctcctcgatctggagcccaagctcgtacatttgttcctctgccttagccaccgcccgctcggcggcggccacctccttctccaggttcttggtgccgccgggccgccggggcttctccttcttctccgccggcgccgccgcgggggcggggacggcctgggcctgcttcctctcccgggctgcccggtactcgccgtagctgccccggaagtcggtgacctgcccgtcctccagcacccacacccgggtggcgaagcggtcgatgaagtagcggtcgtgggagacgaagagcaggttgccctcgtactcctccaccgcctcctcgatccactcccggctctggatgtccaggtggttggtgggctcgtccaggatcaggaggttgatcttctcgtccatgagcatgcacagccgcagccgggactgctccccgccggacagggcggagaccggcttgaatacgtcctccccccggaacttgaaggaggccagccggttgcgggcggtctgggcggtgcagtccagctcatagagcatggtgtccagcaggctgcgctccgggtggtcgaagtggatgatctggggcaggtagccgatcttcaccgtggggcccatgcggatcttcccctcgtcgggcccctcctcccccatcaggatcttgatgagggtggatttgccggtgccgttgtcccccagcagggcgatgcgctcgccccccaccacctccaggtccaccccggagaacagggcgcgctggccgaaggatttggacagccccttgatggtgagcacctcatccccccggaactcccgctccccgaagcggacctccatcttccgctcccgggtgggcctgtcggtggtccgcatccgctcgatgcgcttctccatggactgggcccgcttgaagatcttgtcgttgcccgaataggcccagatccgcagctgctcggcggccttctccagctgctggatcttggcctgctccttctcatactgcttcagcttctcctggtagcggcgctccttctccaccacatagaagctgtaattgccggagtagaactccgccttcccctcctggatctcgatgacccggtccaccacccggtccaggaaccagcggtcgtgggagaccgccagcaccgtgcccttgaacttgtccagatactcctccagccactcggtggccttcaggtccaggtggttggtgggctcgtccagcagcaggatgtcggtgtcctccaggatcagccggcccaggttcacccgggtcttctccccgccggagagccggtcgaagagctgttcccgcatccccgggccgatctgaaggccgctgcacaccttgttcttccgggtgtcggtgtcatagccgcccccggcctcgaaggcggcggtgagctggtcgtaccggcgcagcagggcggggtcctccccccgctccatccgggcggccagctgctccatctcctcctccatctcccgcagggggcggaaggcggtgtccaatacatcctccaccgtgtagccggcggggtagaccgggatctgggagatcaggcccacccgcttgtccggggccaggaccacctccccctcgtcccagtccagctggccggtgaggatgcgcagcagggtggtcttgccgcagccgttcttgcccagcagtcccacccgctcgccggagtccacctgaaaggtgagcccgtccagtatttttttgccgacctcaaattccttgaccaggccggaaatggcgatatcgatcataacggtcctctgtctctcctgtgttggcctctgggaagggccctcccgcaggcgggccttccaaacggtccgtccgcgggagggccctgggggtcactccgcctccggggtgatggagagcaggtaagcggtcagctcctccagctccatcccgcgggacgccttcactaaaatggtgctgcccggccggaccagctggtccaggacaggcttggcctccgccttgtctttgcagtggtacaccaggggcacgccggagttccgggccccctgggcgatgtgctccgccagctcccccaccgccaccaggcagtcgatgcgggccttgcccaggcactcccccacccccgtgtgcagagcgggggcgaagggccccagctcgaacatgtcccccagcacggcgatgctccactggctgcgccggtcggacagcacgctgatggccgcccgcatggactgggggttggcgttgtaggtgtcgtccaggatcacgatcccatccccccggtagaggatattcatccgcatccgggtggggacgaagcggaggatgccctccacgatctggtcctgggtgagcccgaaccgctccccgatggcggcggcgatgagggcggggtagatcatgtgctcccccagggcagggatctccacctgccggtccatccggggggttgtcatctggcagaggatgcggctgtccccgtccccctccagccggcgggcccggtactccaggccctcctcccggccgcagaagacggcgggcaccggggtgcggccccggagggatgccagcatgggatcatccccgttgagcaccaccagcccgccgggccggatgtggggcagcagctcgcacttggcccggaagatgttctcccggctgcccaggcgctcgatgtgggcgtccccgatgttggtgatgactcccacgtccggctggacgatctcccccaggtagtcgatctcccccgggcggtccatccccatctccagcacgcagatctcacagctcctgtccagccgcagcagggtcaggggcaggccgatgttgttgttgtaattgccctcggtcttgagcacccggtaccgggtgctcagcacggcggcgatcatgtccttggtggtggtcttgcccacgctgcccgtcacggcgatgaaggggatggggaatcgggccttgtaccaggcggccaggtcccgcagggcccgctgggtgctggccaccttgatatagaatctgtcggggcggtagctctcccgttcccgggcggtgaggcagcccagagcgcccccctccagggcggcgttgatgtaggcgtgcccgtcgaaccgctctcccaccagggggatgaacagggagccggggtggatggtccggctgtcggtgtccacccgctggacgatcacgttctcatcccggaagtcgcccagcagcgtgccgtggacggcctccagaagctgggccagagtgatggcttccatctggtcaggctcctccttttctggctttcagagacgcctccacgatggtctggcacagggcgccgtagccgatgcccaccgcggccgcctcctggggcaccaggctggtgggggtcatgccgggcagggtgttgatctccaggaaatagggggtcccgtccggcgtcacgataaagtccgcccgggcgtacacggacagcccgatggtccgaaagacggccagcgccgcctcccccagccgctgctcccactccggggggatctgggccgggcagacctccagggccgcgccgggctggtacttgttctcgtagtcgtagaagccctccttggggatgatctcgatggagggcagggcccggtcctccagcaccgccacctggatctccctgccctggatatactcctccagcacggtgcggccccccagcttccggctctcctccagggcccggcgcagctcctgtccgttccgggcgatgaagaccccgatggaggagccgctgtccaccggcttgaccaccacaggcaggcgggtctgccgggcaagctcctccaggttctcctccgtcacggtgacggagcgccaggccggggtggtgacctgacccgccaccaggcgcttggtcaggtccttatccatggcgatggcgctggccaggcagccggagccggtgtagggcactcccagcagatccagggccgcctggatgcggccgtcctcgccgcaggcgccgtgaagggccagatagaccacgtccgcgccggcgcacagctccagcaccccggggccgatggacgagggactcctgtcccggcgggcggcgcgcacctgggccaggtcgggggcctgccggccgatccgcttgaacgcttggggcaccggggcgtcgtagagggcctctgccgggccctccaccccctctgtcccgaaaaacaggtccaccagcgccacctgatggccctgctcccgcagggcctcgctcaccatagcgccggaggacagggagacgttgcgctccgggctgagcccgcccgccaataccacgatcttcatcctattcaacacctcatcaggtctgtcttataataatatgccagccaaatattttagcacatatccctggaatactcaatggccttttctcattttgcctccttccacgggaattttatcccttttcccccgcttttgcgctctgtcccgccctccttgccgttgaactcacccaaatcttatgatatgatggcccgtgtggtgacaaaaacagaggccggatctgcatcttttccgcagagccccgggaaattccctcagccgtcaccgcacgcgccaagcaagaacgctccgcccggcgggcggggcacccctttggaaagacgaggtgggacctgtgtccgatcaattctcccgctcccgcatgctcctgggcgacggcccccaggagcggctcttccacgcctctgtggccctcttcggggtgggcggcgtggggggcttctgcgctgaggccctggcccgggccggcatcggcgccctggatctgtacgatgacgacaccgtctccgagagcaacctgaaccggcagctcatcgccctccactccaccctgggccgccccaaggcggaggtgatggcggagcgggtccgggacatcaaccccgcctgccgggtgcgggccctgcggatgttctacctgccggaaaacgccggggaggtggacctgtcccggtacgactatgtggtggacgcggtggacaccgtctccgccaagctggagctggccgtccgctgccatgccctgggggtcccgctcatcagcgccatgggctcgggcaacaagctggacccctccgccttctccgtctccgacctgtccaaaacggagggctgccccctggcccgggtgatgcggaaggagctgcggaagcggggcatccaccacctgaaggtggtctggtcccgggaggagccccgcgcccccctggcccccccggaggcggagctcccccccggcggggacacccgccccgcctcctccccccgccgggccgtcccgggctcggtctcctttgtccccggcgccgccgggctggtgctggccggggcggtcatccgggatctggccggtctctgaccgcctcaaaaaagctgccccctgtataggaacagacctatacagggggcttttttcactctttttcagtcccgccgggctcagcccaggatcagggggccgatgaaggagtacgccaccacgaagacgcaggcaaaggcaacgctgatccagcaggcctggagggcctccttggtgttgctgcactgggcggtgcccagctggccggcaaagttggtggtgggataggcggagccggtgagccgggtggccgccaggatggagacggcgaagcagcccatgggcaggcccacctgggtggccagaccgccgaacatgtcggtgatgatctggatctccgccacggcggccgcctcgatgccgaagccgcccaccacagaggccaccagcatgacggcggtggggctgttgcccgccaggccgcccagcaggttggagagggcgtcaaagccgccgcccagggtgaccaggttgagcagcacgtcgatgctcacaaagatcaggaacatgttggcctgggaggccacgcccttggtgatgcagtccacggagcggtcgatctcgatgccgccgaagatggccaccacggcagccaggacgatcatgaccatcagggcgtagttggtgccctgcttggtggcgatgccgtagcccaccagaaggacaaaggagatcaggaaagcgaccgtggtccgcttctgacggggggtgatgaccacctgatccaggtgctgcacgtcctcccccagggcatagccctccttgccgaaggtgcgcttctgggcgcggttcgcgcccacccaggcgccagccagccagaacacggcgaaggggatggccgcctggatcatcagctcgccgtaggacaggccggtgacctccatggtgatgagggtcacgccggtgagggggcccaggatcaggccgatctcacccgccaccttgaacagggtggccaccacggtgggggtgacccccagggaggccatgatgggcagcatgatgggggcgatgacggcgttgccgccgcccagggtgcccagcaggccgcagacgatgatggacaccaccaccagggcgatcttgcctttggtctgggtgttcacgccgatgcgcttgacgatccagtagaccagggtgtgggtgacccccgcctcgctcatcagcacgcccaggccggcgcccatcatgatgatgaggccgatcagggccgtggaggaacccagcgaggtggcgaaagccttggccatggcccccaggtcctgccccagcagcagagcgcccaccagcacgcccaccatgatggcggacacgttgctcttcccccggaagatcagcacgatcatgaccaccagggggatcagagccagcagagagggcgcctgaatgatagaccaactacctaattccatatctgtttctcccttctgtccgccccggtccagacaggcaggccgggacggctcacacatattgttttctccctgtcctcagacaggtcctccgctctcgcgccggatgaccgccccctttctccctccggcagacctgccctggcgcagggcgaattcgccccccaccagcacatggcagatgccctccggcttccgcacggaatcggtgaactccgaggtgtcccggacccgctccgcgtcaaagactgtgatatcggcgatccggccctccgccagggtgccccggtccctcaggcccaggatgtccgccggcaggccggtcagcttgtacaccgcgtcctccagcggcatcagctggtgctcccgcaccagccgcaggaagcgggggaaggtgccgaagctgcgggggtgggggtcggtgatggtaatggagcggtcaaaggacaggccgtatccgtcgctgcccaccgcaatgtccatgtccttcatgatgttgagcatgtcgccctcatcgatggagaagtagatgcaggccacccggccgccgcagcagtccagggcgtggaccaccgtgtccgccggggacagcttcagctcctccgccagctccgccacggtcctgccctcccactccgggcggcagccgtgagtgccggcgatcatcacccggtccgctccgccgcggtcctccatctcggcggcgatctccgccttcagctgccgggaggggtcccgcagccgctccagcagggcggcgcggcctccgtcgtgggcccacttgggcaccagggcggtcatagaggtggaggtggcggtataggggtactggtcgcaggtgacgttcagcccctcccgccgggcggccgccagcttgtccagcagctcccgggagcgcccccactggggcctacccatcagcttcaggtgggagatctgcaggtgcactccagagcggcgggtgatgtccagcatctcgtccactgcctggaagatgcggggcccctcgttgcgcatatggacggtgagcagggcgtcgtacttcttcagcaccttggccagctccaccagctcttcccgcttgcagaaggcgctggggggatagatcagccccagggacatgccgaaggcgcccgccctcagctcccgctccagcaggtccttcagccgctccatctcctccgggccggggtcccggtccacaaagcccatcaccgccccccgcagggtgccgtggcccaccagctggccgtagttggcggtgcagccgtgggccgccaccgcccgggcatactcctccaccccgtacaggccgtccaggctccggtccttctcgttgaggaccacctgactgaacatgctggtgtcatcaaaaaagtattggacgatctcccggctgttctccggcaggctgggcaggatagaggtgccgcagttgccggtgatctcggtggtgatgccctggaagagcttgctctccggctggaagctgagcagggggcaggcatcggagtggctgtggatgtcgatgaagcccggggccaccgtcagcccggacacatccaccacctcccgtgcctcctccccctcatccggggcgatgcgggcgatgcgcccgtcccggatgcatacgtcggcggcatagggccgggaacgcgttccgtccaccaccgtgccgccccgcagaatcagatcatacaaggctccttccctccttttttctccagaggcccgccgggggagccctcagctcccccggccatctctccccggaaaggggagggatgaccgccgcggcggtccctctatattggcaggccagatcgggtcagcccttcttcagcaccgtgcccgttctggagccggtggccgcgccgtccttcagggcgaaggtgccccccaccagcacgtggcggatgcccgccggctttttcaccgagtcggtgtactccgacaggtcccgcacctgctccgggtcaaagaccgtgatgtcggcgatccggccctcctccagggtgccccggtccttcaggcccaggatgtccgccggcaggccggtgatcttgtacaccgcgtcctccaggggcatcagcctgtggtcccgggccagctccaggaagcgggggaaggtgccgaagctgcggggatgggggttggtccgggtgatggaccggtcataggagaagccgtatccatcgctgcccagtgcgatgcgcatgtccctcatgatgttcagcatgtcgtcctcgttgatgcagaagtagatgcaggccaccgagccctcgcaggcggacagcacatgcatcactgtgtccaccggggacagccccagctcctccgccagctccgccacggtcctgccctcccactccgggtggtagccgtgggtgccggagaccatcacatgggccgggccgccccggtcctccatctccgccgccgtctcgtccttcagccgctggtcgggggccttgacccgggccaccagggcggacacgccgccgtcgtgggcccacttgggcagcagggcggtcatggaggtggaggtggcagtgtaggggtactggtcacaggtgatggtcatcccctcctgccgggccgcctcgatcttgtccagcagctcctgggagcggccccactggggcttgcccatcagcttcaggtgagagatctgcaggtgcaccccggagcggcgggtgatgtcgatcatctcatccactgcctggaagatgcggggcccctcgttgcgcatgtggacggtgagcagggcgtcgtacttcttcagcactttggccagctccaccagctcctcgctcttgcagaaggcgctggggggatagatcagccccagggacataccgaaggcgcccgccttcagctcccgctccagcaggtccttcagctgctccatctcctccggttcagggtcccggtccacaaagcccatcaccgccccccgcagggtgccgtggcccaccagctggccgtagttggcggcgcagccgtggtccgccaccatccgggcgtactcctccaggccggacactcccagctggggcaggctcccggcgggcagctccagctggctgaagaagtagcggccgatctcgtcccggctctccggcgtgctgggcaggatggagatgccgcagttgccggtgatctcggtggtgatgccctggtgcagcttgctctccggctcatagtccaccagggggcaggcgtcagagtgagtgtggatgtcgatgaagccgggggccaccgccagtccggacacgtccaccacctcccgggcctcctcgccgccctccggggcgatgcgggcgatgcgcccctcccggatgcagatgtcagcggcatagggctgggaacgcttcccgtccaccaccgtgccgccccgcaggatcagatcatacatagggatacctccattctttctgctgtctcgcttgtctgttgggatgcaaaaggacgcacctgcccggcggggcgttccgtcccgctgcggttcagtgcgtcctgctactggatggcagaaaggacaagtccacttcccgccgcatagcaaaatgctgactattcacgcgcctgactggtgctgtccaggaacttcatccgggcggaccgggcggcggcgtacagcacccgcttggagtcccccagatagttgtccaaaaggctgttccggatctcctccaggtcgtccaccaggctgtgccccacaaagacggagcggaggaagcgccgggtcagctcgcagaccatattggtgtctgcgtccacgatcaggccggtggcccgttccaccaccaggatgaggatcaccttctcgtgggccaggtagatggggttggtcttctccgggcgggcgtcccccaccacgcagatatgctcccccgggttgaaatccaacataaaaaacatccctaagtttgttgctgttatcaaattaccacaaaagcggggccttgtcaaccgccccgctccaacatcccgggaaaatcactgtgtcagccacagctttttcgttgtggctgaggcgcggtttggatggaaagatgttcttgacagcgctcccgtccccccgcgggggaaaaacggtcccctcccccctctctcctccgccgcccggcgcggcacggtgaccatcgctcttcctatcactataacagagataacaatgacattttctatttctctgactgttactgttacggggccctaattgcacggaaatgtgccactttctctccccttttccgtttaggagtaaggagggatgcggattggagaacgcgaaacggggttttgttttctactttgacaactactttgtggtggaggacctccccccggaccagcgggggtggctgctgtccgccctgtgcgtctacgccgagcgggtgtggcgggacccgtcggtgaccatggaggagatcctggaccactacccccagatgtccggccagaccaggatcgcctgcggctttctgggggcggccgtcctgcgggacacccagcggtggctcagccagcggcaggcccgggccctgcgccgccagcagggggaccgtccgggcaggcccccggctcccgcccgggagcgctcctggagccgggagcaggacatggagctgacccggaagctggccgcccgcctgcgggaggaggcggccatggcggaggcagggggagcagagggacaggactgacaggaccgcatgggcgcgcccatgcggtctgttatcccgggcggtgaaggtgaactggctgccgccggcgtgggtcctgtccctggcggccgcgatggcccgccggcaggtgcctgctcttccgacgccggtcctgtgatgccggagaacgcggagatccacttaaaaagagcatggccaacacacaaaaaaagagtgaaggatctccctccactcttttttctgaagatgcaagtaagcctgtaagccgggttctgtcttttaagacagccatctatctcgacgcaccgttgccggtgcgctccagccgcctccccgggacggtcgggccgacctgtgtgtccctccacggcgttgctccggatagagtttacagcgacggacagttcccagccgtcgggtgagctcttacctcacctttccacccttacctcaccggcgcaagtttcatatccctcgcttcccccaagggaaagctcgctcattccaccgcgcctcctcccccgctcacgggggatcgaggcggtatatctctgttgcacttttcctagggtcgcccccggcgggtgttacccgttatccttgccctgcggagcccggactttcctcacaggcgggcctttcgccccgcccgcgcggctgtccagcttacttgcccgtctatgatacaggaaaaccggcggattgtcaaatccatctgcggatggcccgccgctcagtctcccaaggcctcccgctgggccacgatgacgggcttgttgtagcaggagaaggcgtcctccaccagcaccgggtcgggcttgcgggtgaagaggctcaccaccggcacgatcaccagtccggccagcatgcagaaagcgccggcgttgatgggcgactggagcagagctggaaagcgggagcccacgaagatgttggacagcatcaccacagtggagaagagaaagctggcccagcaggcggcggaggtggccttcttccagtacaggccgtagaggaagggggccaggaaggcgcccgccagcgcgccccaggacacgcccatgagctgggcgatgaaggtgacgctggacctgtactggatgatggccagcaccacggagatggcgatgaaaaccacgatcaggccccggatgatgcggatctggcgcttctcatccatatctttgatgaagtggtccttcaggaagtccagggtgagggtggagctggaggccagcaccagggaggacagggtggacatggaggcggagagcaccaggatgaccaccacggcgatgagcacatcggacagtccggagagcatggtggggatgatggagtcatatccgttggccgccacgtcgatctggtcggagaagagccgcccgaagccgcccaggaagtagcagccgccggccaccagcagggcgaatacgcttgaaatgacggtgcccgtctcgatggccttctcgtcccggatggcgtagaacttctggaccatctggggcaggccccaggtgcccagcgaggtgagcagcaccacgcccagcaggttcagggggtcggggccgaagaaggaggcgaagacgccggggatgtcagagacggcggggtcgctcacctgggccagtccctccagggcggccataaagcctccctggctgttgaggacggcggcgatgacggcgcagatgcccacgatcatgatgatgccctggatgaagtcgttgatggcggtggccatgtagccgccggcgatgacatacaccccggtgaggaccgccatgacgatgacacacacggaatagtcgatgttaaaggccatgccgaacaggcgggacagtccgttgtacagcgaggcggtgtaggggatgaggaagatgaagatgatgactgaggcggcgatcttcagcttgtcgctgccgaagcgcttgccgaagaactccggcatggtggcggagctgaggtgctgggtcatgatgcgggtccggcggcccagcaccgcccaggccagcagcgagcccagcagggcgttgccgatgcccgcccaggtggccgcaatgccgtacttccatccaaactgtccggcgtagcccacgaagaccacggcggagaaataagaagtgccgtaggcgaaagcggtgagccaggggcccacagagcgcccgcccagcacaaatccgttcacatccgtggcgtggcggcggcagtacaggccgatgcccaccatcacgccgaagaacacgatcagcatacccagtttgacgatcatagcgatcacactcccaaaaaactttctcgcgttaaactgtaacgcacaaaagtaataaagtcaagagtttttttcagctgatcctcccacgcctccggggcggctggaagccgcccgaaaagccttcccccctgaggggggaaggtggcgcggcgtatgccgcaacggatgaggggtcttccctccctcgaccccatatcaatccttaggatctgttaaagaggttccgccctgtggggcgggtttctttctgagcgatcagaaagaaaccaaagaatcgccgggtgacgctcccggcgggaccacggctccacatccgttccgcctaggtcccgcagtccgctttcccccggacccccgatgcgggggacacgggccttgggtatggcgccggcgtccggcgcgggtgggggacgacacccgcttcccccgtttgtgctgccgccgttggtgggtccaatgggcgcgcagaccccacggtggtgtcgcgcctaccctggcagaatagggacagccggtgtaaaaccggcgggcgcatgatatgcgcccctacgcaaagaccgaagggaatcccgtatttcgtcaattcgcctgaaatctttctccccggcccccgatggggcagactgtccccatccaggggttgcaaaggacagggagaagtgatataataccatcgctttttaatgaactcagagaagggaacgagagatatgtccggacattccaagtggcacaatatccagaagaccaagggcgcggcggacgccaagcggtcccagatctttaccaagatcgcccgtgagatgatcgtggcggtcaagaccggcggcagcggcgaccccgccaacaactcccgcctggccaccgtcatcgccaaagccaaggccgccaacatgcccaacgacaacatcaagcgcaccatcgacaaggcgctgggctccggcaacaccgacgactttgagaacgtggtgtatgagggctacggccccaacggcgtggccgtcatcgtagaggccctcaccgacaaccgcaaccgcaccgcccccgaggtgcgccatctgctggacaagtacggcaagggcctgggcgccaccggctgtgtgtcctggtcctttgacaagaagggggtcatcgtgctggacgccgaggacctggacgaggacaccgtgatgatggacgccctggatgccggcgccgacgatatgcaggctgacgacgaggtgttcgaggtctacaccgatcccgacgctttcaacgccgtggtggccgccatggaggccaagggctacaccttcctggaggcgggcgtgcagatggtgccccagaactatgtgaagctcaccgatgaggaggacatcaagaacatgaccaagctcatcgagttcctggaggacaatgacgacgtgcagaacgtctaccacaactgggagcaggactgatccctccgtccctgccggcaaagagcgggaccgctttcgggcggtcccgctcttgttctgtccctgtgctcccggagcctgccgggccctcatctccatgcgggacgcggcctcgctcttcttccccgccctctctcccctcttccggggaaaacaccgagcggcagggctgacgccccgccgctccagtccagacgatccaactctccaaatgccctgctggtcctccactcactccatgagccggaaaaattcctcctcgctgagcaccgggacgcccagctcctgggccttgcgcagcttggagccggcagcctcccccgccaccacataggtggtcttcttggacacggaggaggccgctttgcccccccggtcctcgatcatggccgccgcctcctcccgggtgaggcgctccagggcgcctgtcagcacgaaggtcatccccgcaaagcgctggtcctcccccttctccgcggcggcggtattcacccctgcctcccgcagccgggccatcaggtgccggctctgggggctggccatccactccaggacgctccgggcggtgatctccccgatgtcgtccacggcggtgagctcctccagggtggcgttctccagggcctccagggtcccaaagcgggccgccaggaccttgcccgccttctgccccacctgccggatgccaaaggcgtagatcagccgggacaggtcctgctccttggagcgctggatggcggccatcaggttttccgccgacttcttgcccatccgctccagctgggccacgtcctcctccttcaggaagtacaggtcgccgggggtcttcaccagccccgcgttcaccaggttctccaccaccgcgatgcccaggccctcgatgtccatggcgtcccggctggcgaagtgggccagattgcgcagcagctgggcggggcactccgctccggtgcagcggatgtgggccccgtcctcctcccgctccaccggagcgccgcacaccgggcagacctgggggaagcggtagggctgggtgccttccggccgctcctccgccaccacggacagcacctccgggatgatctcccccgcctttcggaccagcaccgtgtccccgacgcggatgtccttctccgtgatgaagtcctggttgtggagggtggcgctggtcacggtggtccccgccagccgcaccggttccagcaccgctttgggggtgagcaccccggtgcggcccacctggaccgtgatgtccaccactctggagggcttcacctccggggggtacttgtaggccgccgcccagcgggggaatttggccgtgctgcccagcagttcacgttctgacaggtcatttacctttacgaccgctccatcgatatcgaagggaaagctgtcccgctcctccccgatccgtgcgatgcgggcaaccgcctcctccacctggtcacagctataatgcgggatcactttaaagctgtgtgttttcaggtactccagggtttccagatgggtgctgaaggtctccccctccacccactggacgttgaacaccaggatgtccaggcggcggcgggccgccaccttggggtccagctgccgcagggagccggcggcggcgttgcgggggttggcgaagaggggctccccccgccgctcccgctcctcattgagggcgtggaacaccttcttgggcatgaacacctccccccgcacgatcagcctggcgggggcgtcagggatgaccatagggatagaccggacggtgcgcaggttctcggtgacgtcctcccccacccggccgtccccccgggtggccccccggacgaagaccccgtcctcatactccagcgccaccgagaggccgtccacctttggctccaccacatagcgggcgtccggcgccgcgccccgcacccgctggtcaaactggcgcagctcctcaaagtcgaatacgtcctggagggactccaggggcacccgatggaccacctgctggaaggcgtccagggccttcccccccacccgctgggtgggggagtcgggggtgatccactccgggtgggctgcttccagctcttccagccggcgcagcttgtggtcgtagtcgtagtccgtcatggcgggggcgtcctggacataatactcatagttagcctgcaccagctcccggcgcaggtactccagctcctgtttttcatccatgaaaggcatctctcctctgtatcacgcggccccgttcagggtcagatatgtgtcaggcaccgccccaacaatgacggtctccgccacccgcaggccggtctctacggtcagctccgtctgcccgccgggcaggatcagcgtcacggggacggccacctccagctcgatgcggtgcagggtctggttcacccccgcctgggagaagtcgctgcggaattccgccgacaccgtccccacccgcagggcccgcacccgcagctccgggccccgggcccacaccagttcgctgtccaccaggctgcccagggggatgcggatctcggaggcgtccaccccctccagtgcggagaggatctgggccaccagctgagcccgcagctggttcagggccgccatatcggtggtcatggcggtgatggccccggaggcgtcccgctggatggtgacgaagtccccgtagtccacgtcccgctccgccaggtcggcggcgatggcccggtcgatgacggcggtgagggcgttggctgcctgggcccgggccgccgcctccaccagggggcgcagctgatgctggagccaccccacgatcccggcggccagggccaggcccaccagggcggtgagcagccacccccgcccccgtcctccccccggtccccgccggggcgcccgtccccggaggggcgggtccagccgccagcggacggcccgcaggcggcatcgcatatccatatcctcaccccctatgggtcaggatattcatcagggcgcttggcctatgtcaatctttcccgcccagcagctcctgcaccgccagcagcacgcccagccggcccgactcgaaggtgaggccgccctggagatagacggtgtagggggggcgcatgggggcgtcggcggacagctcgatggaggccccctggacgaaggcccccgcggccatgatgacctggcagtcgtagcccggcatgtcccagggctccggcgtcacataggagtccaccggcgcgccgaactggatgcccttgcagaactttttcagcgcctccggctcccgcatatggatcatctggatgatgtcgtggcggacggcggaggaggcgggctcggtctcatagcccagcagctccatcacgccggcggcgaagacggcggtcttcaccgcctgggccaccgtgtggggggccaggaagagcccctggtagagcaggcggttctgccccagggtgcagccgcactccccgccgatgcccggtgcggtcagccgcatggccgccccctccaccaggtcccggcggccggcgacatatccccccgtgggggccagtccgccgccggggttcttgatgagggagcccaccaccaggtccgcccccacatgggtgggctcttgggtctccacgaactccccgtaacagttgtccaccaggacggcggcgcccgggttgacctcctttacgatgcggcacatctccccgatctccgccaccgacagggaggcacgggtggagtaccccttggatcgctggatcagcaccgccttcacccgggggtccgccgccgcccgggccagcccctccaggtccgggcagtcatccttcagctctacctgccggtattccaccccgtagtcccgcagggagccgtggcccttgtccgccgtgccgatggcccccatcagggtgtcatagggggcccccaccgcggacaggagcacatcccccgccttcagcgccccgaagagggcgcaggtgatggcgtgggtgccgttgacgaactggatgcgcaccagggccgcctcggtgccgaacaggtcggcgtagatctggtccagctggtcccggcccaggtcgtcatacccgtacccggttgtgccggcaaagtacccctctgccacccggtgcttctggaacgcggacagcacccgggcggtgttctcctcggcaatggcgtcgatgcgtgcaaactgctccgccaggccctgccgggccttctcccccaggtccaggacccgctggcttatctgtaatgtcatattccttgctcattcctatctttctttggtttcatacgggctctccccgcccggccgccccctcagggctgctccagcggccgctgggccagggcggctgccagccggacgcaggcatccgcgtcggacaggctggcggtctccgccggggtgtggatataccggcagggcactgagatgcccccggtgatgacgccggtgcgggtcaggtggatggcccccgcgtcggtgccccccgcccgcatgatgtcccgctggacggggatgtccccctcccgggcggtgtcctccagcagcgccaccatggcggggtggcagatgacagaggagtccatcaccttcaccgccgcgccccggcccagccgggccgtgcccgcgcgctccgagccgggcgtgtcgtccacatcggtcacgtccaccgccacggcgtagtccggggcgatggaccaggcggcggtccgtgccccccgcagccccacctcctcctgggcggtgaacaccaggtagaggtcgttggggcactccccgattcgctccagggcggagagcagcaccgcgcaggagatccggtcgtccagataaggggagaccaccaggtcccctgtacggaaagcgggggtgtcatagaccgcgctgtcccccacctggaccagctgtttcgccgccgcctcgtccccggcgccgatgtccaggaagcactcgtccagcttcagcttgccgaagtcggccttctcctccggggcaaagaccccccgcaggccgcttttgaagcggacgggggtgtaggccgcctctttggggctgacgcctcccagccgccccacccggaggaagccctccttctcgatgtgggtgacgacgaagccgatggagtccatgtgggcggcgaggagcagcttgggccccttcccccgcctgtggacgatcaggctgcccatggtgtctgcggtgatctcgtcggcatagggctccgccagggcccggatgacctcccggatctccccctcgtcccccgaggggccgtgggcccggttcaaggtctggatcaattcaaacagttccatagttcactcctattttcatgcactctcatattctttgggcggaggctgggccccctcaccccagcaggccgggcacctccggcaccggcagggggccgaacagcgccgccgcggtcaggcaggcggccaccccaagggcggccagcgtccaccgggcccaccgggcggtcaggcagcggcccagggccgcccagtatttctggagcagccggatctccaccaccatgaacaagatccacaggggatctctccgcagggcgaaggccgccccggacatggcatagctgaggaccgcgaactccacggtctccagcagggcctccaggacccggccctttctctcgttcacctagcccgcttcctctctcacagccgggcggcctggtcggccacgaacagccgggtcagtgcgagcatgtcctcaaaatccgccaggctgcccacgctggccggggcgtggagatagcgcacagcggcggagagggcggccacccgcaccccggcccgggagcgctggatggtccgggcgtcgttgcccccggcgatatactccttggtctgccaggggatgccgttgtcctccgccagccggcgcaggtcctcaaagagcccgcggtcgtagatggtccccccgtccatataggagatcacggggcccctgccgggggcgcacactctgcggtgtccctccaccccgggcaggtcagcggcggtggtggtctccagcaccagggcggtctccggagccacagagaaggcggccccaaaggctccccgggtgcccacctcctcctgggcagtaaagacgaagaccacgtccatgggcaggtcctcctccagcagcttgagcagcacggcacagcccacccggtcgtcgatggccttggccttgaacaggccctccccgaactcctccggcgtgcagacgaaggagccgtaggtccccggctccaccctggagagggcctcctcccggtccctcgccccgatgtccaggtagaaggcgtcggtcttggggaccttcttctcctcgtcccggctgaccaggtggatggccttgatccccaccacgccgggcacccggtccgggcccaggaccaccggcttgccgatggccacccggcggtccacgccgcccacgaagtcgaatttcagaaagccctcttcggtgacgtgggtgacgatgagccccacctcatccatgtgggcgcacagcatcagccggtccccggccgctctggcccccttcttccacacgatcaggttgcccagggggtccaccttcatagaccgggcccagggcctggcccgttccgccaggaactcccgcacctggtcctcgtcccccgacacgccgttcagggcgcacagggtcttcagcagctccttcatcgggactccgcctcctctccgatcccctccacaaaggcggccagcagccgggccaggtcctccaggtcccggcggctgatgacctcgatgggggtgtgcatataccgcaggggcagggagagcaccgccgtggccaccccctcccggctcacctggaggggccagccgttggtgccggagtggcccgccattacctcggtctggaccgccatccccagctcctccgccttgcggcgcatccgctgttccatccagcgggtgcagttggggcccacgccgatgacgggccccttgcccagagggaaggtcttttccttgggggcatccgggctgtccccgtgggtcacgtccaccgccgcgcacaggtctgggaccaccccataggccgcggtcactgccccggtgctgtccacctcctcgcacacgctgcccagcacgtacaggtccacatccagcctccggtccttcagcagctccagggcccccagcagggcggcgaagcaggcgcggtcatccagggacttgccgcagatcagctcctgccccagaggaaagcagcccccgcggaagaccgccggggtgcccaccggcacccggcgctccgcctcctcctggctcagccccacatccaggcagagctcccggatggggatggacttgtccatgtcctcccgggtctggacatgggggggcagacaggccaccaccccagccagggggggatcggtgaggacggtgagctcccggtcggggagcatcctggggtccactccgcccaggggggcaaatttcagatacccttcttcatggccggtgaccacaaagccgatctcgtccagatgggcgtccagcagcagccgcttcgccccctccctgccgcaccggcgcagggccagcacgctgcccatccggtccacggtcacctcgtccgccagagggcggagcagctccgccgccgcccgggacgccggcccctcgaatccgctgggggcgcccaggccgcacaggcgggaaagtatcgcatcatgatccaactcagtgttcctcctttgtgcttccggtcacagggaccggaccagctccttgaacgcccggccccgctccatgaagttcttgaagcggtcgaaggccgcgcaggcgggggacagcaccaccacgtcccccggccccgccgcccggcgggcggcctccaccgccccggccaggtcctcggtctggatgatctccgggcagccgcggccgccctccgcctcctccactgcctgccggatggcccgggccgtgtccccggtgaggaccagggtcttgacccgctcccggatctccagggccagggcgtggaaggggatgcccttgtcatagcccccggcgatgaggatcaccggctccgggaaggactccaggcaggccacggtgcggctgggactggtgccgatggagtcattgtagtacttcactccgtccagctcccgcaccagctcgatgcggtgctccaccccctggaagcgggcggccaccgcccgaacgcacttgtccggcaccagtccgtccacggcggcgatggccgccatgtagttttcgatgttgtgcaccccgggcagccggatgtcccgggtgggcagcacctcccggctgccctgggcgttggtgagccagatggccccgtcccggaggtagaccccctcctccagccgctcccggcggctgaagaaggtgaccgcccccccggccttctccgccaggtcccgggtcagctggttgtcatagttgaagatggcccggtccccctccccctggtggaggaagatgttctccttggcggcgatatactcccccatggatctgtggtagtccaggtggttgggggacagattggtcattacggcgatgtgggggctctgctccatggtcatcagctggaaggaggacagctccagcaccgcaaagtcctccggctccatgccggacacatcgggcagcaggggcttgccgatattgccccccacatagacgttgtatcccgcctctttcaggaactccgcaaggatggtggtggtggtggtcttgccgtcgctgcccgtcacaccgatcaggcggcaggggcacaggcggaagaacagctccatctccgaggtgacctccgccccccgggcccgggccgcctccagggcggggtggccggggtgcaggccgggggtgcggaagatcacgtcctgatccagcccctccagatacgcctcccccagccgcagccgggctcccaggctctccagctcctccgcctgctcctccacccgctcccgctgggccctgtcgcacacggtcacgtccagatccgcccgcagcagcatccggatcagcggcgtgttgctgacccccatgccgatcacggcgatcctcttcccccgcagactgtcgaaatattccctgatgtcggacatgggatacgctcctttcccgatttgggccgccgcggcctgaggccgcggaaaaaatttgactggttttatgggttttatggtatgttatcacagaagaagaaaaatttcaatgaaacactccgccggaatttcaacgggattcttgcactttttccattcctgtgctattcttgttaagataggggtcttcttcccttcccgatctgaaatcacgacagaaacgaggtcttttccatggagcaagccaactccgccccccgcaagcgcatcttcagcggcatccagcccagcggcgatctgaccctgggctcttatatgggagccatcaagaactgggtcccccttcaggatgagtacgactgcatctactgcatcgtggacatgcacgccatcaccgtccgccaggacccggccctgctgcgccggcgcaccctggagcagctggcccagtatatcgcctgcggcctggacccggtccggagcgtcatcttcatccagagccacgtgccccagcacgccgagctggcctgggtgctgggctgctacacccagtttggggagctgtcccgcatgacccagttcaaggacaagtccaaaaagcacgccgacaacatcaccgccggcctgttcacctacccggtgctgatggcggcggacatcctgctctaccaggccgacctggtcccggtgggtcaggaccagaagcagcacgtggagctgtgccgggacgtggcccagcgcttcaacggcgtgtacagcgacaccttcaccctccccgagcccttcatccccaagatgggcgcccgggtgatgagcctgggggacccctccagcaagatgagcaagtccgatccggacggctgtgtcttcctcatggacgcccccgaggtcatccagaagaagttcaagcgggcagtcaccgacagcgagacccaggtccgcttcgacccggagcacaagccgggcatctccaacctgctgaccatctactgcgccgccaccggcaagagcccggaggaggcggaggaggccttccagggccagggctacggcgtgttcaagcccgcggtgggcgacgcggtggtggagctcctccggcccatccgggaggaggccggccgcctcatggccgacaaggcgtatctggagggcatctacaaggagggtgcggagcgcgcctcccaccttgccgccaagactctgcggaaggtctataaaaaggtgggctttgtggcccgctgaccgggtgcccgctcccgcctccttccccacatcaattctgcaaaaggggttttcccatgaacgttcccacggatatttcccttcaggtggtgggctctgtggccgccgccctgctggtggccgcggtggtggctctgatcgccaccccggtggtccgctccctggccttcaagatcggcgcggtggatgtcccccgggacagccgccggatgcatgaccaccccatccccaggatgggggggctggccatcttcttcggcttcatcctcagcgtgctgctcttcctgcccctcaccacccagctgcggggcatgctgctgggcgcggtggtcatcgtcattctgggcatttttgacgacatctatgccctgtccgccaagctgaagttcgccgtccagatcggcgcggccctcatcgccgtgctgatgggcaaccagatcgactacctctccaaccccaacatcttcagcagcgacccctactggcacctgggcgtgctgtccatccccatctctgtgctgtggatcgtggccatcaccaacgccgtcaacctgatcgacgggctggacggcctggcctgcggcgtgtccaccatcagctccatgaccatgctggtcatcgccctgacggtggccgaggcccaggtggccatcctcatggccgccctggccggcgcctgcatcggctttctcccctataacctgaacccggccaagatcttcatgggggacaccggctccaccttcctgggcttcgtgctggccaccgtctccatccaggggctgttcaagtcctacgccatcatctccttcgccgtccccttcctggtgctgggcctgcccatcttcgacacctgcttcgccatcctgcggcggctggcccgggggcagagccccatggcccccgaccggggacacatccaccaccggctcatcgacatgggcttcacccagaagcaggcggtggcggtgctctatctcatcagcgccatcctgggcctgtccgcggtggtgctcaccaccaacaacgccatgaaggccatgctcttcctgctggccctgtgcatggcgggcgccttcgggggcaggctctacctgtcccacagcgacagcggcggctccggcgccgcgggggaggccaagggccggcagcaccgccccccctccaagacccagatcgccggcaacgacaatttcttcggtgaggaggaccgttccgacaaatgaaccgtatccgagtcatgaccatcttcggcacccggccggaggccatcaagatggcccccctggccctggagctctcccgccgcccccagatcgacgccttgtgctgtgtcaccgcccagcaccggcagatgctggactccgtgctggacatcttccgcctggtgcccgacttcgacctgaacatcatggagccccggcagaccttgtccaccatcacctccaagtgcctgctgggcatggaggaggtgctggagcaggcccgacccgacctggtcctggtccacggtgacacctccaccaccttcgccggcgccctggccgccttctaccaccgggtgcccgtgggccacgtggaggccggcctgcgcacctatgacaaatactccccctacccggaggagatgaaccgccggatggtcagcgccatcgctgacctgcacttctgccccaccccctccaaccgggacaatctggcccgggaagggatcgagcagggcgtctttctgaccggcaacacggtgatcgacgcgctccagaccacagttgtaaaagactttcatttttcagaaggcgtcctcaatgatttggattatgtcaaccgaaaggtgatcctggtcacctgccaccggcgggagaactacggaacgcctatggcccacatcatgaccgccctgcgccgggtggccgacgccttccccgacgtggagctggtctatccggtccacctctccccggtggtccaggaggcggcccatcagtacctggacggccacccccgcatccacctcatcgccccactggcggtggacgagatgcacaacctgatggcccgctgccatctggtgatgaccgactccggcgggctccaggaggaggcccccgccctgggcaagccggtgctcgtcctgcgtcgggagacggagcgccccgaggcggtggccgcggggacggtccagctggcgggcaccgaggaggagcccatcttccagatggcctcccgcctgctcaccgatccggcggcctatgccgccatggcccacgccgccaacccctacggcgacggccgggcctgcgggcgcatcgctgacgccatcgagtaccgcttcggtctgcgggcgcagccccccgcccccttccatccctgacctctgtctgaccccacgagaaaggagccggccatggaccaaaaaaaccgcctgatcatcgccatcgccgtcacccttctcatcgtggcggccatgttcaccagcttcggccgcagcctcttctctatgcgcaccgaacatatccagctccctgagcccggcgcctcctccagcagccaggaggggggaggctcctctcagtccgccgagctgttccagagggtggaggtgaccccccagaccgtccagagcgtcatccgcaccctggagcgctccaccagctattactgggagctgacggtagagaccttctggaccgggggctccagtgccacctccgtccagacctgggtggacggaggctggtcccatacccgtcaggtcctcccctccggtctgatccgccacgacctcatcagcgaggacaccgtctactactggtatgaggggtcctccgactacctcaccgccccggcggagggcggctccgccgatctggcccagcacatccccacctatgagaccgtgctggacgcggacccggagcagatcaccggcaccggctacgacgactccagggggggcatcccctgcatctatgtggaggtatccgcccccggcggggagcgggtggaccgctactggatcagcgtggagagcgggctgctcatctcctctgagactctggagggggaggagctgctctaccgcatgaccgcctattctcccatccagtcctgcccctccggcaccacatttcagctgccggacggaacggtgctccacagcatttgaggaggagctcaccccccttgcttctcctccttcctgtcatccgccagccccagcaggagcagcagccccagggtgatgaccaggtccatgttgtccccctccaccagcaggagcaggatgatcaggatcagcaggatatccccgctgtccagctcctccagccggaggactttcaggatgccgttgatcccccccttgtccccgccgaacagggcgttcagcgggctcttctcccctgagagcaggtcccccaggccgccaaaccccatgggacccggggcaggccggcggcctcctcctccgggcgcgccccgggctgccccgggtggaggtcctgcggagccccggggcccgttctccccccgctccggcccgggcggatggggcgccggacgccgggccccctcctctgggccgtcctgctccaccacccgggtataagtaccattctgggggatatagcggttatacatcgccccgccccccttctcccatgccgcggaagaggacccggatcacccgggccagccgggagatctgcaccgcccggtccagcttggccaggcggctctccttcaggaaggggcgcagggcgttgagcagagccaccgttcggtcgtcctccccctgatactcccgcagcagccgcatccccatctggatcatgccggggtcgatctcccccagggcggccagcgggtcctctccccccgccagggccggcggagcgctccccgccgaagcgggcgcctccgcctccctggcgccggtctgctccgccccctgggcggcctcccccgccggggaggcctgcggccggggagcgccgccgcccagggactgggccagcgccatgatctgccccatggcggacgggtcattgaggatcgcgttcagcttgtcttccatctcccccacagggcagcccctcctttccccctcctgtgcggggactcagtcggtcaggcccgactgcctggcctggcggctgatgcgctccaccagctcgcctccctccggggtgttcatcagccgctgcatcattcccaccagctggctggtgtcccctttcacggcggcctccgccgccccctggataccgcccccctgccgcagcagctccatcagccgctgggcatcgccggatctggccagacggttgagggcctccttatttttgaccagatcggcgggcaggctctcctgcccctttttgccgcttctttcctgattcataccggatctcccttccaagaggatttcattccagtatatgcgccagacgaggtaaggtgactcttttgaaaattcttgtgttttccgactcccaccgctacaccggcggcatgatccaggccatcgaggagcagcagcccgacctggtggtccacctgggcgacctccagcgggacgccgaggagctggccctcctctaccccaagctgtccatggtcaccgtgcccggcaactgcgacggctggaccacagatcctctggagcgccagttcatggtgtgcggcaagcgcgtcctcctctcccacgggcacatctggcatgtgaagcaggggtatgacgccgccctccgggcggcccggaacgccggggcccaccttctgctcttcggccacacccaccgcccctgctgcttccaggagccggacggcctctgggtcctcaatccaggcagcgcccgcagcaccttcggcctcgtcctcccagagggggaggctctctcctgttccctgctggacatgccctgatgggcgcctctgtacaaaaaacacccccgggacctgttcacggtcccgggggtgtttttttatatgtctcagccctgggcagcggcctcctcaatggcggcctcctccgcccgcatggctgccagagtgcggtccagcagctggtccagctcccagcccagcagctccgccccctgggcgatcacgtcccgggagcagcctgcggcgaatttcttgtccttgaatttcttcttcagggacttgagctccatgtcggacacgcttttggaggggcgcatcagggcggccgccccgatcagcccggtgagctcgtccaccgcgaagaggaccttctccatctcctgctccggcttgatgtccacacagtggccccagccgtggctggcggtggcccggacgatctcctcctccaccccggcctgccgcatcagctcctgggactttttgcagtgctcctccggccagcgctcaaaatccaggtcgtggagcagacccacgatcccccagaactcctcccggtccccatagcccagctcccgggcgaaccagcgcatcacgtgctccactgtaacggcgtggcgcaggtggaactcctcctggttatactgggtcagcaggtcccaggcctgctctcttgtcatggacatctctgaaacactccttttttcacttctgagctccttctgtgctcctggggacgaagctcccccgggcctcccccgccggggacgggcatacagacggagcggggctttttgactgttttaataggccacgaccacgccgccgtcgttggcgtagacggtggtaatcccgccggcctccaggatcaggacctgctggaactggcatttggcctcgatctgctccttcagggcgaaagcccgctccaggcagttgcagtggcacaccgccgccacccgcccctgatgatccgggtccgccgccatccggtccaccagcttgcccagagcctgcttcatggtcagggcctggcccagcttgcagatctccccctgaggggtggcccccatcagcagcttgatccgcagcgccccggtgaccaccgcctgcagcttggtcagccgtccgttcttccgcagattctccagggactccagcacgaaaagggtctgcatctggcagatatactgctccacttcccggaccaccttcttgaagggcatcccggaggacgccagctcccggatcttcagcgccgtcagcacctctccagaggaagcggagcaggagttgaacacgtggacgttgcgctccggttcctcctcttccagcaggacccgggcctggaccgcgctgttgtgggagccgctgagcagggcggacagggtgaccacatagatgtcatccgcgccgcactggtaggcgtccagatagctctggggggcggggcaggcggtggagggggcgtcctcgctctgcttcatggcccacagcaggtcgctccggtccagggaggcgtcgtccacgaaggagctgttctccacccgaatggtcagaggcaccttcacaaagcaggggtccttcaacatggtcccggtcaggtcgcagcagctgtccacaatgatcttgaaactcatacttttcatccccgaacatgatattagatattagatttacgatactataccacagttccgcccaaatgtaaagtaaaaccgcggcgcctcccgtgtgcaggatcgccccggagggcgcagtcccccgccgcttaccgaggcggacctctgtaaccgcccaacccctcccctttagggagaaatgctgcggcgtgggctgtccccctctcggccccgcccccccaaagccttcccccctccgggggaaaggtgtcacggcgcacgccgcgacggatgaggggtcttcctttccccgtcccgctttttcgagaagggcgggacaagccccgcccctacggagtgactggaaacagcccgtacctcatagggcccgataccccatcgggccgcgcccacaaagacggcgggcgcacaatgtgcgcccctacgaattggccgaaggcatcccgtaggggcggcttccagccgcccgaaaagccttcccccctccagggggaaggtgtcacggcgcacgccgcgacggatgaggggtcttcctttccccgtcccgctttttcgagaagggcggggcaagccccgcccctacggagtgactggaaacagcccgtacctcatagggcccgataccccatcgggccgcgcccacaaagacggcgggcgcacaatgtgcgcccctacgaattggccgaaggcatcccgtaggggcggcttccagccgcccaaaaagccttcccccctccggggggaaggtgtcacggcgcacgccgcgacggatgaggggtcttcctttccccgtcccgctttttcgagaagggcgggacaagccccgcccctacatgggccggaagggatcagcgcctccacagaaaaccggggcctggggcagtgtactgctccagatccccccgcggcccgggtcagtcctccgggaacagctccggctcctcggcgcgcagctccttcaggatcttctggtccgccttggaggacagatccagccgctcatagaggtcggggcggcggcggcgggtacgcaggatggactgcttccgccgccactggtccaccttggcgtggttgcctgacaggaggatggggggcaccgctctctcgtgccacacctccggccgggaatactggggcgcctccagtgcaccgttccagtggctctcgttctcatagcactccgggtcggacagcaccccgggcaccagccggcacaccgcgtccgccaccgccatggccgggatctccccgccggtgagcacaaagtcccccagggagatctcctcgtccacgcactcctccacgaaccgctcgtcgatcccctcgtagtgcccgcagaccaggatcagccgctggtagctgtccttcagccgccgggcatccccctggcggaaggtcctgcctgcgggagataagtaaatggtatggacccgctcccccgcctcctcacagatgtgcttccagcactggtagagggggtcggcctgcatcaccgccccccggccgccgccgtaggggtagtcgtctacctgccgctgcttattcaatgtgtagtcccggatctggtggcactcgatgcggatgtagccccgctcctgcccccggcccaggatggattcgcacagcatgtcccccaccacgtcggggaacagggtcatgatatcgatacggtacatagtcagtctctttcctcacttggcgttttatccccttgattatacgcaatctccccctgtttttcaatggatgccggcctttttccccaactctttttcccgccccggaaaaagggcccgcgccgggcctccgcacttggggcccggcgcgggctgcgctccggtcttactgctgtcctgtgggcttctggttggagaacttggtgtaagcctggctgatcttgtccgcctgggcctgctcgggctggtaccagcccttggactgggccagctggaacagctcggtctgggtgtggtgcccctggttgaacaggccgaggaaggcgtcccgcagggggatgttgacgcactccgaggcgtaggtgtcatagttggaggtcatcttcttctcactgcacagaaaatctgtcatacgttcctgatcgttcattcgttctcctcctcagcgcagctgatccagcagggtgttgtagttctgaaggtgttggctggcgcagttctggaacatggtcttcagctcctggtcggtgctctcctggaccgcggccagatacttgcagtggagcacccgctcaaagtccagctggtcattgagggcctggagctccttggtggtcaaaatgggcatacgaattcctccttcagccgtcatcggctctgatctacggccttaggtttcccgccttttccaaaattatacggcattttaggggtcccctgccgatcaaacagaaagatcacatattcccttccccggatctggcccaccgtcccgaagcagaagagggggaccagcgggaactgcccgccgccgcggaaggaggcggccagccgcacctcctccctgccccgctgcaccagcaggggcccccagctccgggccgcctgcaccagcactgggtcggacaccagcttccagggctcctcctcccagtaccactctccggcgctctcctctgtaaaaggataggccatcacagccctccctcccgccaccggccagcagcccgcatcctccagagtacggcggctcagggtccggctcagcaccagctctcccccctccggcaccagcgttcccagcagcagccgtccctttccgccgccccgcagccacaccttatagagcccctggccgtcgttctggcggcgcgcctcggtgtgcaccctggggccgtcctcccgcagggagagggtcccgcctccctccagcatgatcttttccaccacggcctgtccctccctctccccatctcgctccactttatgcaccccgggggcgtggatatgccgctgtgggaaaggcgccggccgcatgcccgcggccggcgcctttcatcccgcctgctcctgaagggtgagggcgatctcctcccgttcctccccataacagatctccatgctgtactgctgacggaaggggagcaggagcccctcggtatagctcccgtccggcgtgttggccagccggcaccagacctctccgcccgccgcatacccagacagataaagcgtcccgccgtcagagacggagtagcggaactgctctgcttccgttccgttatgggtcaccagcagctccgtcagatagatctgctccgcctcctccagcgccatggcctcctccgtcgccttcagagccagggcgttgtactcctcactgcgctccgggaaatccgccccgctctgagccatggtctctgctgaggcccactttccctgtatgagcacggaccgttccgcctcgctggcctgtctgacgttcaggaccacagaaaaatgcggacctgctccggcataggaatagggtgcccgccccaggtcctcctggcttgggacatagccctccacgggataggtgcccgtaaaatcctcataggatatcgggctcccgagctgcctcccgcatcctgtcccgacgacgcacagcaggagcgccatcatccacgcaccgatccgtctcatccctttcccgcctccttgtcccctcaattgtaccacaagccgaatcaatatcccatttatgtttttcccgctccattaagattttttaatttgtccccgcctttttcaggtctgtctcatttttctcttgacaaagccggcctcctccgctaaaataacattcaacaaatgcagtgacgggaaaaaagacagggtcagcccccttcagagagccggtggttggtgggaaccggcgtgcggccccctgtggatactggtccccgagcagcttgtccgaatctgtgagtaggatgagacgtatggccccgttaccggcctcagccttgttcgaggcttatgagggccgctttcgggtaaccggcggccgaaccagggtggtaccgcgtcatttccgacgcccctgacttgaaaaagtcgggggcgtcgtttttgtcccccgcagaatgtaaaggaggcaccccatatgaaacccggatatcaaaagtacatccccttccagccccagcccatccagggccgcacctggccggaccgcgtcatcacccaggcccccgtctggtgttctgtggacctgcgggacggcaaccaggctctggtggaccccatgaacctggaggagaagctggaatattttcacaccctggtggacatcggcgtcaaggagatcgagatcggctttccctccgccagtgagaccgagtatgagatctgccgcgagctgatcgaggggggccacatccctgacgatgtgaccatccaggtgctggtccaggcccgggagcacctgatccgcaagaccttcgaggccatccagggcgccaaaaacgtcatcctccacttctacaactccacctccaccctccagcgcaaggtggtcttccacatggacaccgatgagatcaccaagatcgccaccgatgccgccgacctgatctacgagatgtcccagcccctgatccagtcgggtatgaacctccggttcgagtactcccccgagtccttcatgggtacggagatggactatgccgtggaggtctgccaggcggtgctggagcacctccacgccgccccggagcgtaaggtcatcctcaacctgcccaccacggtggagaactgcatgcccaaccagtttgccgacatgctggagtatttcatccgcaggctcccctcccgggactgcgccatcatctccctccacccccataatgaccggggcaccggcgtagccaccaccgagatgggactgctggccggggcggagcgggtggaggccaccctcttcggcaacggtgagcgcaccggcaacgtggatatgatcaccctggctctgaatatgtacacccagggcgtggaccccaggctggacttttccaatatcaacaagatccgggagatgtacgagcgctgcaccaagatgaaggtgggcgagcggcagccctatgccggcgagctggtcttcaccgccttctccggcagccaccaggacgccatcaacaagggcacccagtatatgaaggagtccaactccgacttctgggagatcccctacctgcccatcgaccccgccgacgtgggccggcagtatgaacccatcatccgcatcaacagccagtcgggcaagggcggttccgcctatgtgatggagcacaacttcggcttcgacctgcccaagctgatgcaccccgagttcggcgccgtcgtccagaaggagaccgaccgggtgggcaccgagatcgcccccgagcgcatctacgagctgttcaaggaggagtacctgaacattgacgccccctaccggatgctcaagcacgcctttaccgagagcatcgacgccgaggggcactcccatgtcaccttctggggcaccatccagcacacggacacgatcttccaggtctccggcgagggcaatggccccatcgacgccttcttcaacgccatcaaggacgagaagatgtcccacttcaccttcctggattacaagtcccacgccatcaccgacggctccgactcccagggcgtggcctacatcctgctccaggaccagcgggacggcaggaagtactggggcgtgggcgtctcccataacattaacctggcccccctgcgcggcatcctctctgccatcaaccgctccaagcggagcgctcagtagcctgagcagtgctttcccccggcgcacatgccgccgcggaaaacagatcacaacttgatttgcgcctgcgggcgcgaactctgcgaggctcttccataagctccggcccggcggccctctggatattccagcgggccgtcgggccatttgtttactttaactcatttcataaattttattcaccgttttttaacatattattttttcttttcttattgactttttcaatgtttagaatatactaatccttgtaaatagcttgaagaaggaggctatcttatgtctaatcagaccaatgcaaaggaaaaagcggccgccaaagcgcccgcccgcatgtccaagaaggatcccctcaccaaaagccagctggagctcatcaacgcctggtggcgggcatccaactatctggccgcctgccagctctacctgctggacaaccccctgctgcgggagcccctgaagcccgagcacctgaagcgcaccatcgtgggccactgggggacctgccctggtcagaacttcatctacacccacctgaaccgggtcatcaacaagtatgacctggacatgatctacctctccggccccggccacggcggtaacgccatggtggcccaggactacctggacggctcctatacggagatctaccccaacatcagccgggacgccgagggcatgaagaagctgttcaagcagttctccttccccggcggcatcgccagccacgtggcccccgagacccccggctccatcaatgagggcggcgagctgggctactccctgtcccacgcctttggcgcggtcatggataaccccgacctgatcgccgcctgcgtggtgggcgacggcgaggcggaaaccggccccctggccaccgcctggcattccaacaagttcctcaatcccaagacggacggcgcggtgctgcccatcctccacctcaacggctttaagatcgccaaccccaccgtcttctcccgcatctcccacgaagaggcggagatgttcttcaagggctgcggctgggagccccgcttcgtggagggggacgaccccatggtcatgcaccagaagatggccgccgccctggactgggccgtccgggagatccagcgcatccaggagtacgcccgctccaccggcgacgtcacccggccccgctggcccatgatcgtcctgcgctcccccaagggctggaccggccccaaggaggtggacggcaagccgctggagggctgctggcgcgcccatcaggtgcccatcgccgtccacgacggcgcccccggccgcgtccaggagctggagcagtggctgaagagctaccgccccgaggagctgttcgatgagaacggcactctgatccctgagctccaggccctggcccccaaggggaaccgccgcatgggcgccaacccccacgccaacggcggcctgctcctccgggacctgcgcacccccgacttccgggactacgcggtggatgttccccagcccggcgcggtggaggcccaggacatgaccgttatgggcacctatgtccgggacgtgatggagctgaatatggagtcccggaacttccgggtcttcggccccgacgagaccgcctccaaccgcctctcccccgtctttgaggtcaccggccgccgctgggaggaccccatcgacgagcacctggacgagaacctggaccgggacggccgggtcatggactccatgctctccgagcacctgtgccagggctggctggagggctatctgctcaccggccgccacggcttcttcaacagctacgaggccttcatccgcatcgtggactccatggtagcccagcacgccaagtggctgaaggtgtgcaaccagctgccctggcggcagaagatcgcctccctgaactacgtcctctcctccaacgtgtggcagcaggaccacaacggcttcactcaccaggaccccggcttcctggatcacgtggccaacaagaaggcggacgtggtgcgcctctacctgcccccggacgccaactgcctgctcagctgcttcgaccactgcatcaagagccgcaactacgtcaacgtcatggtcgcctccaagcacccccgtccccagtggctgaccatggagcaggccgtcaagcactgcacccagggcatcggcatctggcagtgggcttccaatgaccagggctgtgagcccgacgtggtcatggcctgctgcggcgacacccccactctggagaccctggctgctgtcaccatcctgcgccactacctgcccgacctgaagatccgggtggtcaacgtggtggacctgatgaagctccagccccacaccgagcacccccacggcctcactgacgaggactatgacgccctcttcaccaaggacaagcccatcatcttcgccttccacggctatcccaccctggtgcatgagctgacctaccgccgccgcaacaagaatctgcacgtccgcggctacaaggaggagggcaccatcaccactcccttcgacatgcgggtgcagaacgacatcgaccgcttcgacctggtcatcgacaccgtcaagcgtctgccccagctgggcaacactgcctcctatctcattcaggagatgcaggataagctggtggagcaccgccagtatatcaccacctacggccaggacctgcccgaggtccgggactggaagtggaacgacggcaaggggaactattgatccctcccccatcgcagtccatccgtgcaatgcggaacagggacagggggcggtatgcatcgcataccgccccctgtccttttgttataagacagaaagagccgtcccactggtctcagggggacggctcttatctattctgaattctgatcgatctggccccggtcacaggtgttttctcgccacggcctcagcgatctgctccctgctctgctctgtctcctcaggggcccgcatgcagaactcctggaacagcacgtccagcacaaagagctgggccatccgggcattgacggagccggcctggagcggcccctcgtcggcgccgcactggagcaccacatccgccagctggccccccggcgatttggggaaacgggacaccagcaccaccttcacctgccgctgccgggccacctccagcaggtcctggaagtcccgggtggagccggagtaagagaagaacaggaccagttcgtccgggtccatcagcgcaagggtattcatctgaaggtgggagtcgggcacaaacaggaatttgggggacacggtggaaaagagggtccaggcctcctctgagagcaccatggagctgccctgtcccatgcacaccacccggcgggatcgccggagcaggtccacggcccgggacacctgtctggggtccagcagctggatggtctgctccagcaccgccacattctctcccagcagctttttgcacatggcgtgaaagccgctgctctcttggaggatggccgcgtccgcccggtggctgtcccgggtcatcgatgccttggccagctccagcttgaaggcgttgtatccagtcagccccagcctccggcagaagcgggagatggtggcgtcagccacggtgcactcctccgccagctcggagatggacatgtactggacatcgatccggtgcctcagcacatagtcggccaccttcttttccgagttggtcagctgaaaatactggctgctaatggtctcaaatatgttatgcgccgtcatgctctctccttcctcttctcccccggccgtcctccggccctcagttctgctccaggatctgcccgatcagctgatccgccatgatcaggctgcggggcacgtggaagggccctttgaaggtgcagcccttgcaggcgggctcggtgggcttgccgtcccggcggagatagccgtaccactcgccgtactccgggtccgcgaaataggtcttgcagtagtccacggtcttgtagaaccagtccagatacttctcgtccccgctgtcccggtacatcatcagactggcgatcaggatctcgttgtggggccaccacagcttcatgtcgtgctcataggcctccggcgggaatcccatgcagtccacgaagtagagcaggccgccgtactccttgtcccagccccgctcgatggccatatcaaagacctccatggccttcgcccgcagctccgggtcgtcctcgtacttggcctcctccatcaggaaccagctgcactcgatgtcgtggcccggattgacgaagcggccggcggagatgtcggaccagaactcgccgttcatgcccacggtctccagggtgcacttcagctccggcttgtggtgatagcggaagatggtctccacgcactgcttggcccgggcgtcatagacctcccggtgctccgggtcgcagcggcgcatcactgatgtgatgttcagatagatcatggggtcggccagggcgcggccgctccgggtctccgggatggtcttggggcccatgccggcggggtccttgatgaggccgttgttcagctgatagatcagctcataggcccggcgggcccgctccaggcactccctgtcccccgtgaccgcgtaatactccgcgttggccagggcgtagaagccctcggagaagcagtagcggcgctggcgcagcggcttgccgtcgccggtgacggtgaagtacatccggccgtccgcctcccggttgatgcagtgcttctccatgaagtccagacagctcttgctggcctccagccactccggccgggtgccgtagacggtgcacagataggcgtaggtccagccacaccgcccctgcatccacacgctcttgtccgtggagaacaggcgccctgtccggtcgatacaggtgtagacgccgccgtgctccttgtccatgccgtatttcagccaaaattcggcactggacgccagttccttcctgacccactccctggtctcctgcaatctctttctgtccataaatttcaaccccttatgacggcaaaagccgctgttttttggatttttccacaacgatccaaatctgtaactccatcatagcactccaggaaagttttttcaatgaaataatttgtgaaaaatttttcccgcattttaggtgacaatccactccctgcatgatacaattatacaagagcgttggaatatctcccccctcgattgggcgtcttgctccaaaccgcgcttccggcttctcattatatccccgaacgacgggaatcgcaacagccagaaagaaggacttccaaaaattttaggaggcgatttgtcgtgaatcagtacggtatccaatttgaggtcaaaaacaagcccagcctggacccggagttcatgcccatcctgaagttcaaccgcgcgtttcttgagacggcgaagaagccggtctccattgccctggagcgctccggcggccaggtggcggtgtgtgacaccttcatccacggcaccccggagatgcgccaggccgaccaatactacatcgaccgcctggtcaagtccatgctgtggatgaagggcggcttcaaggtgtatgtcagcggggacgaggacatttacaactatctgaaaaagaccttcgcccccggcggcgcccggtcctttgactccgacttcatggccggcgtgtacgagcgccccttcgaggtggtcttctgcgacaaggtcccccaggaggcgggcgcctcccaggctgtcggccgccatctggcgggctgccgggtgggcttcgacgccggcggcagcgaccgcaaggtgtccgctgtcatcgacggcgagcccgtctactccgaggaagtggtctggttccccaagatcaccgaggaccccgactatcactatgacggcatcgtctccgctttcaagtccgccgccgagaagatgccccgggtggatgcggtgggcgtctcctccgccggcatctacatcgacaaccggactatggtagcctccctgttcctgaaggtgcccaaagacaagttcaacgagaaggtaaaggacatctatatccgggccgcccgggacgtgttcggccccgacatccccctggtggtgtgcaacgacggcgacgtttccgccctggcgggcgccatgggcctgggcgagaacaacgtactgggcatcgccatgggcaccagcgaggctgtgggctatgtggacgagaagggcaacatcaccggctggctcaacgagctggctttcatgccggtggacgtgaaccccgacgccatggaggatgagtggtccggcgacatcggctgcggcgtgaagtacttctcccaggacggcgtcatcaagctggctccccgggcgggcatcaacctgtccgagtccctctcccccgcggagaagctgaaggaggtccagaagctgatggatcaggacggcaacaacgccgccgagatctaccgctccatcggcacctatctgggccacgccctggcctactactacgacctgtatcactgcaggcacgtgctgctcctgggccgggtcatgtccggcaagggcggcgacctggttctggaggaggccaagcgggtgctggccgacgagtatcctgagtgctccggcaagctcttccccgccctgcccgacgagaaatcccgccgcgtgggccagtctgtggccgccgccagcctgccggaggtgtaagcgcccatgatcatcggcaacgccaagctgttcctggacggcgccttccaggagggctccctcacctttgaaaacggcgtcatcaccgctgtgggccccgcccagggtccctgtgacctggacgccgggggaaagtatctggtccccggcttcctcgatgtccacacccacggggccatgaacgaggacttctccgacgggcggcccgaaggactgcccatcatgtcccgccactacgccgcccacggcgtcacctcctttctggccaccaccatgaccctgaaggaggagaccctcacccccgccatgcacgccatccgggacttccgccgcccggcggacggcgccaagtgcgccggcatccacctggagggtcccttcctgtgctacgccaagcggggcgcccaggcggcggagaacctgcacgagccggacgcttccatgttccaccgcctcaatgaggccagcggcggcatggtccgcctgatcaccgtggcgccggaggaggagggggccatcccctttatccgggaggtctcccagacctgcaccgtctccctcggccacaccactgccggctatgagaccgccatggcggcctatggtgcgggggccagccacgccacccacctcttcaacgccatgccctccttcctccaccgggagcccggggtcatcggcgcggccctggacagcggcgccacggtggagctgatctgtgacggcctgcacatccatcccgccgtcatccgggccacccacaagctgtttggagacaagctggtcatcatcagcgactccctgcgctgcgccggcatgcccgacggcgagtatgagctgggcgggcagcccatcgagatgaagggcggcaaggccaccctgcgcgggaccgacaccctggccggctcctcctccaacctgctctccgagctgcaaaacgtggtggcattcggcctgcctctggaggacgccgtcaccgccctcacccttgctcccgccagggccgtccggctggaccaccagatcggctccttggccgtgggcaagcaggccgacctggtgctgctcaacccagacctcaccctggactccgtctatgtggacggggaaaaggtccgctgaatttagaaggaggaatcccccatgaagatcatttccgcaaaggactatcaggcgctcagccgcgccgccgccaatatcatctctgcccaggtcatcctcaagcccagctgtgtcctgggcctggccaccggctccagtccggtgggcacctatcagcagctcatcgagtggtacaagaagggtgacctggacttctcccaggtccgcaccgtcaacctggacgagtatgtggggctggacaaggaccacgaccagagctacgcctacttcatgcgcaccaacctgttcgaccacatcaacgtggaccccgccaacaccaatatcccggacggcatggcccccgacgaggcggaggagtgcgcccgctacgacaaggtcatccatgacctgggcggcatcgacctgcagctgctgggcctgggcgtcaacggccacatcggcttcaacgagcccgccgacgccttctccaccggcacccatcaggtcaccctcaccgagagcacccgggacgccaacaagcgcttcttcgccagcatcgacgaggtgcccacccacgcccgcaccatgggcacccgggagatccttcaggcccgccgggtgctgatggtggcctccggcgccaacaaggcccaggccatcaaggacgctttcttcggccccgtcactccccaggtccctgcctccatccttcagtaccaccccgacttcaccctggtggctgatgaggcggccctctccctcctgtaaggagccggacatatttttaaacccagcagggccgcggaactgttgttccgcggccctgcttccatctcttttctgtctgcgctcccctcacagtcgggccacgccggtctcccgggccgcctgggccaccgcctgggccactgcgggcaccacacgggggtcaaagggcttggggatgatattctcctccgacagctcctcctccccgatcaggccggccagggcccgggcggcggccatcttcatctcctcgttgatgtcgctggcccgcacatccagcgcgccccggaacaccccggggaaggccagcacgttgttgatctggttgggatagtcgctccggccggtggccaccacccgggctccccccgccttggcctcctctgggaagatctccggcgtggggttggcgcaggcaaagacgacggcgtccttcgccatggtgcccaccatctccggagtcaccaccttgggggcggagacgccgatgaacacatctgcccccaccatcatctccgccagggtgccggtgcggcgctccaggttggtcacctcggcaatggcggcctgtgcctcgttgagctgaggatctcctttacacaccgcgccaaacttatcgcacagggtgatgtgccggaacccggcggacagcagcagcttggtgatggagatggccgccgagcccgcgccggagaacaccaccttcacgtcctccttcttcttccccaccacccgcagggcgttggtgaggccggccagggcgatgatggccgtgccgtgctggtcgtcgtggaacaccgggatatcgcacatctccttcagccggcgctcgatctcaaagcagcggggggcggagatgtcctccaggttgatgccgccgaaggagccggagatgttgtacaccgtctggacgaactcgtccacatccttggtcctgacacacagggggaacgcgtcgatgccgccgaaggtcttgaacaggacgcacttgccctccatcaccggcatcccggcctcggggccgatgtcccccaggcccagcacggcggtgccgtcggtgatgaccgccaccaggttgtgccgccgggtgagctcgtagctctggctggggtccttctggatctccaggcagggctgggccaccccgggggtgtaggccaccgacagctcctccttgttccccgcgggcaccgtggccaccacctcgatctttcccttccactcccgatgcagccggagggcctctttcgcgtaatccataactccattcctttccatgtatcatctcggtcccgcgcgcgggacttccttccataccgctattataccggatcggacaaaaatcgcaaccgctttctcctcccctctcccacatttctttctcccggtgccgggggccttttggtgcatctctccccgccccgcgggaaagatatccggtgcgggaggcgcccctccccgcctacgccggcccaaacaggtccccgtgcgcgaaaagacgaaaaaaatcacgtttttgcttttctttcagggaaaaatatactatactattaaggactgtatccgtactgcatcccgggcgctggcacatggtgttttccagcccccggcctttttcagagaggaggcggcctgctttggagcagcaactgacgaaaaaatacggcctgcctaccgccatctgcatggtggtcggcatcgtcatcggcagcggcatctttttcaaagcggaaaagatcctcaacgccaccggcggcgacctgcgcacaggcatcctggcctggatcatcggcggcctgatcgccatctccaacgcctgcgcctttgccgtcatggccacccgctatcagaaggtgggtggcatggtggattatgccgaggccgccgtgggccgggcctacggctactatctgggctggttcctggccgcggtctactatccctgtctgaccagcaccctggcctgggtgtccgcccgctatacctgtgtcctgctgggctacgacatcgtcagcggcgagtgcatgaccatcaccctgttctatctggtggccgcctacttcatcaacaccatggccccccgtctggccggcaagctccaggtctccatgaccctcatcaagctggtccccatcctgctcatggccgggatgggcactgcggcagggctgcggagcggcatgaccgccgccaacttcgcccaggtcaccgccgacaccgttaccgcctaccccctcttcaccgccctggccgccacggccttcgcctatgagggctgggtggtggccaccaccatcaacgcggagctcaaggacccgaagcgcaccctgcccctggccctggtctgcggggtgggcatcatcatgctgatctatttgttctactatgtgggcatcgccggagcggtccccaacgccgtcatgatggagagcggggagcatggcgcaaggctggctttctccactatctttggccaggctgggggcaccatactgtttgtctttgtgctcatctcctgcctgggcacctgcaacgggctgatgatgggctgcacccgtggattttacgccctggcggcccggggaacagggcccaagcctcaggtcctctcccaggtggacccctccaccggcatgacctccaacgcagctgcagccggactgctggcctgcgccttctgggggacctacttctatttcggctgcctccaaaatcatctgggccccttccgctttgactcctccgagatccccatcatcaccctctacgccatgtacctccccatcttcctgggcttcatgcgggaagccagggaggagccgcccttccgccgcttcgtgctccccgccctggccctgtgcagcggcctgttcatggtgatcgccggcatcctgtcctaccagtgggactgcctctattatctgctcttcttcgccgtctttatggcggcgggggcactcttctacaagcggaagagcctctgagcccgctgtcatcggtcagcccggagccccccaatgggggctccgggcttttttcagcggacagagaggcaggaatgtggtccggtcccctttcttcaggcagcggtgcctggggcagccgagacagaaaagaagaacacaaaagcgcaggggctgtaagtccctgcgcttcgcctcttttattccgctcccgtctctgggccgcacccccgggatcacttctttttgactgcctccgcctgatccaagagctcctccgcgctcctgcgcagggccggagtcaccgccgccccgccgatgagccgggccagctcctcgatgcggccggcgcggtccagccgctccacccgggtgtaggtccggccgtcccgctcccccttctccaccgagaaatgggtgtccgccatggcggcgatctggggcaggtgggtgacacagagcacctgcttcttccgggccacctgggccatcttttccgccaccttctgggccgcccggccggacactccggtgtccacctcgtcaaagaccaggctgtcgatgccgtcgtcctccgccagcacatttttcagcgccagcatgatgcgggccagctctcctccggaggccaccttctggatgggcttgagagcctcgcccacgttggcggacatgaggaactgcacctcgtccccgccggtctcatccagcccccaggccccctccttgggggcgaactccacctggaagcggactttgggcatgtccagctggcgcagctcctcctgcacccgggtctggagagcctcggccgcccgtctgcgggcctgggagagtacccccgcccgcctcgccgcctcctccctggccttctccagcttctggctcaggcgggcgatggtgtcgtcggcgtactggatctggtccagctcctggcggctccgctccaggtaatccagcatctcctctactgtggagccgtacttctttttcagccggtagatggtatccagccgcccctccagctcgtccagttcctccggggagaagtccagctcctcctccagatcccgcagcagctccaccgcgtcgtccgcctcacaccgcagctgggacagcttctcctggagctgggagaggcggtcgctgtaccgggccaccccctggacggccccctcggcctctgcgagcaggtcggccgctccccggccgtcctcgtccccggacagggcgtactgggcggtctggaccgcatccatcagcttcccggcgctgcgcagaagctggcgccgcccgtccagttcccggtcctcccccggcttcaggtcggcccgctccagctccccgatctggaaggtgagggtgtccacccggcgggagcgctccgcctcgtccatctccagttccccgatctttctccgcagctccgccaaggctccgtatgcctcccggaaggaggccagctccccctccgtgtgtccggagcggtccagatagcccagatggcaggccgggtccagcagctgctgtccgtcgtgctggccgtggatgttcagcagctgacgccccagctcccgcagctgggccacggtcaccagccgcccgtccacccggcagatattccggccgtccccctggatctcccgctggaggagcagctcctcccccgccgggaccccgttctcctccagccagcccagcccggacacgccggtgaacaccgcgttgaccaaggccgacttcgccccggtgcggatcagctcccggctggtccgctcccccagcaccgcactgatggcgtcaatgacgatggacttgcccgctccggtctcaccggtcagagcgttgaagccaggatcgaactggatatcggcccgctcgatgaccgcgatattctcaatgtgaagcagagaaagcatctttgcccctcctgacctgtctcaaactcactccagcagcttgtgggcctcgctgcaaaatgcctctgccgaggcgctgtcccgcatgatgagcatcccggtgtcgtcccccgccagactgcccaccatcccggcgatctccatcccgtccagggcggagcaggccgccgaggccagcccgggcatggtcttgaccaccaccagattctgggccgcctccaccgagaccaccccctccttgaagatgttccgcagccggcccgcggagctctttccctcctgccggtccgctgccacatagcggtagctgccggagggggccagctccttcaccagccgcagctgcttgatgtcccgggaaatggtggcctgggtggtggtgaacccccgcagcttcagctcagcgagcagctgctcctgggtctccacatccatcatgcggatcacattcaaaatctccgcctgtctcgctcgcttcacagctcataccctcccagcttctgatagatgatctgataaaagttccgttccgtcagccgaatcagccgggtggactgacgggcacaggagatctccacccgctccgttccggtgatgcgcagagccttgcccccgtccaccgccaggtacagatgcttccggctcccccgggggagctggacggtgaccagccgctccggcgccagcaccatggaccgggtggacagctggtgggcgcacacaggagtgacgatgatgtcccgtgaggtgggctccacgatgggcccgcccgctgacatggagtaggcggtggaaccggtgggggtggagacgatgaccccatcccccatcaggttggtgaccagcaccccgtccgcccggacctccatctcggccacccgggccatggagcccttggagatcaccgcgtcgttcagggccaggtcctccgagagcaccttctccccccggagcacccggacggagagcatcatccgctcctcggtccgatactcgccggcggccagcagggtgagcaggctcagctcgccccgctccagctccgccataaagcccacgctccccatgttcacccccaggatgggcacgtcgtggagggtggcgtcccgggccgcgtggaggatggtcccgtctccgccgaagcagagcagcacatccgcccgcttcagctcctcctccatgctgcccagcttcacctgccggggcagatccagccggtcccccttcctgggggcaaaggggaggcagagggccgtctccgccccggcgttgttcaagatcctgcgggcctccagcgccacccgcaggcccctgtcccgataggggttggaactgagcagcactctcacggctgtccctccttcccctggagggaccggtgggactcctccaccagctccctcaggtctccggaccagaccgggccctccccctcggtccccagccagcccaggtattcaatattgccctccgggccggtgatgggggaaaaggtgatatcctttacagaaaatcccgcctcccgggcatggtccaggaagtgctccagcacctccagatggaccgccgggtcccgaaccaccccttttttgcccaccttttcccggccggcctcgaactggggcttgaccaggcacaccgcctgggccccctcccgcaccagggggcgcatggggggcaggatcagtcggagagagatgaaggccacgtccacggagaagaagtccaggggctccgggatctgctccccggtgaggtagcgggcgttggtccgctccatgcacaccactctagggtcgctgcgcagccgccagtccagctggttgtagccggagtctacggcgtacaccttctccgcgccccgctggagcatgcagtcggtgaagccgccggtggaggagccgatgtcggcacacaccgccccctccagacggatgggccagcgctccaccgccttctccagcttcagtcccccccggctcacataggccagggtcctgccccgcacctcgatggcacagccgggccccacctgggtgcccgccttgtccaccttccgtccgtccacatagacctgccccgccatgatcatggcctgggccttctggcggctctccgccagtccccgggcagtcagttcaacatccagccgctgttttgtcaaatcgcagcacctccatggcccgctgggccagcccggctccgtccagttccaggagccgcttcaattctcccacgctgccgtggggggtaaaggtatcgccggagctgcacagcgccacccgggcgctgatgccggcctgctccagcgcgcaggcgagccgctctcccacgctgccggcggagacgctgtcctccgccaccagcagggcgcccgtccggcgcacagagtccagcaccggagcggcatccagcggtgtaatgatgttcagctttacaacttccgcctctacgccccgctcctccagcagctgggccgcctggagcacatcgttgatctccaccccgtaggacaccagcgtgatgtgggacccccgtcgcaggacggccgccggggcccggccgctgtcctcccggtactccccctcgccgccccggggatagcgcaccgccgccggcccgtcccagcgcaggaccgcctcctccagcatcgccttcagctcggcaaaattggcgggggcatagacccgcatcccagggacgctgttgagataggacacgtcaaagaccccctggtgggtctcaccatcctccccaaccagcccggcccggtccactgccagcaccacatgcagccggtccagagccacgtcgtggaggagcatgtcataggcccgctggaggaaggtggaatagaccgccaccaccgggaccgccccctgcttggccatgccggcggccatggacaccgcgcagccttcggcaatgcccacatcgaaaaagcggtccgggaactggagggcaaagtaatccagcccagtcccggtctgcatagccgccgtgacggcgcagacccgcgggtcctcccgggccagccgggccacctcccgcccaaacacggaggagaagctggcccgcccctgcttcaggggctcccctgtctcgggatcaaagggggacacgccgtggtaggcgtcgggattctcctcagcaggtgtgaagtcttttccctttatggtcctgacatggagcaggaccggctccttcaggtcccgggcgtagcggaggatctccgtcagctcccgcaggtcgtggccgttcaccggccccagataggtgaagcccatattctcaaacaggctgctggggagcaggctctccttcaccgctttcttcagccggtgggtcacccggtagatcttccgcccgaaccaggtggcgttcatcaccttccggtagtacttcttgaaggtgaggtactggggcttcaggcgctggcgggccaggtgctccgccacgccgcccacgttcttggtgatggacatgccgttgtcgttgaggatgaccagcagctggcccctgctctgccccgcggtggacaggccctcataggccagtccgccggtgagcgctccgtctccgatgagagccagcacccggtagtcctcccccagcatgtccctggcccgggccatccccaccgccaccgccaccgagttggaggcgtgtccggcgatgaatgcgtcatggacgctctcagatggcttggggaaaccggcgatcccgccgagctgccggatggtggacatctgctcccgccggcctgtgagcatcttgtgtgggtagctctgatggcccacgtcaaagaccagccggtcccggctggtgtcgaacacccggtggatggccacggtgagctccaccacccccaggttggaggacagatgccctccggtccgggctacgtcccggatcagctcctgccggagctggccgcacagctcccgggcctcctggtcccccatccccgccaggatggggccatatgaggttgttttgtctctcttatccaaaaaaatccctcacagcttcctgggcggcgccgcagcgcctcccctcccggtttaccagatcatggggccggtgatgccaatggccgtgcccagcagagcccccatcagcacctgggggagcgtgtggcccaggtgctcattcagcttctttttgggcttgagctcctccggcatctccttccagtgggccatcacatagttgagcaccttggcctgctccccagcggcccggcgcacattacaggcgtcgtacatcaccaccagggccaccaccgccgccagggagaacaggggcgcctgccagccgtagatctgcccgatggacgccgtagccgcgcagatgaaggaggagtgggagcttggcatgtcgccgctgcctaccatccgtttcaggtccaagttccggttcacgaccagattggccactgtcttgatcagctgggccaggaaccacgccaggatggacagatccagcaccagattccccgttaaaaaaccggtacgcccctcaaacatttgccttcactcccttctgtcccgtctgttttcacttccgccgggaggccagctcccgggccagccagatgaggaagtccggctgcgggaatccgttcagtgcggacactgcctcctccgtcagctgctccaccagcgcgccgctcccctccagtcccagggccgtgacgaaggtgctcttctctctggagcggtccgagcccaccggcttgccaaactcctcggtggtgcccgtcacgtccagcatgtcgtcccggatctggaaggcccggcccagcttctgagcatagcgggccacggcccgccgctgctccgggctcccccccgcggcaatacaccccagctccgccgcggcggagatcagggcgccggtcttcaggctctggagcagctccagctcactcagggacaggctccgcccctcccccgccatatccagcacctgtccccccaccatgcctgagggaccggccgcccgggagaggcagtccaccccctctgccatctgctccggggagagcagatcccgccgggcagtcagcatctgaaaggccgcggtgagcaggccgtccccggccagcaccgcggtggcctccccatacaccctgtggttggtggggcgcccccggcgcaggtcgtcgtcgtccatgcagggcaggtcgtcatggatcagggagtaggtatgcaccatctccaccccgcaggcaaagggcagggcccgctccgggtcgccgccgcacaggcggcagcactccagggtcagcacgggccggacccgctttccccccgccatcaggctgtactccatggcctcctggaggtccgcgtaccggtcgtcctcccggaatatggcccccagggcctcctcgatccgcttctggtcgccggccagccggcgctcaaattccaggctcatatcacagttctcctccaaagggctcctcccggggctgtccgtcctcccctgcggtgagcagggtcaccttctgctccgcctgatccaggcgcttggtgcactcccgcatcagcttcgccccctcttcaaagagcgccatggcctcatccagcggggcgtccccccgctccagcaggcccacgatctcctccagccgggccatggactgctcaaaatccagcttttttcccgccatcacaggcacttcctttcctccacccggcacaccaggctgccgtccgacaggcgcagctccagccgctctcccggggccgcatccttgacagaggcgatcaatgttccattctcatttcgggcgatggagtagccccggcccagcaccttcagcgggctcatggcgtccagcgccgcgctgtcccgggccaggcgctcccgcgcccgggacaggatctgtccggctccgtgtcccagccgctgtccctggtagtccagcagcagcctccggtcccggaaataggcccccgggtcggtgagcatccggctgcggcccagccgctccagatccttcctgcgccgggccagcaggctgccggtccccttctccagccgcttggccagcccgtccagccaggcgtacagctcattctggtcgggcaccgccagctccgccccgttggagggggtggccgcccgcaggtcggccacaaaatcagcgatggtcacgtcgggctcatggcctacggcggagatcaccgggatctgggagcggtagatggcccgggccacgcactcctcgttaaaggcccacaggtcctccatggagccgcccccccggccggtgatgatcaggtcggcggcttgatggaggttggcccagtccagggcggcggcgatctcctccgccgccccctccccctgcacccgcaccggcaggacgcgcacctgggccagggggtatctggcccccaggatgcgcagcatgtcccgcaccgccgcccctgccggagaggtgatcagggcgatgcgccggggataggcgggcagaggccgtttgtgggcctggtcgaacaggccctcccgcagcagcttctccttcagctgctcaaaggctacgtgcaggtcccccgctccctccggggtcaggcggacgcagtacagctgatactgcccgtcccgtgggaacacggtaatccgcccggcggcgatgacctgcatcccgttctccgggcggaagcgcagggaggcggcgtccccccggaacatgacgcaccgcagtgccccctggctgtccttcagcgtaaaatagtggtgcccggagggatacatcttatagttggacagctccccccgcaccagcaggccggagaggagccggtcccggtccatccagctcttgatatagccgcttacctgggagggactgaggatggtctcttctctcatgccagctcccctccctccagggcccgtcgggtcaggatggccacccccatggcgttgtccgtggagtagcagggctgggcgaacagggcgccgcagctcctctccatggcggcccgcagctgtcggttggaggccacaccgccggagcacagcaccggcaggccggggcagcggcgctgggcctcctgggtggcccggaggaccacgctgcacaccgtgtccagggtgaagcgggccacgttggccggggcctctccctccgtcagcagtctcttcacctgattctccatcccggacagggagaacgtgaggtccttcagcttcacgcggtactccatacaggcatccgcctgaggatagagctcgtccagcgctttgccagctgggaactgaagccccagcaggacgccggtgcggtcgatgagctggccagcggagatgtcgctggtcccgcccagcttctccgccgccacattggtcccctggggccggaccagcagcagctcggtggtgccgccggacaggtgccaggccaggaagggaccgtccagcaggtccgtccgcccggcggaccaggccgccgccgccaggtgcccctgctggtgggagcaggcaaaaaacggcaccccaagggcggcggccagcgcccttccctgggactcccccgccaggaagcagggcatgtaggagccctccacagcccggggccgggtgctggcccccactgccttcaggtcccggagcagtccgcggccctccagctcctccagcagcgccgggagctgcttcacatgctggaacagggcgtcgctctgccgcagtcccagctctccgggccgcaccgccagcaggcggccggcgttgcagccatccgccccgtcaaagacggctgcggaggtggtatagttgctggtatccagtcccagaaccggcatggtcattcctccggctcctccggccccgccgcttcctcctccttcttttccggcttgggggcggaatcggcaaactctgcccggacaaaggagcccaggatgccgttgataaaggagaccacctcggccggctcatagttcttggcgatctccaccgcctcgttgatggcggcggagttggggatcgccggcatatacagcacctcatacatggcggtgcgcatcaccgcagccgccatgcgggggatgcgggcaaagctccagcccacggaatagcgggagatgtagtcatccagctccggcccgtggacatagactccctgtaccagatcccggatgtactgccgctgcttctcgttgggaaactgggcgtagaggggctcctcctcccccagctgtgcgaaccgctcccgggtcatctcgtgctccagcagctcctccgcgctgcggctgccaaagcccagttcatagatcatatgcaccgcgacctcacgggcgttgcttctcgtcattgtgtgatccctccgtcacttgggccctctgtcccaatctttctctctggcccgcgtctccggggctccgacttttcatccagatccattatatacatgtatatacaaaaagaaaaccctaaaatatgttttacgggatttttctcccgggttccggggcgctgcgcctcacggcgtcttctcccgctcctccgggacgctgagcagctggaccagctggtggtagagctgctccggcgcctgtttgaagcgggcggccgcccgctccccctgtcccgccgcgggcatcagcaggctcagctccagcagggggccgctgtcgtccgccagccgcagtcgcaccgtgcacgtcccgtccgggtttgggagcacctccccctgcacctgctgctcccgcatcagggtctcattcacccgcaccagattgtcgtcgcaccggcggcgcaccgagtatggcaggctgctctcacagatctcgctgttgcgccgccccttctccgtgatggcgtagcgctccccctcccggctcaggtgctctgtctccaccagatgctccaccgcctgcgtcagggagaaatagtccaccccggcgtcgcacagtgccagctccagaagctgaaggaacgtgatcggcgccgcaatgcgggccataatatacaggaccagcagcttcagatccatctcatcctgaataaatcccatccgggccatccaagcacacctctctcttcttgccccggccctggcgggccggcggcgtcccggacaccgctccacctttggtgggaacgtgcccatggtctttctattttattatagaacaaaacgtgcgaaaggacaaccccgcatttccggctcctctggcaccatcccgcctgtcggtcatagtatggtatggaagcccttcacttccggcgggcccggcacccccgtgcccgtccactccactcaatctgacgaggaggtatccatatgcctgaaaaggtcgcgcccggtcccgtgagcgatgatcgctgcatccgggaggccgtgtgcatacacacgaaaaaaatttttgattcctgcaaagatgaagatatagcgctttataaacaaattttcttctgtctatctggccttcgccgctgcccgggccataattgcgccttcctctcgggtcataagatcccgggggcggctgccgtctgtcaggttcagctccacggcctccgccaacagctccggcatggcaggcttttcggcagccatctccctgcgatatctctccatgtactccagccactgctcgtaggtcacagtctcagcctccatttcctgggccacatcggcccgaaagtcatccatggtcatcccgtgcatcgggaaccagtggagcacgtcagcgtgattgctggcgatcccccggcgggctccctcctggtggcagatcaccaccccgtcctccagcgggtccagaccgtattcccggcacaggtaggccgtcagatccaccgcctcccgatataccaggtcaaagtagtcccggtccttcagcccatcctcacagatctcaaagctgatgtgggtgttgttggcgctgatgcccttgcgtcctgatccacagtgccacccccgggccgtccagggcagtgtctgataggtggccacgctgccgtccgccaggcggccgatgaaagcatggacgcaagccccaaccccgctcatattccagtggttgctgtttggattctggcccagcaggccgtcatccggccctacgtatcggcgcagattggggttgttggccccggtggagtggaccatgacccccttgggtacgatcttccgtccggccttgtagcagtcgttctccgtcaacaggcacttgtgcagatccaagttgacacctcctgtctcagtatggtagtatgatttggccctgcatcgtgcgatcaccgcatcatgcgtcatagagctccctgcgtaactgccggagccgaacgaagccaagcagggcccaggcacccgctacgcgggtgcttttttatttctgtgccttgatccaccctgcctgctccatcagctgcaccagtttgtcataaccgaacattgcggagaaggccaccaggaagatgagggcgatcagcgccacgatcatccagccggtgatggcaaagcggtaataggaccacaggccgaagcccgcccctaccgttaccactgcggccaccaggaaggccagcaggttggtggggagcatatcgtacagcaggctcttgagcacctgtacgatgatgttggtcaccagggtcagcgccagcaccagggccagcagcataggcagatagttggtcagttcattcatgggtcgtttcctcctttttgccggatctatccggccagttgttatgtttgctcaggttctccaccagggatttgatggcgtaagccaggatcacggcaatgatctctgtgacggctttcccggatagctgttctgcgatctgctcacggcccagataggccagcagataggagcaccacacccaggcgcagccattgaacaggcacagccagacggtggccttcatggtctctgtgcggccccttttggaccggtgggcggacagccaccacagccccagacagaacacgcaccccagtgcgaaggccgccgccgcggccaggatcacagtgctgctcatgtccggacctccgattttaagtcccggatgtcgtgctgcacctccgtcatctgcccttccagcttgtaggtccgctccaccaggctgttgtgggcggccaccttctgctccagctgctcgatgcggtaggtggtcagtttgttggacaccaggatgcctccaaaggtccccgccagcgtcccgatcagcgacatccccgccaccgccagcgtcgtccagtccatcactccaccacctcaaaatactgccccaccagctcgtgtgggaggtattgcaggacgacttttccgccctcctcctccccggtgcgccggcagagatagatctggctgtcctccgggtccagatagtacaggccgtattggtactccatcccccgtgcggcagggatggggtcctccggagtgcccgcctggctgccctggatggccacccacaaggccgcggtggtctccggctcccaccctgcctgggcggtgtgcggttcccgacagcggtacagatagccgttgggccgccgcacgatcacggcctccccctcgccgccgtatgacgtgcccgcagcccacagcggatagagggagggcacctggagggcctgggcgtccggcagggcctgggcggtcatgcgggccagggaaatcacctccgccatggacggctccggctcgggctctggaggctgggcggccttccacgcctcccacgcctccaggtccggggccaccgtcacgctggagccctcgatctccgggtcgggctcccgggtgatggtgacaaagccgttgtaggccaccagcgtctccgcctggctgtccatcaacggcaggcagccggggaaggggttgttccgaggcccttgatatgcgccagacgggttaggtatcgcttttacaaacttcatatcagtgacctccttaacctatttttatggcccaataataatatgttgcacctgctacattagcattgccattcacactagtcccataaaaagaaactgttttatcctcatatgagattgtcgcagtactacttataactattgtggtagtagtcccccatggaataagtgaagcgaggtcttgggaaacatggctaccagagacatatgttactcccataagtccccacagatccggcacccacgggaaggtgatctccgtggggtcatccttcccataagtccccgtccccacatagctgccggtgcagatctgggcggggaactgggtcacctgatccagcgtcttccctcccgggatgcgcaccgcctccgccagggtgacggggaacttgatcgcgccggcggcgtcctgccactccaccacgtcgcaggggcccgcggaggtggtgaccggcgtcttggtataggtccaggcccggacggcgctgacggcccccgtggatgcctgcaccgtggccaggatgtcaatggtccccgcaccggtgggcaggtcgatgaccgggatgctctgggcgtagccgctggacacctccagggcggtccacagggccccgttgacccgcagttccagggagatctggttccccgtgtccgagctcacagagtagggcacgtcgttgaccagcgtccccaggtccccgtcctggccggagatcaccagagccgaggccgacaccacggggatctccccggaagtcgcccaggcggaatccgcctcctcccccgtggccttgacccggtactgcaccgcggtccaggccccggcggtctcgctggcactcagggcctgcccggagtacacctgggtccagtccgcgtccgtgctggccttccgctccagcgtgtagccggcggcatgggtggcagcggcccagctcacggggacggtctgcccctccatggccagctccggcacagtgaggacgggcacgtccggggcgttgaccacgctcctcgtgggggaggtggtgtacccgctggacagggtttccccgtcgtatgccttgacccggtagcacaccgaggccgtgccgaagggcacggtgtcggtataggacaggccggcccccttgtatcgctgggaccagctgccgccatcggtctggcgctccaggatgtagccggacaggttgccgtccgggtcgctggcggccgtccaggagatctccgtctccttgccgccgtagacggtctccggcacggtgatgctccccggggcgccgggggcggtgttgtttttcaccgtgtaggtgccgctggtcttgtagtcggaccaatagccatttgcatccttggcccgcacccgaatggcgatggtctccgtccccttggccaccgggaccgaggcggtgcgggtgctgccgccataggtgcccaccaccgtccagctgccgccgtccacctgcttgctcagctcatagttggagatggccccgccgccggaagaggccgctccccagctcacggatacattgctgccccccttgggcgggttgggtgagacgctgatgctggacggagcgttgattgtgattttagtcctattttgataatagtaattcccggaataatcaccctccgggtacgtcgaactgctggaagaacacacaatgcctaccacggtaatctcgcatgactcgcaggacacctcatatacagcaatttcatcgcccaggcgataatcgttgttctggccatatatttgcatatttttcacgccaataaaataactggcgggcctgttcgtattaaatgcccggggatgtgttccggccgcagactgcacccaattgctccccccatttgcaggctgaccgacgcgggcgaagcggaatgttttatccggataagcatcgatcattgcttcgttatccgcgccataataatcatcgtagcttgacgaatttgggacgggatataaataagcgctcgtcttgccgtcataaacctttttccgagtagtcgtgtgaaatattgaacattgttcccaccgataatacgtcgccacacctacacccccctgttatagctgaccttccggtccaggtagtacgccccgtccctccggtcctccggctccaccgccggcggcatctccacgatggaccccgccatcccgtacagcgccaggaacgcctcgtcaggggtgtttacatcccctaacagcacacgggtctccgggctcagggtctcccccttcgtgtagtagttctccaggtccttcagggtggcgaacaccagcgtccggtcgatctccgccgtcacggcggtctctccggagaagatcagctgacagccgaagacgaactcccgcagctggtcctcccccgcctggatggcctccccggccccaaaggcgcagccgtagcccatcaggatctccccctcgtccgggtcctgggccagcaggcccagctcctcccagacaaaggcgtccatcccggtgttgacgaactgccccagcaccaggcactggctgcccgagttggtcacccgggcgatgggcagatccttcagcggctccgccagcgcggtgcgcgccgtcaggtccgtccccgccggcagcaccctcgtcccgatctgccaccgggtcaccggcgccccgctccccgccggcaccttggccagcagcgccgcccccgcggcggtcaatttcacactagggatcattcctgcaatccacctcccacaagatcatgctgtccccctgccgggccagcgcccccacaaggatgggggtctctatctccttccgatatttgatggcccagtccaggtgggccggcttcagctcgttgacaatgtccaccaggtcctgcttgtgggcgatctccccgatggtgtccgtgaaccagatctcgaaccggtattccccgctgacctccaccagctccgccggggtctcaaacacctgggcgatgcccagcagcttggccgccgtggtcacgccggtccccttcaccttggccaggatgcgctgccgccgccgctcgtcgctctgggtcgggtccaccggcaggccgtaggcccgctcccacagctccagcccccacccgctggtggtgctggggaacagctgcgccagggtgaactcctcgtccgcctgggcctgctccaccagcagggacagcacccgctggagctccgcgtccggcgcgctcctctggtagtgccggggcagctcctcgatcaagggcttcatgtcacgctcacctctttcagtactgggacctggtccgcctggagcatcacgtccgccgtggtgccgttcaccgtcagggcggagaagttctccaccccctcgatggacagcagcagggccagcacccggttatagatcagggagtaggggccgtcctcctcggggccgtagtagatcttctggtacttgccccgcaccagctgggccaggtagtccttcaggcggctctccagctccgcctgcaccgcccccggggtggtcccggacaccgtcaccccggcggagaccgtgatctccacctcccccgccgtgtccaccgtcaccgcggggcccaccggccgcttggcctggatgttggcccgcaccgcctccaggatctcctccgcggcggtctggtagttgctgtcgatcaccgtcacccccacggtgcccggtccctggggcagctccaccaccttggcctcccccactcccgggacctccagcgcccagctccggtaatcccacccgtttccgctggtgtccggccgcttccgggcctcgtcgatgcgggtgtagagggccaggtcgctctcccggtccgtgcccccctccccctgggtgttcacataggtctccagcccggcgaggttgacgtacatctgtgtcaggctgtccggctggatgttgtaggcgctgcccacctccgccgcctccagctcccccagcgccgtcccggccgcgccgatggtcaccgctgagagcagcacgaactccagcccctccgccgtgaggaagacggtcccggcgttgaccactgttcccgcctttcccgtcagtgtcacggaacaccgggcctttgtcccctcccggcgcgtcaggtcgaagtagtcgccccccaccaggtccaggaagcgcccgctgctctcgtccacgaacagcatggacagcaccccgggcagggccttgtagagccggctcaccgcctggcacagcgggcccaccgtggcgtcggcgtagctgcccgccatggaggacacgccggtggccggttcgatctccgccagtgtctcctttttcaggttttccgtggtccggtcctcaaacatagatggtctcctttccgtaaactgtgctcagcgccacctgcatgtgcagggtggagccctcaaaccgcttgtcccgcacccgggcctcccggatatagggggacaccagcagggcctctgtcacataccgctccgcctcgctcagcttggcgtccgcggtgtagggctgccccaccagcgcctccagctcgcagccgtaggaccaggagaagtggctgaaccggtaccgcgccgtatccaccgccctccaggcccagcccttcaccgcctccaggccggagaccagcaccggctctcccccggaccacaccggcaccccggcgtcatagtccatccgcacgtcggtgtacaggggcagctccccccggtcgtccctcagcggcatggaatacatgggaaacaggctcacagcgccaccaccttgcagatcagataataggtttgcaggtcctccgtcagcatcaccacgatgtcccccttcttcagcgcgaactccagccgcttcaggtcctgtttgtccatgctggcctcctggctgtccaggccgccgccggtgacgctccccagcttgggggcgcatcccggcgccgggcaggtcaccggcccggacagcgtgccgctgagctggaagaaccggcccgtcccgccgtccagcgacacctggtaggtgtagtcccgcttcagcgtctcattgatccagatgtcctcccggtccagctccagcccgttgcaggccaccttcagcccctcctggctgcccgccagcaccgttcccagaaagaactgcgccggccgctgcgccttgctgcccaggcccgccatcaccgacatcatcccatccacgctctcgtccagactcttcacgtcgtcgtcgcaacctccatatccctcgcttccgccttccggcgaaagctcactcattccggtgctcgtcgtcgtcgcaaacttcgctttgctccgcccgcctctcggcgggcatccgctccgctgcgttgctcctcctctccggggcaaacccgctccgctgggctttgccccggtgggcggctgcgccgcctgggggtcatagggggcgaagccccctattcctcaaaagggagggtgggcggacactcagatctccctccccgcgctcacctcgttcatcgtattccggtaattcagcttgaacttccccaggtgctggccatttttccaggtgtgggtgtccccgtccacccagaacaggccgctcacgccgctgccggtgtcccggaggatcaccgcctccccgcagatgagctccatgggcggggacagcacctccaccgtcagattctgctggagggcattgtcctccagcacggctctcgcctctgccgccgcgtccttccccttccgctgggtcaccacccgctggagcgtcccgttgcgccgctgggaggcgccgtcctccacacaccgcagcagccccccgttctccgagtagatggccacccggttgcacagaccggtgatgtcccaggtgttggtcacccccatggtctgggcgatctccaggctggccgcgccgggcttttccagcacctccagcgccccctctccggtgaagcgcaccagataccgcttcccattccgctcccccgccatggtgtacagggtagagatgatctgatccagcgccacccccgggaacttccgccccagggcgatccccgtggacgccagccgtcccacctggatgccctggtcggcgcagatggtccgggccgcctgctccggcgtggcctgggtgaatttgtaccacccctgattccccgccaggaagcggccgccatccagggcagacagattgacgatggaggactgggtgctggtggtggcggtgaccagctggccggtgaaccgctgtctacctccctcccggaaaatcagagcagccccctcctccagctccggcggctccacgctgccgtctctgggcaccgccagggccgctgacagctcccgggccacctgatttttcgaccccgtccagctgatgctctgcaccagctccgtcacgtcccggtatccactcccgcccggctccaccagcagcagctgataggcatagttccccacgctccgcaccctctttctaataaaaaacttcttttccctcttgacgaatacacactcaatgtgtataataatatcaagaggtgaaacaatgaaacgtcgggatctgatcaagctccttgaaaaaaacggctggactttcaaacgggcgggcggaaatcatgacgtctacgtcaaaggcgatgaaagggaagctgtggagcggcaccgtgaaatcccagaagcgcttgcacaggccattatccgaaggcgggggctgaaataagccccccgcctcagcaaataaaggaggaagaattatgacagttgtatatcctgtggtgtttacccccttggaagagggcggctatctggcctatgtccctgacttaaaaatcaacacccacggcgaagacctggcccaggccattctcatggcccgggacgcgatcggggtgatcggcctggatattgaggacgacggtgacccgctgcctgtcccctccaagtcggtcccgcaccaggataacgagatcgtttccctggtagatgtcgatttggccgcataccgccgcgcgcatgatatgcggaccgtgcggcgcaatgtcaccctgcccagctacctgaacgagctcggggaaaaggccggcctcaacttctcccaggtcctccaggatggtctccgccagcgcctgggggtccagtgattttttctgtcaaggaggttgctatgagcaagtttttggcggccctcggggccctgctgatcatctttgggctggtgaagctggcgctggccatgatccagaagcatggagaggacgcttaggcgtcctcttttttgcctctgcggcaaatactccgccgcccgggggcgtggggggcggagcccccacacctccaaaagggcgggtgggcgggcatttcatcccaacacccacccctgcgtcaccgggtcccacgtggtgccgatctcctccgccagcgccgtgctccggctgtccgctgccgccgccggcaggtcatccgccgccggcaccgtcagcacctggccggggtagatcagattggggttggtgatggccgggttggccgccgccagccgcttatattgggccccgctgccataaaacttctgcgcgatgctccacaggcagtccccggactccaccgtgtaggtccgcgccgaggccgcccctgtctgggtgtcccggtctgtctgggccccgctgccggacaccgccagcaccggcgtctccggcttgcgccactggcgcatgacaatggtcacatacaggtcgttggtcccgtcctgctccccctgggtgatctcctccaggatgaccgaggcattgacggaggtccccgatacgatccaccgcagcttcgcggccttgtcgctccagacctccagatcatacagatactcatagggggccgcccgggcgcccggcacacagaaggggtacagctgtgccgggagcaggacatcctccagagtacagtcccccatcttcacgccccccggcagggtgagctcccccagctggtccagccgcaccgtctccaccgcgttgggatgccgccagaaatatttcgcgggtgtcaccggcagcaccagctccttcccggtggcctcctccaaaaaagacatgatcctcagcacgtcgtcgtcgcaacctccatatccctcgctttcgccttccggcgaaagctcactcattccggtgctcctcctctccaaaccggacccgcttcgctgggctccggtttggcatccgctctattccgttgctcgtccttcccaggacaaacccactccgttgggctttgccccggtgggcggctccgccgcacggggtgcgggtctcgccctctccctgccccagggcggcacagccgcccgcagggcccggggatcatagggggcgaagccccctattcctcaaaaagggtgggcgggtgggctttcaacctctgttccctccctgatacttcagcatcatccggtccgcgatgacctccgccacctcctcggcggtcatgttcccgccgaagctgttgttgctcaccgtcacctggatgacggtctcccccctgccctggccgtcagtcgtccgctccgccagcccccgtgtttcccggggggccagcagccccgcccagtccgtggccgcggccttctccggcgcggcgtcccggccgctcaggatgccggcccatccctggtcctggctcctggcctcccgggcggtcagcacccgctcgcccgcgtggagcagggcgggatagttgtcatagggcacccgttccagtccgaaggcatacgatccggtgctccccccttcactcgggtcatagaacgcaagtgcggcattgtattccgaggaattggggtccatataagcccggtaaccccccgactgccgttgcatctctaccaatcctccggcgtttcccttcgtccgttcctgggccagtccataggccgctgtggatgcctccagggccgccgtgttctcccgcagggcatccagggactgcctctccgcgtcctggaccgccttgtactggtcgctggcctcataggccgcctccgccatggcctgggcggtggtggtcagctcctccatctccagcgccgcctcccggtctcccgtggcctggtagcgggcgtcggcccggctgaaggcggtccgcatctcccggagctgttcccggtcctcctggccgaacagggtggtctcttcccccagcagcaccgcggacagggcctcccgggtgtactgctccgccaggttctcccggaaggcgtcattctccccggagatccgattgatgttctgcatcaccgcccccaggtctccgccgtatgcgccgatctcagcctccagcccccggctccgggtggcgttgtacccctcgccgtaagcgttgctgacctctgtcatggtgtcagacagggtggaggtcaggccgctgaaggtctccgccatcaatttcatagagccgccgtagtttttttcaaggccctcttgaatgatatcaacggcctctcgcccactaatgtccccgcctgtgatcatgctgcgaatatcgccctcatcttttccaagtgcagaagacaacattccaatgacatcaacaccacgatcttggaacatattgatctcaccgagctgggcaaggtctgtggactgcatccgtgcgagggctgttgccatccatttcatatctgcggcacttgcgcccactgcactgcctgcatcacctattccgcgcatcagtgctatcatcctatccggagcgtcactgaatccagtggctaaggccaatgacataccggtcagatctgcatactcaaaaggcgtctccgccgccagtccccgcaaattgtttaagtaagcatcgcccgtcccctctcccagcagcttctcaaaagcaatggcatccagctcccgctgggccgccgtgccgcttccggtgctctgggtctcctggcgctccgccttctgggtgtcatacaggccggtgtagtagtcgatgaaggcatcgtcccgggcctccacggcctgtgccccaccggaggccagccccagggccccgcccagggcggctccaatggccgtgcccatggggcccgccagcgagcccatcgccgccccgctggccgccccgctcagggcgccggagaacagggagcccgcctcactgcccagggtggagcccactaggaagttggcccacgctccggccgtatcccctgccatgtccagcagaccagcccttcccagggcggacagcacacccgagctcccggaggtctctgcccggttatccgccttgctgatggcccccgtggcgtccagcaggtccttcgtcgtctgccgggcccgcttgctgaccatttccagctgcccacggacattctcataattccgatttgcctgttcaaaatccgcccgggcggcctcgcgctccgcctctgtggccgactcgcccagctcctcaaacgcctttttggtccgcgccagctctgcctgcgtgttcttcaggtccacatttttcagctgcatcttggtatttgtcagcaggtccagcgtcttttgcagctgttcggcgtcctgcctggtggaggtgatcgcgttcttcatcttcaccacagactcggacaagttatccgtcacactgaatgcaatgctggcgtccgtgctcctggccatcagatctccccctcctcccgccgtttatggtcgatcagcagcgcgcacaccaccgcccgttcccccggaggacgccgaaggaagtcccccgggaaaacgccgtgctccaccagcagccgctgggcggcggccaggtctgcgcgcctggtcagtttttttccaggtcctccacggcggcgtggatggccgcccccatcagctggtccgccggcagggggaccacactgcccacactgtacccgtggagcaggtcgatggtccggcagatcttctccacctctcccttccggagcagccttttcagcccgtccaccggcgtggcgcacttcatcttctccttgtaccactccgcctgcttcagctccgggtggttcgtcacacaggacaggatcagatggatctgtgcgtcctgctcccggctcagcctcaccagcttgtcatagggcagctctctcagctccaaaacgatgcccagccgtggcagctttaccgccgaggtctccggctcaaactccggcagatccagcaggctgttgatgatgtctgtcttctttgtggtgctcatagtgcctccttactccgcttcgatcaggtccagcagctcataccggctgaaggtgaagggggccgtgacgctccccaccgtggccgccttccaatccgccagcgtcatgtcgtcaaaggacacattgtagagcgccacccgctctgcgccccagctgtccgggtcgctcagtttaaggatcaccgtacaccgcacatcgatcccatcctggattccagactcccgctggacaaatccactgtccacatggtgcagggtcaggctgcccgtccccttcccgctggcggctttggtgtcctccatgaactggccgcacagattgatggtcgttttattttttcctaccttagcctgcgcagcagaacactctgcgaccttctctccatccacccatgcctcgccccaggtgccattgatgactcgcttcgcactgtcaatggtccgtgccatatcctctcaacgctcctttccacttacgccgcgcccggcaggctcatggcgctgaacagcacctcgaagtcctccatggcgtccaccagccacccgccgcaccgcaggaacacccaggagccggtctgatacgccagcacctgctggcgggtcaggtcagccacctccacgccctgggacttcaaatagttcagctgccggtcatagtcgatctcgcagaagctctctcccgggctcagcacctcggccctctccagatagtgcaaatactccaggatgtacgccaccagcagctgcttgttgtcgtaggtgttggggtactgtcccaggtaagagtcctcaatggtggtccgcaggaagtacgtgatgaggtccatcccctccacgatcttcaccttccgccagtcctcgtttccgttgaccgggatggtggtcaggctgttcaccgcccgggcgatcttggccttctggccgtcgtgcagcaggatcagcttgcccgcgttgatggccgtggtctgctccgtctcgctccgggccgtcaccgccgtcagctccggcagggcggcataggtggccgacatgcccatggggatgccggcaaagatcccggcaaacctggcgcagtattttgccgctgtcaggctgccggaggcgtccttcatccccgtctcgtccacctcgatgatacccatgtcatcgctcccggtggtctggaagggccggaccagcttcaccgtccgataggccgcccgctgggccttgacccactcgttcagcacctccagctcgtcctctgtcacatccgccggtcccgccagatagtccaccgacaccgattccagcagcttcagcccgccctccagggcggtggtgtcctctgtcccggtggcaatcaccactagatagaccaggctgggggcgccccggtcgctgccctcaaaggccagcttcaccagggcctggttgtccacccccagctctgtggggatcatggtgtcgctcaccagcttgtgcagcccctgggccttggcatcccgcacgatcatccccacatagccctttttggcccggttggccgtggcctgagccgccttctcaaaggcgatcttcagcttgggaagtccaatgcttgttgcgctcatattctcattcctttctgtcgtcgtcctcgtcgtcgcaaactccatatccttcgcttctgccttccggcgaaagctcactcattccgttgctcgtcttctcccaacggcgaccgctccgctgggtcgccgttgggccccgctccctgccccagggcggcaaagccgcccgcagggcccgggggggtgggggcaaagcctcgtcgtcacaaacttcgctttgctccgcccgcctctcggcgggcatccgctccgctacgttgttcctcctctccaaaccatgaccggctccgcctgggtcatggtttggagggcggctccgccgcccgggggtcatagggggcgcagccccctattcctcaaaatgggcgggtgggcgggcttttgatccattttgatctcaaagtccatcatcggcggcaccccgctctcactctccgctgccgtgtcctcgtccacatagcccggtctggcatcgaaccaggatgcccggaaaccgacatatgcctctcctggtccaggcgcttctgcggagacgccgaccataatgtgccggtctcccacggcaacagcgggccccccgaactgacgcagcaccttgttttgctccgcccgcagcgcctccgtgctctccaccgtgtaggcgtctgttgcggcgtacagcgtcagctctgccgaaaagtcccatcggaccaggccggcattggcgtccgtataaccggccttgaccacatacaggaagccggatgggcgcttgaagtccgaagggcagaaatcccggtagagcatccgctccggccagagctcggaaatgcggtccgcgatggcctccatcagatcctcataggtcacagcaatccctccagtcctctcacgatcagctccatcagggcatccacttcctcctgccccatttcatccacatcctggcgcaccgcctggtaaaaccattttccggggacggccgccttgcgatatcgggggcggtatccctttccccctcgtgggcctccgtggcggtgtcccccctcaatggcgttcgtgacgtaccccaccgcataccgctttccgttctttgtggtctggtaggtgtcggccttggcccggacagccacatagccgcccttcgttcccatatggggggcctgccatccggccaccttcccgctgccgccgatctccctctggacatccagcagcaggtcccgccccatctgctccagggctttccgcttcccgtccgggaactgcttcagcagccggtcccagctctccaccagccggtccaggccgctggtatccaccgtctgggccatcacacatccccccggaaggccatctcatactcatttttgtatgggtccagcacatggcaggccgtcacgttgtacactgccttcgccggtccctcctgtaccgttaccaggtctccgctcttcaggacgatcatcttcggcaccaccaggacatagctggcatcggtctctgcatgggtctcctcccgctcatatctgacatacttctctgtcagcaccccggggaaggtctggcgcatggtctcccgggtctcaggccgtccggcctcccccacggtgtcctctgtccgtgtggccagacaggtcactggttccaccagcgccgcctgcacccgcaggtgcagccgcccctccagcaggacagcggtcaaaaacagatgctgctccccccagaggatggcctggtggagggtcagcggctggcggcggagcaccagctccgctccccgggccccgatgcctacggaggaaaacaggttcttttttaccgtgttcagttccacctgtccccgcgcttttcgcacgctctcccaggtccagacaccgttcgggccttccttcagctccatcacctcaagccgctcccgcagcttcccggcgtcaatgctcggggtcatcgtgacaccacctctcgtcgtcgcaaacttcgctctgctccgcccgcctcccggcgggcatccgctccgcttcgttgctcctcctcccccaacggcgaccgctctgctgggtcgccgttgggtacccgtttcccgctgcgctgggctccggtttggtccccgccttacggcgggcattctctccctgccccagggcggcaaagccgcccgcagggcccgggggcgtgggggctgtgcccccacacattcaaaagggcgggtgggcgggccttcaaatcccttccgacagcttcagctgggtcagctttctccgaaagaccggattgtcctggagtttcccggcatcgaactgcgcaccccgctgatcatattcgtccagcaccatggccagcatcacgctcagccacagcgccagccgcccggcgttttccggggcggggcgggtcacccccgcccccttcagatagctctccgcactatcccacgcctgatccagcaccagcaggtccgcctcctccggctccggctcctggcaataggccagcacccggctcctgaactcctccgggatggccatctcagttcacctcgtccctggccagatagcgggtatctacccagccctccagcccgtccgcttcagccttcatccatacgcccacgccgtccgggcgccaggtgcggagatccaccgtcaccaccgtgccgatgggcaggaccttcagcacatcggccccgaggtttggctccttcctcagccggagccgcttatgagccacccggcactcctccagcagctggacctccgcccctgcggggacctgcacaacctttgtttccgtttttgtgtccaagttggacacatggttggccgcttccttctccgccggcgcctcctggacgggggcggctgtgtcactctttcgtctgctcataatgaccttcctttccctttagccgcccacgccggcagacgggtcgatcagtgccttgaagcctgcgttggggtccatggtcacggcgtccagccggcacaggccgcggatctcatagctgtcggtagcccaggcgtcgccgcccacatcggtggccgccacctcgatgcccttccgtacaaacagggtacccagagccttgaagttgcccacatagatggggtgcttggtggtctcgtccgggatcaggtcgttgtccgcgtagaccacccggcgcccgctcaggcggtacacattggggtccgcggggttgggcaccagcagggaccgcccgttcttatcctcccagctgtccatctcggcatagccgttctggttggtcagcagggtggcggcggagctgtgggccgtgttcagcttggtgatcagcgccttccgaagctccttggcctcgcttccggcagtcagggccacctcggtggttaggccggtcagcagagccaggagcagggtatttttggtcaggatgtacttgggtccgaaccagccggccagatagcggagcaggccggcggtgttgtcgctgagcagttcggaggagacgggcagccggtcgccatacttgtccaccgtgtaggtgaccttggtgaacttgggctggtcatccttgccgatggtgcccatctccgcgatcttgggcagagccttgcgcttgccctgctccacggcccgccagccgctcaggctgcgtacattttccaccgcgaagaactggctcagatccacatactccttctcgtactcgtggatcatgtcgtcaaagtcctggggcaccaggaagccgccgtccgccccttcaggggagccgccagtctcggtcagggccttggccagaggctcgtagccctccatgccccacaccttgttgaccttcaccccgttgcgcagggccttgacgaaggcggcagcatactcgttgctacgccggatctcgtcgatggccgcgccctttgccttgtccgctttctggtcctggaatgccttgtggcgcagtttcatgccctcgttatcctcggcaaagcggccctcctctgccaactgggcttcagcggcgtccagctcctggttcatcttggctacttcgcccatcagggccttgtggccgtcaaagtccttcttggccagaagggcctcgccctccttcagcttcccagcacgcttggccttcagctccagatattcctgataagtcatagttcgttccctccatatcgcatttcttcttgttcctgtctggccatcgccagttgaaacacttcatcgtccccgggctcatcgggggactcccggccgccgtaccgcttgcttttcacgatcccggcgcccggctgagccggaacgggcagaagggacacctcgtaggcgtcctttgccccgtccagctccatcacgcacagcctgccatcgtactcccggcccggccaatgctggcagcaggtctgcacctggtcggcgccgcagatggagcagagcgcccgctccaccgcgcagcccacgctgcactcccgcaggatgccgctctcaatggcggtgatcgtggaagctgtctgctctgtcctaggcatatagcaccgcaggaccagccggtggacgttctccgcttcctccacgccggcggcatagatccgggcggtctgggtaccggcggaccacttgtggtccatcagcaccggccgccccacaaacaggggagccaggccctccagggccgccagggtaaaccgttcatagtcccggtccacctggtcgtcacaggccgccaaccggaaggtgaacacctcgtcggcggtcagcgcccgcagggtttgggcgttgatcagggccagttcctcctcgctcaccgcctgcttctccacatgggcggctttcaggatctcattcattggctttctctccttcctttgccgggggagcttccgctccctccgggtccccgcccaacggcggctcctccaggtccggctcctccgggacgccggccgccttgcccagcgcccggatgatgctcaggattcgccacagctccagggggacatagttcaggctggagtagtattccttgccgcccgggatggccggcaggtcgtccagcgcccggatctcatccgagcagtaagcgccgatttcacgcatggctttgagccaggcggcctgggcggcggtatcgccccgcaggaataccttcatctcccgcttgatccgcagccctttggcccgctcccccgggagcagcagcttgtaggtatcctcctgtccccattgggtgtcatagcccatcagggtgtaggtcacatactcgatgccgttctgctcgttgctctggtaactctgcttgcctgcgtaggccaggtgcaggggcaccccgaagaaccggcacacatccgccacccggatctcgctgctctccacaaactgggcgtcggtgttgttcatggagataggctgatacttcaggcccaggtccagcaccgccactttaaaggcgttgcccggcccgctgtggatcgcctcccaggactgcctcagctgctccttgggatctctcttcaccgtgctgccgtcctccagctccacctcgtactcaccacccaggtctgtctccgtggtcaggatgccgctgggctggcctccgttgcgccagatgctgttctcatacagctgggccgcccgggcagtgtccagtgtcagggaggcccggcgcagtacgctgaccccctccagaccgtcttccgaataggccttgtagtgcagcatatcctcgcaccggatgcgggtcacctcgccggtgaccggatgggtgaagaggtaccacaccttgccggacaggtccaggtgtatggacacatagtccgggggcagggggatcagttccagcggcaggccgctcacggcgtcccggtagatccaggcgtaggcgtttccccggaggagctggttgcacatcagcagccgccggaagtcgaagggggtcatggcctcgttgggccgctcccacagcacctggcccagatggtggtccggcatccgcttcttggtccgctcttccatgatgtagactggcagcaccgccatggaggtggacagcagctccacgcaccggttgactgtggagatcttcatggcccggtcccggctcaggccgaccagctcctcaccgctcagccagccctccgggttgtccagggtcagaagccggccgacgccggccagccctttccggacggcacttgacttcccggcccgcgccagtcctttccgcaggctcatttctcctcacccgctccccacagggacagcaccgcgccggcgatggccaggccgcccccagtgatcaggcccgcgggcagatagatcatccccgcgcccaccgccaccacggcggcaccgcccaccagcaccagctcgcccaggtgctttgccaggcagttcacaagattcttcatgtctcctcctctccggccatcggcctacaggtgatagtttctcgtccgtattacctcggccaggtccggcttctgctgctccttcagcatggccgccgccatggcgatgatccaggccaccgtaatgtcgatgcgtccgatgctccgctgcttgtggggccggatgttctcgttgatgtccgcatagcagcgcacgtttccgaagttccaccgggcacaggtgttgtgctcgtggagcatctggtgggcccggatcagccgctccgcctctttcatggccggggacaggtttttcatgtcctgtggcacctcgatcaccgggatatgccgctccatgagccggggcgtcagggtgcgggacaggtaggggtccacgcccagggtgtccagctggaactcctccgctacagcggccaccgtctcctccaccatggagaagtccaccatatccccggggcacagctccaggaagcccgcccgggcccagtccctgtatgggacgtgatcccgctgctccgcctccagggtaccgtcctccggccgccaggcccagaacaggaccacccaactctccagccccgcctggggcggaaagagaagggccagagccgtcaggtcggtggtggtggacaggtccagcccgccgtagcacttttttcccctcagatactcccgtaccgccgcccgccgctccggcgcgctgagcgccttccactccggccggttccactgggtcttgtcgtacagggtcaggggcagccagccaaccgccttgacgctgatccactggttgagccgcagccatcggaacagcttttccgccgccgggctctttttggctgcctgtgcctccagccgaagcgcccgcagcgtcagatgcttccccagggaggggttgcaccggtaccacagcgcctcgtcccagatgtccacccggtccaggtcgtccgggtcgtccccaaacatagcagtcaggccgtacagcaccggcagccagttgctctcgtcccgctccagcagggccgcctgggcccgggggaggtcgtcctcctccgccctccgcagggagagcacctgtcgggggtcacccccctccgccaggatgcggcgcagctgccgggcgtcccggatggccaccgcccgctcgtggatctcccagccgatgctgtgccggtccgggtcgtcgcccgcagtggtcagcacgatccaaaccggctggtcgtgggcggctccggccgcgccggtcatcacgtcccacagtttccggtcaggctgggcgtggagctcgtcgaagatcacgcagctgggcttgtagccgtgcttggagtaggactccgaggagagcacctgcatcagccccaccgtgacccagcgcaggccgccgttctccgccttcacccgccttcggtattcgatccgcttttgggatcggacgaccttcagctctcctcgggcaatcattttggcggtccagggggcggtctccagcatgaacaccgccgcccggaacacgatgcccgcattgtccttatccgcggcgcagagatacacctccgcgttcagctccccgtcaccgaacaggtgatacaggcccagggcggcggacagctcgctctttccgttcttcttagggatctccagatagagatattgatacttcctcagcagccggccgctttcctcgtcccgctccatggtagagtagaactccatcagcgtctcccgctgccactcatacagccggaagggcttccccgtgtccgtagtgggcaggcgctccacaaagtcgcacacaaagcgcccgctctcttcgtcccgctcctccatggctcagccccccgccgccctggcctgcctggccttcagcgcgcgggtgaactcgtcttcctcgccctcgtccttggccgcgttggccagcacctccggcaccaccagccggcaccgggaggagatggacagccccatcacctcggcgcactgccggcactgccggaaataggagctctggacagccgtccactccttagccagcttctcgtccctggcccggatggcggcggaggccagcctgtccgacctaagccaccgctcccgggctaccaggaactggcccagcacatcccggtccagctccgtgtaaaggccggcctggcgcaggatctccccgatctcccggaactcagcgtggaacttcttccccagccaccggggcggctccgcccggtccggcggctgcacatggacctcctggtccctgcgctggtcctcctccgtctgggaaaaatgcttttttcccctggccttcaccagatccgtgggctgtctcggtcccggcatcccgcatcacctccctgctcctatgccgccgtcagttcttccgcccggtccgccacccgccggcaggccgtttggtagtaattcagttcccgctcaaagccgatgaacctccgcccggtattcagcgccgccacagctgtggtcccgctccccatgcagttgtccatcaccaggtctcccgggtccgtgtaagtgttcaccagatactccatcagctccagcggcttctgcgtgggatgctcccggcgcccccggaaggggaagcgaaggatcgagcgggggtagttggtgtaggtctgcacacatgcccgccccaggctgtgatagacatttcctccccggcgggcagccgccttctggatcggcttctccagcttgatcagcccctgggggtgataggtcggaaggtgcctgtaaaataccagtatcagctcatgagaccgcaggggctgcctgtggcagttggcaaaacccactggagccgatttctcccagaccagatcatagcggaacagttttctggcgctgttgatcaggtccgtcgcaaagggctgggccgccatcagcaccgcgacccctctcggcttcagcacccggcggtactgcgcccacaacggttcaaacgggatcacagtatcccaggagcagtctgtagtgccatacggcaggtcgcagaggatcagatccacgcttccgctctccacccgctccatgcccaccaggcagtcgccgtggtagagctgtatctgccgcttgatcgtttctcgatccatcactttcgcctcccatctcatggggaaattttttcgcgcagcgggatgcctgcggtcttgcacactttcacgcagacttttttgacccggggggagggtctgaggccgaaggcctccctgcgcccggataggcgcatgcccagccgcgcgcctgcgcccaagcgtcccgccatgtctcccgtgcagtgctcaaaaaaagccccccgttttccgctgctccaaggccgtcttgcggtcatgacagcgcttgcacaggctctggtggttggccgggtcgatgaacagcggccagctcccccggtgcggcttgatgtggtccactaccgtggcccggatacggtcaccacgcttggcgcactcgcggcagaacggctcccgcaggagctgcgccgggcgcaggtcgtccgtccagataggcaggctgtaccagctgtgatattccgccgagacccggcgaggggctttctggggcttgtgcttgggacagtacccctcccgggtcagggcggcacaccccgggtgtcggcacggcctgagcggcttcagggccatgggctatcacctccaggcaaaacaaaaagcgcccaagccacgacacccgactgctcgggttgtcatcggctcaggcgctggtcactttggacgcgggctcaggcgcttcgatattcacgagggtctcctgtccgcagcgtttgcacttgcgtggcaggtttcgggcggtcgtgtctgcgcggaccttcaggagttttccccgttggcacaccgggcagatcacccatccgtccctcacgatgattttaccacaacgcatgttcgattgcaaatctttttaccccctttttctgagaaatcaaagagaatatacttacccccgagaccgaaaagaatagaaaagcctattctttcttccgtctgcgccgccgcttgctcctggcccgtctccggtccggctggtagggcagcatatatttgatccaggcaaattcgccgtatccattgcggacaggtccctcattttgcaggatcacggcctcgggcggagccgtcagcgtcacatagtccgggacggtctccgtctccggctctgtccgggccagccccagagacggcgtccaggtccgctctcccacctgtgggtgtccccactcccgcggctccttggtcaggtagctggccaggtcctcgtaggtgtggccctgattgaactccagccgccgcacctctacgttgtctccatagatccagagccggcggatctcctccaggtcctctccggtgctgttgacaaccagatggtggtggagccggccgccaggacatccgccctctgtcacataaatatagtggagcagctgtcctcggggctttctggccttccgcagtttggagaggaacgaccgtattcgccggatggccgcctcccggtcctccggcaggtgcgtatcatcataggtcagggtaatgaacaggtccccgttgtcaaaattggccgccagagtccgttccagcttctggaatgaggtcctggcgttcagcttatcccgggcggcggtagatgcccgctgcttctgggtccgggcccggggcgagtctccggcggcggccgtggtgtagaccaccgcgcacacgaggcggccggcccggacctgcttcaaggtcttactcactggcggccccctttccctccagctcgtccagcgcccggccaatctcccgccactccttgatggtcggggaggcattgccggtcaggatgtcccggagcaggtcgtccgtgatgccaaacgtacatttatcagagatccggcgcagacagcccagcccattggccccccggaacagctggagccgttcaaagatccgccgcttctccgcagcgtttctccctgtgcattgcggactggacggttccggctcctccggcaccggcggctcctcccccagcaccaccggaggcatccacccaagctgctccacacagtaggtcacatccttgcccagcaccaggattccttgggcaatggactccagcacataccgccggtaattctggagcgagcgcacctcattctggatgggcagccggatcaccaggacggagcccggctctctcactcgatccggcaaaaccgcttcatgatccattcttgtccccgctcccttccctcttttgtccgtgtttccccgtggcccagcagatgtaattgcatactccgtctttttcatgctcacaacacttacaaaagtcagctctgaggaaaatgtccgccaactcctcgtcgctcatggcccggattttatctgcgtttgtcatgtggtgtcctcctctccctccggctcatccagcggctcataaaacgcgcaatgagccatgttcccctccccggcaacggcacaaatatctccatccatgtcaaacacccgggagatcttcacatatttcagactgcacccaaagcacgggcttccatccttgttccgccacttccgcagagggcgcttagagcggtgtttgcagatcatagagcatatcaggtcagccatagcaatgctcctctccctccggcgggcggcggtaaaattttgcccctaaagtttctacggcggattcataacttgaccatccgcaaccataaatcagcgatacagcaccccatctttgcgtcccaactaatgcccaatgaccgcattgattcccagtgtctgaggggaaagtcatgtaaactggctccccatccatcttccgcagttcctccatcgtcagcggctcgttcggcggggtgagggtgggttgacgcaaggtcaaatttgcagcaacttgtggagaaacggcttttgtgagcgccaatgtaccgcatttctcgcaggcaatcaaatgcagcctatcttcgcagtaatatgtcataagagggccaccgcaacggcggcattttccatctacctgaaagcctcgcccttttggttcatcatagagcttgtggcacagcttatcgaggtacgttgcgcccttctcaatcgcccttgccatctttcagagcctccccattatccaatttcataaagcacccccagaacgtgcggctctgttttccgctgtgatgtccaaacagcggcttttgtccaatggctttccagacttctgccgccgggatgtcgtactccgaccacttgaaaataagtacaccgtctggtttcaaaacccgcatacactcccgaaaaccattgtggagcatttggggccaattatcgtccagtttcccgtacttcttgacaagccacgccgtttcctttgcgccggtcaggtggggagggtcaaacactaccagcgggaaactgttgtccggaaatggcaactctgtgaagtcgcacataacatccgggttaatgtccagcgtacagttaccagcgtttttccagaggtgatgatattgttccctgcgcttatcgcagtacacagccgctggatggtgcttgtcgaaccagatagaccttgcaccgcaggttacgtcaaggattttcttgtccatggaactcctccaatctctctatcaccatctccacggcctcgtccgtcatgggagcaccgcagtacccacaaaaatttaagaagttatccgggctttgctttccgcactttgagaagtaaaggtcgtcatactcacaccgttcgtctaccgtgacctcgtgctgttcgcccatgtcgtcaatacccttgacgcggcgaaaaccaccccggcgcttatgacgctttacccactcgcccctccacaccttctccacctgctcctagctgacggggcggagggcagagagggccagcgtaaatgcgtccctgattaccgattttccaggatacatctccctggctgtcgtcagaatctcaaccgcgtcttcccgcgtcatcagtcaattcccccttccaccacatcgacaccatcttgtcccgggtgagcttgtccaccacccggcccaggttccggctgccgtccatggcggccagccgctccaggttatgcagcgtctgcgccgtcaccagcacagacagcctccgcaggttcttcttccggctcatattgactcctcctcaaaatggcagttcgccctcatcctccagctccgagaacgactctccgggctctggcggcaggctctcctccggtgcgttaccctcgctgggggcggcggctttggcgccggcaaaatagatattgtccgccaccacctccgccgcccgccggcgtgtcccatcccgaccggtgtagtcccggatctggagccgcccctctaccacagcctgctggccgttatggaaatactgctgcacaaatttggccttggcgtcccaggccaccacgtcgatccagtccgtggcccgctctccgctggccttatccttgaaatcccgatccaccgccagggagaaggaggccaccggcttgccgctctgggtgtaccgcacctccgggtcccggcccaaccggcccatcaggattattttattcagcatcgtccgcctcacagtctacgcagccaatccagaggtcaatatcgtctacctcgcagccgaaaaaacacgaatcacagctcaaaggcgggtcctcgtttggattttcgcaggggcggggttcgttttcccagtccgggaactcacatcggtatttactcatataaaatcttccttcatccaatcctcccgggcctgctcaaaccatctgctcattccgcacaccgcccaatggcctccgccagggcccgcagggccttggccatcccctgggctgcggcctggtcctcccggccccgggccttcaggagcatcccccgcatcttgttggccagatccttgccctggtcaaagaggacttcaaactgggccacgtccttgtccgcccccagggcggcctttttctccgctctggcctgctcctccagctggagccggacctgttccagggcctcctccgcgtttttctgcctggcctccgcccgctccttttcgtaccgtgccttatccagcttggcctgcattatggacaccgccacctgagcttcctctcgggccttgtcgatggccgcctggtccaccacggtctctacagccacctccaccggctgctccttcagctcggccagctgtgcctccagcctggccacagcctgtgcagcctgctcccggtcctcctgcgccccagacaagcggacattgagcagcttcatgtcctcctccatcttggcccgggcctgctccgccgcagccgcgtccgccttggccgcctcggcggcctgccgggcctcgtcccggtcccggatggcctgctccagctggcgggcgctcatgtcgatcacgttgtggtcctccacaaatcgctcccgctcgccctctggtagggccaggagcatcaacgccttggatgcccccaaatccgacaacgttgtcggatttgaccactcccgggccaaccgcataaagcgttgggcggagcgctccgaaaattccactcgttcttccagccaggaccgccactccccgtgggacagcatttccttggcctcgatcaggcagcgcccaatggtgaggatagcctctccgccctggcgcttggcctccaaaatgtccccggtgatggtctcaatggtccgcacctctgccggcggcgccatcgtctgggcgataatccgccccagatccggcttactcatggttcagcccctcctttgtcagcagctcagccgcccacgcccggtagtctctggcggcggagcaccaggggctccactgctggacggccatccgggcccaggagctctccggcaccttgtccgtcctgcggatgacggtgtcatataccggcacccgcccgtcctcccggagataggccgccgcatcctccaccaccggggaacggtgccactggttgaccagcaccccggccacccggatctccggccggatataccgcaggctgtcgatctgctccatcaggtcggccacgccggtggcagagcaggcgtcggacagtacggggatgatgacggcgtcgctggccaggatggcggagacgcaggcggcggacaggttgggcgggcagtcgatgaccatcacgtcataggctccgtcctcttccaccgcctcccccatgtcccgcagggtccggtagctccggccaccctcgccgccggcggcctccaggtccagggcccacaggtcctccgacgccgggaggacatccagcccctccacgtcggtatgtaccaccagctcgtcatagcagatagccatgccccgcatcagggcccccagcccgtcgtactccccccgtgggagcaggatctgggtggcgttggcctgcccgtccgcatccaccagcagcacccgcaggtggcagctggtagccagcacataggccagattcacggcggtggtcgtcttccccaccccgccctttcggttgacgattgcaaatgttctcatggtgataactcctttgtgtcaattttttgtgaactcttcgggggtatcctcccctgggtcctccagcgctccaaactccatctgcttgtactgcggctcctccttggtccgcgggagcatgatccccacggagtctggccggaaggtctgggtctcgccacgaaacaccagcgggatctgtcctgtctcgccctccttgtttttggccacccggaggatacgccggctccgcagcagccccggctcctcccggaaaatgaacatgaccacgtccgcgtcctgctcaatctgtccggaggagcgcagggaggccagggtgggcggctttggcttcccgccctccggccgggacagctgggacagggccaccaccgtgatgttgaggtcctgggccatctggtgcagggccttggagatatacgtcgcctggtcaaactcggtctttcccggcgcccggatcagggtcaggtagtccacatagatcacgtcgaaccggtgggcgagggtataggcacggatgtcctccaccgtcatgctggacgcccggatcagggagagcctgcgctttttgacctcgtccaccttgcgctccagctggaagtagtcctcctctgtcagctcccggcgcttgatgcgctggctgctgacctgggccaccatggagcagatgcggctgaacagcttggaggtcttggtctccagggagaagaaccccacccgcagtgtctccgcctgggcgtaggccatggacagcgccagcgcggtcttgccgtccgacgggtagccgcccagcaccacaaagtctccgccctccgccgtcagcccctcgtccaggaagtccaacccccagggcagatagcggggcgtccgctccagctctgcgtagaagtccagcatcccctgctccatgtccacgcactccacgccccgccggtccatcatcagctcatagagccgcgacactggttcccgggccgtctccagggtgatatccgtgccagccagggccagtcccgcccgctgaatctcccggagccgggactgctcccggacaatgtccatgtactcccggtagttctgcgccgtcggggtctcccgcatcaaggccagcaggtatttccggcgtcccgggtccggcccgcccatctggttgagcacacacaccgggtcgatcttctcccccgccaggtgcagggcccggatggccaggaacacctcctgccccatgggctcggtgaagtcctccggctggaggttggtcatcacgtcgcccacgatctgcggggaaatcagcatggaccccagcacgctggactgagccagcagatagtccgccatcagtcccacccccatctctggggcggcatggactgctccgccgggctcccgcccctgcgcagaggaaagactgatttccagctgttggccacagactggcggatcagcagcagcttgtcctcccggcggccctccgagagcctgtccagctcacccaggagcatcttcaccgcccgggccgagttgatggcccggagctgggtccgcaattcgataaacgcccccagggcctggtgcagctcccggtcctcccccacataggccagcaggaggggcttggcatcctccgccagatcgtacttgctgggccgcttgcccccctggggggctttagggggtcttttaatctcttcttctgttaagtctttattctgttgtggcggaaaacccgctgacggtgtttcccgttgacggttttccccgttgacggtgttttcgggcaacggtgtttttgccccttcaccgttggacgggtttccgggcaacggtggcgcctcgtcctggaggacgtacacgttgccgccgaacttgccgccgctgtcatgggactgctcccggatcaggtagcccactgtctggagctccttcagcaggcggcgcaccttctcccggccgcatccggccttgaccgccagcccggacacggtgtactcccagtcgtcaggcagggagactatcagggcgaacagcccccgggcctccaggctcagtcggtcatcctgggccacctcccggaacaggaccacatagccctttttccgtccgctgcggacgctgctctcacccatggcggtaccgccttccgacccctctgcaaacaaatccgtcccgaagacagaccgctacaccatttgtcagccggacccagggctcccggttatctggcgtgacctccttcatcggatcgatgggcatgtcgtactcctccgccccccggaagccaatacggcgcagagccacccggcgccccgctggctccaggtctttgagcacattcggccagccgccgccgttgcaggccaaaaacagcagctcctggcgttccacctctcgggcccactgttcccgtaaattttctgggatcatcccaatccccccttgtcaaacacatgttctcgtggtataatacagatgttctcatggttgacaaacccctttgtcaactgtcccggacggtttgagtgagccgtccgggactttttatatcccatcatccgtccatctccggctcgatcagcgccagggagccgtctccccggaccaccgccagcacgatctcgccgccggccagccgggcccggtagttgtaggtggacagacgctccacctccctcagctgctccggcccgtacagccccatcagctggtccgacacatttgccggtgtcgtcatggtcgtcatcatactgttacctcccaaaatacacggcgcaggccaggacaaaggccccagccgaaagcgccagcatgccccactccgctgcctcatagagccaggggtgttttttcttcagtctggaccacatgtttccgcctccctaccagatcccctgcgcctggaggcactgggtgaccacgcgctggatgttccggcggccctcctccctctcttctgcggtgtaagggatctcccggtgccggatcatgctcctggagatgcccatcttcggcccggcgtccgagaatacggtccggtccacccggacggtcctcccctgccggtcctggatctcatgcaggccgctccatttggtgatcgtcaaggggtattccttgtccccgcttttctccgtagtctgcgtcacctccacgaccaggtcggccttcacggccttctccccgtctatgtagatcaccggggtgcccatgggcgggctggcctcaaaggtgaccgactccgtcacctggaccgggtctccatcctggtcctccacctgatgagggcccacccggcgggtcactttgacccggtactccttccgggtcacgatgtcataccaatagtccatggtctctgtcacttccacgccggtcacctccctcgtcatggtattcatcggcgcttgtccgttttcgtgctgccgtcacttgggcattaaaacgcggttgaaattgatctccatgtatcccagcgagaacagatacccgtcctcccccttggctatcgcaataatgacccagccgccctggttcagcattgcggcggcttcgtcgatattcctggtttcatggagcttcgtgaccgatttcaactctggcctgatttttccttccatcccctcaccccctctccgtccccggctcggccgggggtacttcgatgtccaatcctgcaaacaagtcatcaatcgtacatttaagggtgttggccagcaaaggaagtcttgcggcacttggcatactgacaccacgctcccattgcgccaccaacgactgggtaactccgacctcttgcgctagctccgcctgtgtcatcctcagggcgcaacggagtttttttagattttccaaaaatctgcgcctccttttcagtagtttaactactgtaattcggattatagtagtcctcctcttctttgtcaagtagtaattctactatttttattttttctcttgcaaaaaagtagagacactactattatgagggcaaagggaggtgtaatagttgaaccgtttgaaggagctacgcttgcaacatggctataaaacacagaaggaccttgccgatgctctgtttgtgaatcaaactgctgtaagccaatgggagcgtggcgttactgttccaagcagtcaaatgctatttaaattgagcgaactatacggtgaatctattgattatattctgggggtagacgataagacaaatgagcctccgtttgaggttatcgagccatccactggaacacctacccctaaagaggctcttcaggccgccttctggggtggcgagaaggatctgacccaggaggacctggatgccatgtgggatgatgtggagcgatttgccgcctttgtcgcccagaagcgccgggaggagaaagagaaacatgactgatttgctggatctttacggtctggccgaggaacatgggacagaggtctattggtttgacctggggacagcggaatccctctcgcttccgctggaggacggctcctgtgctatcgccatggacccctggcggatgtccactctggccgatgagaaggtcaagctggcccacgagctgggccactgcgagaccggcgccttttataaccgctacgccgcccgggacatccgtcagaagcacgaaaaccgggccaataaatgggcatacaaaaagctcgtcccagaggacgagctgaaacaggcctttctccagggctaccacgaaccctgggagctggcagaatattttggagtaaccgaagcgttcctgcgtggagcgctcaactgttatttaaaacgataaaagggattcataagagattgaatttatccattgtcttgagtgaggatgaatttagatggcaagtaagtatgactttgtctctatcgattttgagaccgcaaactcccgatatgacagcgcatgttccattggcttagctgctgttcgagatatggctgtagtcgatacattctactctttaatcaactacgacggaaattttttacccgcaaatatctcaatacacgggattcatcccgaagatgtgatatccgcacctactattttcgaattataccctacccttcttaatttttttgacggatgccttgtaattgcccataacgcccgttttgatatgagcgttttaaaatcgtcccttggcggatggtactcgcttcccaattttaaatatgtcgattccgttgctcttacgaagggagtatttcctggtaagaaagatcttcaaagttgcgttaactgccttggcataacattagagcatcatcataatgcactggacgatgccattgcttgtgcacgggtggcgattgaatgtacccgtcgagcaggatactcagatattctccatttttgcattgaacgtgagaatataaaaatacataatatttctgacttagcaatttctcacttttccgcattctcatcttcctcacattcacattctaaatttcaaactgtgtctgtaaaagagttatctccagtaacaaaagaatttgatccttcccacccgctgtatcaaaagaaaattgtatttacaggcgaactatctatatcaagagcagaagctatgcaacaagctattgatgtcggagctattattaggacttcggtttctacaaaaactgatttcctagtcgttggacaacaagactccgaacttgttggcgtagatgggaaaagttcaaaggaagagaaagcccaagagctgatctcatccgggaaagggaaaattcagatcctcaacgaagcagaatttctgtctatgctaaattataagcaggaggaagtaaataatgagcaaccagactattctggtagggtttgagtcgcctgaataccaggaaaccagcttcctagattctatcctccctaccctgcaatcagttatagccgtccgtggtggaaagccaacacaccttttctacaaatcaacggcaactgcatctggtccttccagcggttataccgccgtctatctgcatacctttacagtattccgtctgcatattcgtggaaaacagcactacatcatgcttcctcttgttttttctgacctgatcccggaacattttcccacgaaacagatgaaatccgaggggaaatacatccgtattctaattgatccggaacacccggtggaattctacaccgactttttggtccaaattactggagaggccatgaaccgctaccccaaggaatgggactgctgctctcgatacatggagtgcagcgacgcaaaagcatgtgttcatccggacaaagaatttgcacttgggtgtggttatcggaaaattttgaattctggccgtattttctatgggaaaaatcgtaacgtcgattaaaaataagaaagaagtcctcaccatgaccgaaacagacctggccgctgcgctccgccactgcatcgacgactgcggctgctcctggcccaccgcctgccagatcctcagccggatggccggacggacctataccctggcagagctccgggacctgtaccggcgcacatgaccaaatccgcccacgtggacggatttggccgtaaagccaaagccctttctcacgttgaaataaggagacttttccatgcccatccatcttcctgacgcgctgctcccccagctggccgccctggcgcgggacgcggccgcttcccggctcgtcctcttcggctcccgggcccggggagacaaccgggaacgcagcgacatcgatctggccgtctttgggctggatgccgcccagtccggccggctgcgcctggcactggaggagctgcccacccttctggaatttgacctggtctgtgttgatgccaacacctccccccagctgttggacaacattgaacgggaaggagtgaccttgtatgcttcagaaatgtgaaaacttctgccgcgccgctgcccggctctccgaggccctggcagagtatgcggtgaccccgggctccactgtgatccgggacggcgtgatccagcgctttgagttcaccttcgagctggcctggaagtccctgcgggagtacatggaggaccagggcgccgccatggacgccgtcttctccaagcaggtgttcaaagccgcctatgccgccggcctgatccacgacgagcaggtctggctggatatgctggcctcccggaatgtcacctcccacgtctatgacgacacacaggccgcccaggtcgtcggggccatacgggaccggtatatcgccccgctcactgagctggcacagttctatcaggctgattaaagttcccctgccgcccccaccccggggcggcatctcaaaaccgtcacgctcgaacattcgttttctttcgacacaggaggcactatggatcaccgtactgtcatggatctggccggcacggatgcggccgcctatatccgcaaaagccgcctggaggagggcatggacacccaggaggtcctgtccaagcaccagaaggccctcgtggagtacgccgccgcccaccagatccacctcattgagatctatccggaggtggtcagcggagaatccctctatgcccggccccagatgctccggctcctccaggacgtggaggagggccgctatgacgccgtgctgtgcatggatctggaccggctctcccgcggtcggatgaaggaccagggcatcattctggacacctttcgggaatcagacacgctgatcatcacgcctgaaaaggtctatgacctgtcagacgacatcgacgaggaatacgccgagctgaagacctttatgagccgccgggagtacaagatcatcaacaagcggctccagcgcggcctgcgccagtccattcaggcggggtgctacgtggccaacgccccctatggctaccggaaaacggtcatcgaccgcaagcccaccctggagatctacgagccggaggcgagattcgtccagatgatgttcagcctctacgcccaggggttcggctgcacctccgtggcccgccaggtcaacgcgctgggcgccaaaccccaccgctccgccgaatttaaccgcagcagcgtcaatatgatcctccgaaaccccacctacatcggcaagatcgtgtgggaccagaagaagcacatccgaaagggagcccgcggaaatcccaagcatatcaccatctaccagcccccggagaagtggaccatcaccgacggcctgcaccccgccatcgtggaccgggagctgttcgatcgggtccaggcgatcatggcgggccgctacatcccctccaagcgggacggcacagtaaagagcccgctggctggactggtcaagtgcgccaactgtggcatgaacatgcagcgcatggtcatgaagcggtacccctatctgctctgcacccgccccggctgctgtgccagcacaaaattcgagctggtggaaaagcgggtcctggactccctccaggattcgctggatcagctttccgtgcgcaagcccgcctccggtgtgcaggatacctcccccctggagctctccctgctggccgtccagaaggagctggccggcgccaaccgccagaaaaaccgtctctatgagctactggagctgggggagtatgacatccccaccttccgggagcggatggaggcggtcaaggggaagatcgccgctctggagcgcaaggaggcggagacccgccgcaccatcgaccacgccaaaacggctgacccccaggccctggctcagcggatcagagccgtcctggatgcctacgggagcagcgacaatgcccagcgcaacgcactcctcaaatccgtgatcgatcaggtgtggtactccaaagccaaaaagacaaagcccaatgattttgacatccagctggatctaaagcccttctgatccccgcaaagtcgcttgatccctgggattttcatgatatataaagcgctatatcttccgacaaagactgcattgaggatctgcgggtctatcccacctgcgggtcgcaggaggtccttgaccgggccctgtcggtcaaggccgggacagccgagctgctgtacgcctacatcgatgtggagcccgtagggttcaaccgcgggttctataccgtggatgtgcggtatttttaccggatcaccgctgatgcgttcatcggggccgcccgccccatcgaagtatgcggtctggccgtatttgacaagcgggccatcctgttcggcagcgaggggggcgccaagtccttcagctccgactcccccagcgtgtgcagctgccaggatctgatgggcagcagtctccccaccgcacacgtggaggccattgcctacaagaggccgtgtccgggccaccggcgtcaaaagccggttgacagatcccgctctctcctctatactcccagatacacccctgacatcccctgtatcccgttcccggcccctgggccgcgggagaaccggagcgtttttatcacacgataataaaaggaggactcacccatggatcagatggagatccggcagctcgtcgcccggcagagggcctattttcagagcggtgcgaccctgccggccagggcgcgcgttgaggccctccgcgcgctgaggtccgcagtggctgcccgggaggaggagctgaacgacgccctccgggccgacctgggcaagagcgcctttgagagctatatgtgcgaggtgggcatggtcctcagtgagctgacctatatgatccgccgcacccccgccttcgccgctgaccgccgggtcaggacccccctggcccagttcgccgcccggagctatgtcaagccctccccctacggcaccgtcctcatcatgagcccgtggaactaccccctgctcctcaccctggaccccctgatcgatgccctggccgccggaaacactgcggtggtcaagcccagcgcatactcccccgccaccagccgggtcatcgcccggctcctggcggagtgctttcccccggagcatgtctcggtggtcaccggaggcaggcaggagaacgcctgcctgctggagcagaagttcgactatatcttcttcacaggcagccaggcggtgggccgggaggtcctgctccacgccgctcagtacctcacgccggtcaccctggagctgggaggaaagagcccctgcatcgtggacgagactgcggatctgaagctgaccgcccggcgcatcgtctttggaaaatacctcaactgcggccagacctgcgtggcccccgactatctcctctgccaggagagcgtcaaggacgccctgctggaggagatcgtccggcagatcactgtccagttcggccccgcccccctggacagccccagctacgggaagatcgtcaaccagaagcacttccagcgactgctggggctgatccagccggagaaggtggtgtgcggcggcacctggcaggaggaggccctgcgcatcgctcccacggtgatggacgccgtcacctggcaggacccggtcatgggggaggagatcttcggccccatcctccccgtcctcaccttctcccacatcccggaggtgctggagctgctgaaggaccggcccaagcccctggccctctacctgttctccaggaacaaagggcacattcgcgccgtgacagagcgctgctccttcggcgggggctgcgtcaacgacgtggtcatccacctggccaccagcgccatgggcttcggcggggtgggcgagagcgggatgggggcctaccacggcagggtgggcttcgagaccttctcccaccgcaagagcatcgtggacaaaaagacctggatggacctgcccatgcgctaccagccctatctgcccctccacgagaagctgatccgccgcttcctccgctgatccctccgcccctccgccctgacggcccggaggggctttttttgccccgccagggatatctcctccgccgcccccatacacatgactggggtgatcgatatgctgcactataccttttttccacaggaccaaaagacgctggagcggctgctgtcccagctgatcgccgccagactcctcgccccgccccggaaggaggacaggagatgaggatggtggggtacggccgggtcagcaccgaccacgaggaacagcgggacagcctggagcaccagcaggcctttttccaggacttcgcccgggccaggggccacaccctggtccgggtctatgccgaccaggggatctcaggcaagtggctgaaaaagcgggacggcttcctccaaatgctccgggacgcggagcggggggagttcgagctggtggtggtcaaggacatctcccgcttcgcccggaacaccgtggactccctggagagcatccgcaggctgaaggccctgggcatcgagtgcatctttgtcaacaactccctcaaggtgctgggggaatcggaattcatcgtcaccatcatggcggccatcgcccaggaggagagcgccaacctgtccaagcgggtgaagttcgggaaggacatcacctcccggaaggggagggtgcccccccgcatctacggctacgaccggctggacaacttcaccctccggatcgtcccggcggaggcggaggtggtgcgggagatcttccgcctctacctccagggcctgggctgccggaagatcgcccaggctctggaggagcggggggcgtccaccaaactgggggccagctggaacagccgcggggtgcgccgcgtcctggaaaatcccatctactgcggtcattatgtcaaccacaaatacaccgtgagcgacttcctctccggccagatccagcgtctccctccggacatgcactaccaccacgacaggccggagtgggccatcgtctcccctgacacctttcaggaggcggcccggctgatggagcagcgtcggcggaagtccggctccgcctctcccacccgatacagcggccgctaccccctctctaccctcatccgctgccagagctgcggccgcgccttcacccgccgccgggtggcctacccctccgggcggcagtatgtctactggcactgccccatccacagcgagtatgctggcagccgctgcggcaacggcaccatcctcccggaggaggggctgctggaccagctccgggcctggctggccgcccagatctcctcccccgccgcgctggcggaggcggtacgcctccggctggacgcccgcccctcccggcctgcggaggaccctgccgccgctctccggcgccgtctggaccagctggagggccagcgtgcccgctatctggatctctacgccggcgatctgctctccatggaggaactgcgccggcggctgcggctcctggcggagcggggcgcccgcctccgggaggatctggaccggctgacgcgggacccgcccagggatctggaggcggagatcacggagcaggtccgccgcgtcctctccctggaggacatcaccaacgaggagctgcggcagctgatcgaccgcatcacggtgagcgaaaagggggatgtgtccatctaccccgcccggccggcggaggagcctcccgccgccccaggtgcttttgtaggcaatggctgaggccgtggaccccatcatcctgaacatgaagctggtagacgtatgccagtgccgcccctgcgactgttccctcaccgagatcccccaggccatcctggactgcttcggggactccctcacccagggcggcgacgtacaccgcctgtacgtcaccctgggccagttctccatcatccgcctggagcgggacacccagctgctcatgccggtctacgactactgcatgccggagaaggagtgcgactgcggcagcgactgcagccaggaggacccctgcgaggtcttccggcaggtcaagttccccgtggacgaattcttcccgcccaacagcagctgcagccgcaactgctcccgcagctgctgaccccccaaaacctcccctcctgccggaggggaggtttttcttgcagtccctcccaaattgtgctatggtagctccagtctatttgatgcaggaaagaggagatcctgatgagaagatcagacagagcccgggaccggagctttgcctttgacgtgatcgaccgctgcgggcacggcgtcgccgccctctccaccggcggagagggcccctactgcatccccctctctctggtgcgggtgggggacgacctgtttttccactgcgccctggagggccgcaagctggacctgcttcgccgggaccccagggtgtgcatcacctttgtggccgccgaccagcccgcctacctcccggagagcaacatgtacaccaccttcttccagagcgccgtggtcaccggcaccgcctttgaggtcacagaccccggccagaagaccgctgccctgcgggccctgtgtgaaaagatgacccccggacatatggagggctttgaggaggccgtccgccgcagcctgacgtccactgccgtctggggcatccatatggaggaggtcacaggcaaggagaaggcgcggaagcggtaaagatcccggaagcctcaaaagcctcggcgccccgatgattcggagcgccgaggcttttctcacatcagtggggcgaagatgcgcaggacgctgcgatagagctggaccaggatgttcaggtgcctggcccgacgcaggctgatggcctcgcactgctccagggtcttctcaaagtccgccttgatgtccgcgatgcagggggcatcacacagccagacaccgtcctcaaagtggaggaagaggctgcggtagtccaggttcacggtgcccaccgtggcataccgcccgtccaccacaaagtttttggcgtggatgaagcccggcgtgtactcgtagatcttcaccccagcctccagcagaggcggatagtgggccttggtcacctcgaacacggagcgcttgtccgggatgtggggggtgatgatgcgcacatccacccccgctttggcggcgttgcacagggccgtgttggtggccacgtccacgatcagatagggcgtggtgatatagatatagtcccgggcccgggagatcatgttcaggtacaccgcctgccccactttctcgtggtccaggggcgtatccgtgtagggctggacccagccggagccggggagccggggcatggactcgggccggaacaggtcgaagtcctcctcccagccggagcagtagtcccacatggacaggaacatgacggtcatggaccacaccgcctccccccgcaggaggatggcgctgtccttccagtggccgaaccgcacccggcggttgatatactcgtccgccaggttcatccccccggtgaagcccaccttcccatcgatgatgcacagcttccggtggtcccggttgttcatccgcagggtcagcaccgggaccagccggttgaacacccggcactggatgccccgggccgccatctggtcattataagtgcggggcagggtgaacatgcagccgaagtcgtcatagatcagccgcacctccaccccggcggcggccttccgctccaggatgtccaggatggcgttccagcactccccctcctggaggatgaaatactccaggaagatgtaacgctccgccttctccagctcctccagcatccgcacgaaagccaggtcgcccaccgggaaatactcggtccgggtgttggtgtaggcggggcaggaggcgtaccgctccagatagcggatctggcccaccgcgtcctcatccaaatgggtcagcctgtccgccttgaaatccccccgcagcacctcgttgctgcgctccgcaatgcccttcatcttccggcgggtccgctcagagatccggttgccgcccagcaataggtagaggatgcccccgaacaccgggaacggcaggatcaccaccagccaggcgatcttatagcccggctcgctgcggtcactgacgatccacaccgtagccaggaagctgacgaagatgcagaaccaatagaagtagtcaaaatgggcggtaaattcgttgaccatcacgaacagcaccgcgacctgggccaccagggccagccccgccagcacggagcggtggaagaggatatatttgatttttctccatttcatgttggaagcgcctcctgccccgtctctctttctctccgggaggtgggtcactggaccaccacattctcctcccccagccgctctctcaggtcggccagcagggaggggtgtatcatacagtatcccttggactgcttccggatatcctggtaatacagcaccaccggctgctcccccgggaaaaaggagagggccagcttcacctttcgggtcctggggtcgtccgggccgggcaggcggatgaagagcttccgctcccccgcctcccgccgctcctccgcctcgggtgtgtccagggggcggatctcgtccgccatcagctgtggctccttctcgtcccggacggagatcctgccgctggccaggatagcctggttctcccggatgtatccgccgctctggtccagggcgcgggcaaagaccagcagctccatccccccggtgtcgtcctccaggctgacataggccatcagggtattgttccgggtggtcctggttttatatgtggagatcacgccagccaccttcaccatctggccgtcccggtagacggcgggaccgtcctcccgggcgaagtcgctcagaatggagccgatggtcaccgcccccctgcggcgggccgcctcccgataggcgtccatggggtggccggtgaggtagagaccggtgacctccttctccatggtcatcagctgctggggggtgtactcagggatattggccaggtggagagccggcagggccgcctgctccgcctccccgccccccattccgaacaggtccatctggccctccacgttccgcttgcggctggcggcgatgccgtccagcacctggccgaagacctccatcagctgggagcgcttacagcccatgcggtcaaaggcgccggacttgataaggctctccagcacccgccggttcagatcatggtcgaacatgcggtcgcagaagtccataaagtctgtaaagggtccacccttgctccgctcttccagcaggctgttgatgacgctccggcccacacccttcagggccaccaggccgaagcggatgcccccctcggagacggtgaagtccgcctccgactcgttgatgtccgggggcagcaggctgatgtgccactccttgcactcggcgatatactccgccaccttgtcgctggagtccagcaccgaggtgagcagggcggccatgtactccttggggtggtggcacttgaaccaggccgtctgataggccaccacggcgtagcacaccgcgtgggccttgttgaaggcgtagttggcaaagtcgtagatctcgtcgtagatgctctgggccaccgcctcggggatgccgttggcggcgcagccggcgatgctccgcgccgggtccccgtggaggaaggtctcccgctcccgctcaatgtccttcacctttttcttggacatggcccggcgcaccatgtccgcctggcccagggagtagccgcccagctgctggaagatctggatcacctgctcctgatacacgatgcagccgtaggtgttggacaggatgggcaccagagcggggtgcttgtaggtgaccttctccgggttgtgcttgcaggcgatgaaccgggggatggactccatggggcccggacggtagagcgcgatgatggcggtgatatcctcgatgctctggggcttcaggccgatgcacaccccggtcatgccggcggactccatctggaacacgccggaagtacgcccctcagagagcatctggaaggtggccgggtcatcctccgggatctggctggtgtggaagtccgggtggctgcgccggaccagccgggccgcgtcgtccagcaccgtcaggttccgcaggcccaggaagtccatcttcagcaggcccagctcctccagggtggtcatgatgtactgcgtgactaccaggtcgtcgtttttggccagggggacataatcgctcaccggccggctggtgatgaccaccccggcggcgtgtgtggaggtgttccggggcatgccctcgatggccctggcggtgtcgatgagctttttcacctgagggctgccgtcgtaggactccttgagctgcttggacagcttcagggcgtcctccagggtgatatgcagggcccccggcccgctggggatctgcttggcgatcacatccacgtcggcgtagggcatgttcagcacccggcccacgtcccgcaccgccgcccgggcggccatggtgccgaaagtgacgatctgggccacgtggtccgccccgtacttttgggccacgtagtcgatgacctcctgccggcggcggatgcagaagtcgatgtcgatatcgggcatggtgacccgctccgggttcaggaagcgctcgaagtacaggctgtacttcacggggtccaggtcggtgatgttcaggcagtaggacaccatggaccccgccgccgagccccgccccggccccacggggatgccgtggcccttggcgtaggcgatgaagtcggagacgatgaggaagtagtccacaaagcccatcttgcggatcatgtccatctcatagcgcagcttgtccagatactcctggggctgggaggggtagcgccagcggaagccgtccatgcacagcttctcgaagtaggcgtccccatcggtccacccctcgggcagctggaagtggggcaggtggtacttgccgaactcgaactccacgttgcacagctgggcaatcttcacggtgttctccagggcctccgggtaattgggaaagagggcggccatctccgcctcggtcttcacgtagaactcctcggtctcgaacttcatccggtttgggtcatccaccgtcttgcccatctggatgcacatgaggatgtcctgcatctccgcgtcctctttccgcagatagtgggcgtcgttggtggccaccagagggatgcccgtctcctcgtgcagccggatcagccccccgttcacctggcgctggaccgggatgccgtggtcctggagctccagatagtagccatccgcgccgaacagttcccgcatctccagggcaacctctttggccttgtcatagtcccctgcagccagcagcttgggcacctcgccccccaggcaggcggagcaggcgatcaggccgccgcagtgctcccgcagcaggtccaggtcgatgcggggcttgatgtaaaagccctccaggaacgcctgagagaccatgtaggagagattgcggtagccctcctcattccggcacagcaggaccaggtggtggaaggaggagtcgaactcgtggaccttctggaaccgggtccggccccttggggccacatagacctcacagccgatgatgggcttgatgcccgcctccttgcaggccttgtagaaatccaccaccccgtacatgaccccgtggtctgtgatagccaccgcgtcctgtccgatctcccggacccgctccaccagcttcttgatgcggcaggcgccatccagaagggagaattccgtatgcagatgtaagtggacaaaggccataagcccctccttcttctccggaaaagacgcaaacaaatttggagcaggacctcttgctgcctcttttctctgtcggtcaggtctgttcttctcaaatcctatacagcagggcggccccacggagacgccggtcggggccgccccacggcacacatcacaaagagtctctatttccgaaggaccttctccagcggctttccctttgccagctcgtcgatcagcttgtccaaataccggatcttccgcatcagtgggtcctcgatctcctccacccggacgccgcagacggtccctgtgatcttcccgcagctggggttcatccggggcgcctcccggaaaaaggtcccatagtctatgtccaggctgagctgccgctccaggcccgcccggtcgtatccggtcagccagcagatgaccttatccacctcctgccgggtgcggcccttccgctccgctttggccgtcagcagtggatatatcttcgacagcttcatggagaatactttttcctgttccatatcatccctccgccgcctttttcaagggtctcccctgccagatggcatatcgtccaaaggcctccatttattccccgcggctcctccgctttgctatcatgcccgctgtgatctgacacagccgggtaaacaggtatcccagggccgcgccgataaagttcaggatggagtcgtccacatctgccgcgccggtggcggtcacccactggatgtactccacgccgcaggacaccagcgcggccaggggcagaaaggtccagaagtggcgcataggccggaacatcaccggcatcagcacccccagcggcaccaaaatcaccacattgcccagcagattggtcacgctgacaaagctgcccgtccgccggtagtagatgatatagtttcggatggtgtggaagggctccagattcacagccccgccatagccccggtccaggtggaacagcccgccgaaaaacagcagcaccgacaggatgcacaggtagtagagcagcaggacccacagggcccccgtgcggtaacgccgccgctgctctccccgcagcttcctcagacgcagcagcaccccggtccctgccagcagcacggtcaggatggggatcgccatctgcaccgggagcgagagcctgtcccccaggatcagccagaacaggttgacggctccggcggtcagataacaaatcaaggtcatagatctctcccgtggtatcagatagttttgccgggccccgccccctcgccccgggcctgcccctgctccaccagcttacgcagccgatggttcagggccgacttggtcgccggcgggtccttcccacagggtcacagaccctgtgggagcccttggggcttaaaatcctcgggcgaactgaattcgccctgcgggaattctccgcttcgctccgaattcatgtgtgccccgccccctcgccccgggcctgccccagctccaccagtttacgcagccggtggttcagggccgacttggtcgccggcgggtcacacagggccgccagctccgccagagtgtcctccgggtgctccagccgcagtcgggccgtctcccgcagcttgtccggcaggccctccagctgcccggactgctccaggctccggatcgcctccagctggacctgggccgcctccaccgccttgtccaggttggccgcgtcacagttcacccgccggttcacgctgccccgcaggttcttctccagcttggcgttcatgatctccatggcggccaggggcgcgccgatggcggtaaggaagtcctcgatgcgctcactctgcttgaaataggcgatatagttggccttccgggtggcctccttgggctggaagcccgcctcccgcatcagggcgggcacctcccggctcacgttgtagtgggaggtggacagctccaggtgataggccttccgggggtcggtgaccgacccccccgccaggaacgccccccggaggaaggcagcccggcagcagggctcctccagcacggcgaagttcacgtggtttgccagactgcccgcatccatcccgaaggtcccgctcaccgctgccagcttggcagggtccgtgatgccgaagctgtacttcccctccccatcaggcagacggtcaaaggagaggcggaacgccttgcggaacaggatagggagccgctgggcaaatgcctcgttctccgtgatgatgcggatctcccgcccggaaaaggtgttgcagtaaagcagaacgccgtatgcctccgcctgggtgcagcatttccggttcagcgccgtccggcacagctcccccttggtctctcctgcaaaggacatggtctcactcctcaatgatgtaccgctgttcgccccggaagatgcgcaccgcccgccggcggtacacgtccagcaccgccgccgccagccggtccgggtcgtggcgggcatagtcgcccccctccgaggccaccggatactcctccagctccagccccatggcccggatgcgctcccggtccaccaggatgggggcggcgtcttcttcccggtacttctccaccaggccgggacgcaccggcgccgagttggccaggcacaggtccaccagccccggcgccccgtgggacagcagggcgtccacatggtcggcggcggtgtacccctctgtctccccctcctgggtcatgatgttgcacacatagatcttcagcgcctcggagcggcagatggcctccaccaccccctccaccagcaggttggggatgacgctggtgtacaggctgcccggtcccatcaggatcaggtccgcctcccgaatggcctggagggcggccgggagggcggcgggccgctccgggagcagtgccacatgggcgatgcggcagtcctgctcttttttaaaggagctgatcttggactcccccaccacccgggccccgttctcaaagacggcctccagctgcacatcggcgctggtcacgggaaggatgcgcccggtgatggccagcacctggctcatctgagccaccgcctcctcaaaggagccggtcaccccgttgagggcggccaggatcaggttcccgaaggactgtccggccagggagccctcctgaaagcggtaggtgagcagccgctccatgatcggctccacgttggccagggactccatgcagtggcggatatccccggggggcggcatgccgatgtcccggcgcagcacgccggagccgcccccgtcgtcggccacagtgaccaccgccgtcaggtttttggtgtattttttcagtccccgcagcatggtggacagccctgtccccccgccgatggcggtgatcttggggccgcgctcccactggtgcagatttggaatggtgtccggcatagcgggacctcccttcaagtttgctctgtccgctccttacgtcctgcccaggtcccggtggctctccgtcaccgggtagcccctgccccggatataggccgccagcgcatgggcaatggccaccgagcggtggtgtccgccggtgcagcccaccgccaccaccagcgccgtcttcccctcctccacatatttggggaggagaaagcccaccaggtcctgaagcttttccaggaactccccggccgctccgccggaaaacacgtagtcccttaccccgtcgtccaggccggtgcgggggcgcagttcctgaacatagtaggggttgggcaggaagcgcacgtcaaagaccagatccgcctctcggggcagtccgtgcttgaagccgaaggaggtgacgctcaccgtcatagccccctcctggctcccccgtccgaagagtcggagcagctcgccccgcagcttggcggtggacaggtcggaggtgtccaccacgaactccgcccgctcccgcaggggggccagcatccgccgctccagggcgatggccccctccagggagtcgcattcctccgccagggggtggctgcggcgggtctccttataccgcttgatgatcacgtcgtccgaggcgtccatatacaggatgcggtaggggcacttcatccccttcagcgcctccagggactggaacagggcgctgaaattggtgccggagcgcacgtctgtgaccagtaccacccggtcgtactcccccgtcccggccatacccagctcagcaaatttggggatgaggggggcgggcagattgtccacacagaaaaagcccatgtcctccatgaaggaggccgccttgctcttccccgccccggacaggccggaaatgatgataaattccatggctgtacacctcttatctctctctgccgtccgccccggacagctcccggcagatcagcgcccgggacaggtacatggccctcagccgccgctccagcagggtgtggcgggcggtgccccgcggaaatttcttccgggccgcctcacacttatggatgatggactggacggccgtcagcgcctcgtccagctcctctctcgtatatccgtccatcttaccccagcacccggatctccagctccagctccacgccggtctggcgcagcacctcctgccgcacctggtccgccagctccaggacatcggcgcaggtggcgcccccccggttgatgaggaagcccgcgtgcttctccgacacctgggcgccccccaccgccctgcccttcaggccgcactggtcgatgagggcggcggcgaagtgcccctgggggcgcttgaaggtggagccggcgctgggatattccagaggctgcttctctctccgccgctgggcaaagtctgccatccgcccggcgatctcctcccgggttccctccggcagggcgaataccgcccggcagatcagcaggtccccctttgaaaaccggctgtgccggtagctcaggccgcagtcggccctggagagcagccgctgggtcccgtcccgttccagcgcggtgacctggaggagcacctgggcggtctccccgccgtaggcccctgcgttcatcgtcaccccgccgcccacgctccccgggatgccctgggcgaactccaggccggtgaggccctgatccagcgcggccttggagagccgggacagcagcgcagcccctcccgcctccagccgccccttctcccccggccgttccggggggagggcccgtatttcctccagcgccccggccggcttgaccacaaagccctcatatccccggtccgccaccagcagattggagccgttccccaggaaaaatggcgggatctccagcgcccaggccgcctgaagggtctcccgggcctcctcctccgtcctgggcagggccatcagtcgggccgggccgccgatgcggaaggaggtgtgtcgggccataggctcctcttcccgcagctccagcccgggacagcgtcgggtcagctctgtgcgcagcagttcaaaacgatccatagggtcctcccgtccaatcagaatgaggtcgcgcggagacttattttattattatagcaaatctctctggaaaatagaataccccaaaacatctgttcttttggtcagaagcgccagcgggagatccgcagggctgaacggggaccctgccccgcgtctgcacggggtgtgccgcagcttccacgcccccatgcagggcccgatgtccccatcaggccgcacacatcggccatcagcacaggtgtatgggaccgcccttccgtttttttcccgttttctcttgcaatcctctgtctgctgtgttatcctacgggtggagtatgattttcatctcccatctgatctaaaaaggaggaaaggtaagtggacgcttacggccgaagtctcaaatcggacagcgacagttctctcccgggcccccttgccttttctccggcatagggagctctgcacagcgccccctgccgcctggcttccgcacaggcggaggtctgttatgcgccccgccggggcccttccgctgtgctatgcgcccgctgagaatgtcgccgcacaggtctttcccgtctccggggggccggtgcggctttgtctgtcccgttggaggcttcctgacaaaaaggaggttgccaatgcagaacaagaaatgtttggagcgctgcctggagctgatccgggacaagcgctaccgtgagctctctgccattctggcggagcagaacccggtggatctggccgatcttctggagggcctgccccaggaacagggcgcgctggccttccgcacgctgcccaaggagcaggcggcggaggtcttttccaatctcccccctgacacccagcagatgatcgtcgtctccctccccgaccgggagctggccggcatcctggaggagctggccatggacgacacggtggatctgctggaggagctgcccgccggcgtggtcaagcgggtgctgaaaaacgcccggcccgagacccgcaggctcatcaaccagttcctcaaatatccggagcagtcggtgggcagcatcatgaccgcggaattcatcgacctgaaagggaccatgaccgcggccgaggccatccgccggatccgccgcctggggggagactgcgaatccatctatacctgctatgtcaccgacggccgccgggtgctggacggtgtagtcaccctgcgggagctgctgctggcccccgacaacgcccccgtccggacgctgatggagcccaacgtgatcaccgtccgcaccaccgacgaccaggaactggccgtccgggccctgatgcggtacgactttctctccctgccggtggtggaccaggaggaccggctggtcggggtggtcacggtggacgacgtgatggatgtgatggaggaggaggccactgaggactttcagcgcatggctgctatggccccctcggaaaagtcctatctcaagaccggcgtgttcgccctggccaaaaaccgcatcctgtggctgctggtgctgatgatctccggcatgatcaccggcggcatcctgggtcgctatgaggccgccttctcggtgatgcccctgctggtcacctttatccccatgctcaccgacaccggcgggaacgccggcagccagagcagcaccctggtcatccgcggcatggcggtgggggacatcgccctgtccgacttccccaaggtgctctggaaggagctgagggtcagcctgctggtgggcgcggtcctctccctggtcaacctggtccgcctgctcctctcctacccgggaaacgagctggtgtgcgtcacagtcaccctgtccctgttcgctacggtggtcctggccaagaccatcggcggagctctgcccatgctggccaagctggtgcgggccgaccccgccatcatggccgcccctctgatcaccaccatcgtggacgccctttccctggtcctctacttcaccattgccagccggcttctccacctgtgaggatacaccgccggaaaagctggggggcacggcttgcgccgtgcccccccctttccctgctctcccgccgctcagaatcggttgagggggacggagccgtcgtccgtccccttttcgatggatctgacctccacatagtagccgtactgctcattgacctggacatagggccggtcccccaccctgcggcccagcagggcctttcccatgggggactccttgctcaccaggccgtggagggcatcctggcgcatggtggtgacgatctggtacacctctgtctcgtcgtcctcctccaggtagaccgtcacccggtcgtacaatcccaccgtgtccgccccggaatggtccgcgatgaccacggcggtcttgatcatgttttccagaaatcggatgcggctctcgttccggttcttctcctgcttggccgccttgtactcaaaattctcgctcagatcgccgaaagccctggcctccttcaccgcctccagcagtttgggccgcagctggaccctgcggtagtccagctcctcccgcatcagctggaggtccttctgcgtcagttcgttgtgcatggcgcttctcctctccgccccgtcccggggcccttttcttttggccctattgtaccagaccccggcccggttggcaacggcctgcaccagctctctttgctctcgtgtgtgtgcgcatgtgatctttacagcatataggcattgtcttataggggggagtgtggtatgatgatagattgaaagcctgagacggaggggaccctatgatcgactacttccacctgaatatggacgctgaacagctgctgaatctgtccagcctggggctggcccacctgggggacggggtgtatgagctgatggtgcgctcctggctctgtctccacggcaaggccaccgcccgcaacctgcaccgggccacagtgggctatgtggccgcgccggcccaggcccggcgggcagagcgcatcctccccctgctcacccaggaggaggcggatgtcttccgccggggccgaaacaccgccccccactctgtccccaagggggccagccgtggggagtatcagactgccaccgccctggaggccctgttcggctggctctatctccagggccggaccgaccggctcaaccagctcttctccaccatgatggagggggagctgtgacccgcccaacctgtgacataaatgaggtgatcccatgcctttggacgcgctgtgcctgagcggagtggtccatgaactgcagaacgccctctccggggcaaaaatcgacaagatctatcagccaggccgggacgaggtggtcctggccctgcgggcccccgcaggcaatgtgaagctgctcctctccgccaaccccagccacccccgggcccatctcacccagatctcccgggagaacccggacaagccccccatgttctgcatgctgctgcgcaagcacctgtccggcgcccggctgctggagctgctccaaccacccatggagcgggtggtggacctgcggctggaggccctggacgagctgggggaccgggtggagcgccgcctggtgctggaggccatgggccgccactccaacctgatcctgctggacggggagggccggatcatggactgcctgcggcgggtggacagcgacatgtccgcccggcggcaggtgctgcccggcctgttctaccgtctcccccccgcccggaaagccagctcacggcagatgaggggggagaggccgccgaaggagtccagcagccacttgtccgcctggctctcctccggtgcggcggccagggcggactccagggcggcgcggtccagggtggaggggtccaggttctcctgggcggggggagccaccgacgcgcggctgcatcagatgggggaagggggccggtctcggctgctggatgagctggaagggctcctgcgttctgtgcaggaaaacagctttacacctgtcatgctggaaaaggaggggcatccctccgacttcacctttcagcccatcagccagtacggccccgccgtctcctgcgtccccttcccctccttctccgcccttctggaccgcttttacgagcagcgggagaaccaggagcgggtgcgccagcggggccaggacctgatccgctccgtgaccaacgcccgggaccgcgccgcccgcaagatcggccttcaggagcaggagctggccgccacccgggaccgggagcggctgcgccagttcggggacatcatcacctccaatctccatgccatggagaaggggatgtcccggctgacggcagccgacttctatgacccggagtgccctcagatccacatccccctggaccccctcctcacccctcagcagaacgccgccaagtactataaggagtacaacaaggcaaaaacagtggaaagcattttaactttacagctagagaaaggccggcgggacctggactacctgaacagcgtgctggaggccatcgctctggcggagggagagcgggacctccaggagatccgccaggagctcaccgacaccggatatctccgccgcccctccaaagccagagaccggggcaagcgggtggcctcgaagcccatggagttccgctcctcctccggcctgcgtatctccgtgggcaaaaacaacacccagaacgacctgctcactaccaagcaggctttcaagagtgacctgtggttccacacccagaagatccacggctcccacgtcatcctgtggaccgagggggggcagcccgacctgaccagcatccaagaggctgcccagctggccgcctggttctcccagggacgggagagcggcaaagtggcggtagactataccccggtaaaatatgtgaaaaagccggggggcgcccggcccggcatggtggtctacaccacctatgagaccgcctatgtcgccccagatggggatctggcccagcggctgcgggtaaaatagagatccctttaatcagggggagcgtcccgccgggcgttccccctcccccatctgtgggccggggcatccagagagggcttccaccctggaacacaaattttgatcgggtgtgaaaaggaggatgcgcccagggacagttctgagacaaaataatttcaaatcagccatgcgcgggacgaccggctgcggtccataccagaccgtttatgcttttccccttgaaaaatagagacaagcagatcgtcccctttctgagaaagcaggagaaaacaaaatgaattcccacagcgatcacacattgcattttgaagcggtaaacagcaggaaccgagcggaggtcgaacatctggaggtctttgcggaacagtccggcttcatcgaaagcgtgacacagtgccttcaggaggccgacaaattggagttgtggaggcccgtcggcatctatgaccgcggtatgctgatcggttttgccatgtacggttattttccggaacctgccccggggcaggtgtggctggaccggctgctgatcgataaaaagtatcagggcaaagggtacggaaagcgggtcgtgcttgccctgcttgacaggctccgaacagaatattcctgtgataccatatatctcagtgtgtatgagaccaactcccacgcgatccatctctatcagcagatcggttttcacttcaatggagagtacgataccaacggggagcatgtcatggtatatgctttttaacctattgtgccgtccgcgttataatacagggccgtatcccctcaatgtacagagcatcaaacagcgatcggcaccggttatcagtctattggccggagaaatagcgggccgggcagccaacaaatggctgtccggcccgcttatccttcttctctcaggtccaggaggactcttcggtctcggaccgcttggcccgggacatcaggtctgtgaccacggcgtggacatcccgcccctcatagagcacctcgtaggcggcctgggcgatgggcatctcgatgcccgccttctgggccagggtgcgggcggtgacagcggcgtagtagccctccaccacggcgccgatctccttcaccgcctctttgggctccacccctttgccgatgaggatgccgcaccggcggttccgggagtgcatggaacagcaggtgacgatcaggtcccccacgccggccagcccggcaaaggtctcctgttttcctcccagggccacccccagccgggccatctccgccagcccccgggtcatgagcagtgccttggtgttgtccccgcagcccatgccgtcgcagcagccggcgcagagggcgatgatgttcttcagggcggcgcacagctcggtgcccaccttgtcggtgctggtgtagacccggaagcgggggttcataaacaggtcctgcacctgccgggccagctccaggtcctcgctggccgccaccacgccggttgggacatggcggcccacctcctcggcgtgggaggggccggagagcaccaccacggggcagtgtccctggagctcctcctcaatgacctggctgaggcggagggaggtgtccttctcgatgcccttggacacggagatcacgatggtccccgggtcggccagctgcttcagcttggcggcagtggcgcggaccgcaaaggacggggtggccatcaccacggcgccgcagcccttcaccgcccccatatcggtggtcaggcccattgtctcgggcagcggcacccccttcagcatggggttctcccgggtctcccgcagcacccgggactcctcctcggtgtaggaccacagggtcacctcatgtccgttttccagcagcagcagcgccagggccgtcccccagcctccgctgccaaggactgtgattttcatggtaatacctcccaagatatgttgtaggggcggcctgtggccgcccgttgttcaattttcttggctgttcgggcggccgcaggccgcccctacggggtcattgcttcttgtgcagagaaaacttgttctctgtcccggtcagcagacggtggatgttgccccggtgcatgtagaccaccaggccgcccaagagcaggcccagcagggtgatgatccagtcctgatagacgaaccaggtggccaccggaaagctggctccggcccacaccgatcccagggagacgtatcgggtgagaatggcaaggatcaggaatcccccccacaccaccagggcaatgcgccagtcgatcatgatggcgatggtgccgccggacaggatgcccttgccccccttgaagtggaacatgcaggggaacatgtggcccagcaggcagaacaggcccgcccagtacttggcaaagaccagaacgatggcctcttggctccagaagccgccgtcccaatatcgggccatcaggatgcccgcccacactgcggccaccgccttgaggacatcgcacaaaataaccaccagggtcagcggcccgccgaaggtgcggtagaagttggtcagcccggcgttgccgctgccgtgggtgcgcacatcgtcccgcaggatgtacttggagacgatgaccgccccgttggagcagcccagcaggtaggccgctgccgctaccagaagcaagggcagacccatgtcataaaagatccagggggagatgtccccccaagtcatgcccagcattgctcactcctccttctcgctcttctgccggatggtcagccgcaccggcgtgccctccaggccgaaggtggctcggatctggttctccagataccgctgataggagaagtggaacagccgggcgtcgttgcagaagcacacaaaatgaggggggcggatgcccacctgggtcatgtagtagatcttcaggcggcggcccttgtccgtggggggctgcacccgggcggtggcatcggccagcaccgagttgagcatcccggtggagatgcgggtggctgcctggtcattcacatagttgatcagctcgaagagccggtccacccgctggccggtgagagcggagatgaacacgatgggggcgtaggtcatatagctcaggtcccgcatcacgtcctggcgcatcttgtccatggtcttgccgtccttctcgatggcatcccacttgttgaccacgatgatgcaggccttgcccgcctcgtgggccagaccggccaccttggtgtcctgctcggtgaccccctcccgggcgtcgatcatgatgaggcacacgtcgctgcgctcgatggccatggtggcccgcaggacggagaacttctcgatgcggtcatccaccctggacttcttccgcatccctgccgtgtcgatgaacaggtatttgccccgcccgttctcgaagggactgtccaccgcgtcccgggtggtgcccgccacatcgctgacgatgacccgctcctgccccaggatgcggttgaccagggaggacttgcccacattgggcttgccgatgatggccaccttgatgacatcgtcctcctcgtcctcctcctcctcgggggggaagtactggaagcaggcgtccagcaggtcgccggtgccgtggccgtggacggcggagacggcgatggggtcgcccaggcccaggttatagaactcgtagatgtccgagttctcccggcccacctggtccgccttgttcaccgccagcaccaccggcttccgggcccggaggagcatgttggccacctcctggtcggctgcggtcatgccggtcttgacgtcacagacaaagaccaccaccgtagcggtctggatcgcgatctcggcctgctcccgcatgaaggagaggatctggtcgtccgtccccggctcgatcccgccggtgtccacgatgtcgaacacccggttcctccactcgcactgggcgtacagccggtcccgggtgacgccgggggtgtcctccacgatggagaggcgctggccgcacagcttattgaacagcatggacttgcccacattggggcgccccacgatagctactaagggcttcatacatatcacctcttgatgagttaggaattaggaatgaggaattaggagttagaggataggagataggggcggcctgcgccggggagtccgcgcgccccaggcgcgccataattcctacctcctaattcctcattcctaattccctctcaggggttgtattgataatattccgtctcctcccgggggagctcctgtcgggggaggccggacgagatgccgcacatggcgtccagcagctcatagccgtcctgctccacggggatcacggggacacccagtgcccgctccacatcgtccagggatacgtcatccaaaaagacccgctccccgtggcggagcatattggcggggatgagcagacgctcccccagcttcttcccccgcagctgggcgatcaggtcgccccccgtgaccagtccggccaccacgatggtctccccgaagaagtcgttgcggatgggatacaccgtcccctctattttaccacattttttccgcgccagctctaccaattccgttaaaaacggggcggcggacacgcctgtggcaatggagaaggggacggtcctctccatctcctccgcctccatcaggtccaggccccggcggaattcctggcgcagcaggcggagcatccccaccccgttgtccagctgggtgaactcctcgtagtagtcctcctccggcaggggccgcccggccagcaggtagaactcgtcagagcaccagaccagggctgtgccgtgggcgtcgcggtgggccgccgcaaaggcctccacctggtccaccaccgcccccgcttcctcccgggtatagggccgcaggggatagaggccctcccggtacttggtcacccccaccggcaccaccgacacgctgtggacggcggggaacatctccgccaggtccctcagggtccggtccagggcgggtccgtcattgatcccggggcaggagacgatctgacagttcatggtgatctggtgccgggcgaagcggcgcatgatctcgatgctctccccggcccggcggtttttcagcatctccacccgcagcgaccggtcggtggtgtggacggacacgttgatgggggagatgcgcaggtcgatgatgcgctgcacctcccgctgggagaggttggtcagggtcaggtagttgcccatcagaaaggacagccgggcgtcgtcatccttgaaatagaggctctcccgcatccccggcggcatctggtccacaaagcagaagatgcagttgttggcacaggagcgggcccggtccatgagataggtctcgaactccagtcccaggtcctccccctcctccttgcggacccgcagggtgcggctggctccatccggggcctggagggtaagcgtcagacgggcgtcataggaatagaacttgtagtccagcacatccaggatctgcttcccgttgatctccaccagggtctctcccgcctggacgccggctttggccgccgggctccggggctccacccggcggatcatggtcttgctcacagcgctccctcctcctctcaaaaaggcgttctttatattatatcgtatccctgcccctcttttcaaggaaaaatccgttttttctcggatctcgccggacattttttgagggcgccgccgggtatccggcgccatcggccaccggacaccttatctttttcttgattgtaccatacccgtccccgccgggcaacacgtttccactctattctgctctctcgccgggtatccggggcacaaaaaggatgcctctcccccgcccttagttccaccgctccggcagaacgccctctccccggcctccggggaaaagcaccctttccgccccggagtttacaggatgtgaaaattatgatatgatgttctatgattttcccttttctttctcaaatccgcggctccggccgccctggaggcacctgcgacatgctggacgacaagctcaaagccctgtgggcccggatctcccccccgcagaaggcggcctttttcggctgttttctgtcgggctatctggtccacctctacgtctttaccaacatcatccccaactccgacggtctcagccgcatcttcgacccccagcagatgaccgtctccggccggtggtttctccacttcgcctcctatttcaacggcttcacccagatgccggcggtcatcggcctcttctccgtgctcttcctcgccctggccgccgccctggccgtctctctgctgggcatccgcagccgtgccctctccgccctgtccggggcgctgatggccgcctttcccgccgtgggctacacctttctctatctgttcaccgcctccgcctactgcttcgccatttttttggcggtcctctccgtctccctggccagaaggggccggtggcactggctggcaggctgtctgctcctggcctgctccatgggcacctatcaggcctatgtgacggtggccatcggcctgtccctgctggtcattttccgggagaccctggacccgtccgcctccttctccgccaccctgcgcctgggggtgcggctgatgctgttcctgactgcgggggccgtcctctactacggcatcctgctggtctttcttcaggtgaaggacctggagctgctgtcctatctggggatggatgccgccagctccggctatcccttctcccgcctccccgggctgctgctggacacctacaagcaggtggcggctttcttcttcctgcccggttccgccaacaccttcacctccggctggatggccgtgctggatctggccgcgctggcgctgggcgggggctgcttcctgctgtgcatggggcaggaggggctctggcgggcgcgctggcgccccctgggcgggctggccatgctggccctgctccccctgggcatcaacttcggccagatcctcagcccctggtccgcccccacccccctgatgaaatacgcctttgtgctggtctatctggcggtggtgctgctggctgaccgggccctccccgccgccggtgccggcgcctccgtgctccgccgccgcgcggccccctgcgccgccctgtggctggtcctgctgctgctgttctccctgaacaccaacaaccggctctacaccgcctccgcccaagcccaccgcgccaccctcagctacgccacccggctggcctcccgcatcgagagctgccccggctacacccacgggatgccggtctatctcatcggctctttccccaccgaccgggtccacaacagcgtggagggctttgcccaggtggaccattacagcgtccccctggacaccgtggctcccctgaacaagcacatctactactacctccgggactggctgaacctccctatcgaggagcccgccgaggccgaccttatggccatggcggagcggccggaattcgccgccatgccccgctaccccgacgacggcagcgtccagatcatcgacggctgcctggtcgtgaaggtgcaggaggaatacaccccaaaatccgactttgagatcgcctatgagaacaggagatgaactgtcccatgcccaattctgctcccactgactccggactgctctccgtggtcctccccgccttcaacgaggaggagatggctccccgggcagctgatgtcatctccgccctgctggagcaggcccagatcccccatgagctgatctttgtggacgacggctcccgggacaggacctgggcgcgcatccaggagaagagccgcgccctgccccaggtacggggggtgcgcttctcccgcaacttcggcaaggaggctgccatttttgccggcctggcccaggcccgtggggcttgctgtgtggtgctggactgcgacctccagcacccgccggaaaagatcgtggacatgtaccgcctgtggcagcagggctaccaggtcgtggaaggcgtcaaggtgagccgtggaaaggagagccccctgcacaccctggcggtccggtgtttctaccgggccatgagcgggagcaccgggctggacatgtcccgggcctccgacttcaagctgctggaccggcgggcggtggatgtgctgctggccatgcgggagaaaaacgccttcttccgggccctgtcctcctggatcggcttttccaccgctcaggtggagttccaggtgcgggagcgggaggcgggccgctccaagtggtccctgcgcagcctgttccggtatgccctcaccaatctggccgccttctccaccgcccccctccagctggtcacctttctgggggtgctggtgctgatcgcctcggtggtgctcagcgtccactccctgtggcagaagttcaccgggcaggccctggagggcttcaccaccgtcatcatcctgatcctgttcatcggcagcatcctcatgatctgtctgggcattatcggctactatatcgccaagatctatgaggaggtgaaagacaggccccggtatatcctgtccgacacctgcggggaggcgcgccatgctgaaaaagatctttgatcccacccttttccgcttcctcctggtcggggtggtgaacaccctggtgggatatggtgtcatgttcggcctttacaacctggccggcctccacctctggggagacccgggctactggatctcctccgccgccaactatctggtgggcagcgtggtcagcttttttctcaacaagcacttcaccttccgcagccgggagaagggccccggcgtggtgctccgcttcgcggccaatatcacagtatgctggctgctggcctacggcctggccaagcccgccatgggagccctgctgagcggcactgccctcagcccccagcttcagggcaacctgaccatgctggcgggctccgggctgttcgtcctgctcaactacttcggacagcgctttttcgccttccgctccaggacatgacccccggcatctggaacaggccgatcacatgtggcgcgaggtagaaaacagagggcaccgcccggcctccatccgtactcaggcgcagggacattggatgtccctgcgctttttgtattgttaggcgcgcctttgtccggccggtcaggcaaacggaggggaatgagcatcctgcccgcagatagctcctccccagcgctccatcaaaagcaccagctcagccggtgcttttctttcattatatatgataaggggaggatgtgagcgtgctcacatcctccccttatctcacttttcaattttgcgcgtttgtacaatcacttattgttgtccttattctttttgttcgtaacgctactcaggatagcgcccacgacgcacagcccgatcactacgatcaggaaaatcttttcaggtcccattggtcatcctcctcccctgtaaagattcttaacacttttttgtcggccatttttatttcttaacggtttcttgataagaatcatagcagatttttataaaaaaagcaacccttttttacggacatttatatatttttttgtgtccctccgcttcacttctccaaattataaaacattttctttgattttacctagcttttattgattttccccgaatttttatccttttttgactgttttattttttgttattttcattagtttttctcaagatatcttgtcattttcttaacacctgcgccgcattctttctcccaatacgcagaacggccgcccggtcctctcaggaccgggcggccgttctctctctccggcagaggctgtccctgccagtctgtctgttgtcacagcttgaccttcaccacgcacttgcgtacaggctcaggtccgtccaccgcgatgttgggggcatgggcatcccccgggaagaggaccacaaacttgtccccgcccagggtgatctcgtccagcgggccgtggtagaaccagatatcccgctccgggtgggcctccacctcttccttcatgtcctccagggcaccgacccccatcttctcccgcccggagatcagaaactggatgtccacatacttcttgtgggcctcgggagtgtcgttggccggcttggactcgtagctctgcaacaaatagaacagatcttctccgtccacctccacccgggcgtcctccagcttggagaaatcggtatcccttaggagctccagtcccttatagataccgggatggacaccctgatacgcctccatatgcttcaaactgtcgtagatcataacttgtcttctcctttcgttgtggtcccagcccagcgggccctcagaggactttgcacccttattataatctccctccctccccctccgcaagcggcaaaaaatcttccctgtcaaaaaaagcttccaggtggttctcgatcagaaaacgccagtcgcaaaaccctcctttttctccctttttcgctggcgttccgccgaaaaaaaattgccctcttgcctttttttgagcagatttatataatagtattgcaataaggaagtgtgttctctattaaagaacggaggtgggcgtcatggatgaatgttcagaaccaaaagtgaagtcgctggcaaagtccctgaagatcctctcctgcttcaccatccaggagccggtcctgggggtaacggagctggcggagcggatcggggtgaccaagtccaacatccacaacattctgtccaccttcacctccatggggtatctggaccggctgcccgacgggcgctacaccctgggtctgaagatcctggagtacgccttcatcatcaaccagaacctgggctaccccaacgcggtgtatgatatcctggtggacacggccggcaagaccaatgagatcgtctacttcggcctgccttacgggaccaacgtcctctacctctatgtggctcacccggccaaccggatgggcgtcctcccctaccgggacatcctgggggagacctcccccttctactgcactgggatcggcaaagccattctggcccacatgcccgaggaggagtggctcgcccatatccccgcggagcgcacccgctttcagcccaacaccatcaccgacctggacgccatcgtggaggagctccgccgcacccgccggaggggctacgccatcgacaacagcgagcgggaccccaacgtgcggtgtgtgggtgttcctgtgtacaactctgccggcaagctggtggccggggtgagcacctccggcccggccattaccatgacggacgagaagctgatggagtgcgccggcatcctgcaaaatgcggccctgcgcatgcgggagcgcatctaccgctgagccctccccatcattctgttttttatgtgtgcctcccctcttcgccggaggatgccggcacatatagaaataaaaaggaaaccaaacgcgacaaataaaataaggaggattccacaatgaaaaattggaaaaaacttcttgcaactggcttgagcaccgccctcatcctggggactctggcctcctgcggcggaggcaacacttccagcccggctgccagcagcggcgccgccgcttccggcagcggttctgacgccagcagcactaccaccaccaacttccctgacggcaaaagcctgagcatgatcatccacgcctctcctggaggtctgtctgacaccaacgcccgctttatcgctcagatggtgtctgatgagctgggcgttcccttccccgccaccaacatgaccggcggctccggtgtggtggccatgacctacgtaaaggaatccacccccgacggctacaccgtgggctacctgccctgtgagttggccatggtcaaggctcagggtctgaccgagatcatcgagccctccgccttcgacatgatctatgcctgcaacattcagcccgctgccatcactgtcagcgccgactccgagtgggacagcatcgaggacctggtcgcctggtgcaaagagcaccccggcgagctccaggtcggcacctccggcaccggttctgtgtggcatatcgctgctgatgccttcgccaaggccgccggcatcgagatcaacctggtgccctttgacggcgccgctaccgccgtcaccaacctgatgggcggccatgtgcagatggttcccgtctctgagtccgaggtggcctccggtgtcgcctccggcaagctgaagatcctggctgtctgttccagcgaccgcagcgagttcaaccccgacgtccccactctccaggagctggggtatgatgtggatgtcaccgcctggggcggctttggcgtagccaagggcactcccgacgatgtgaaggaagtcctgtatgccgccttcgagaaggccgtcaactccgaggagttcaaggagctggcctctcaggggcagtactcccccctgatcatggaccatgaagagttcgctgagtttgcgcagtcccagtacgagttctacaccgagtacttcaccgacactgcgcagtaaacgctgctccaatctcagtcgcacgaatcttgtgataggggcatcgggccggcctgctgcggccggcccgatcgctttttgattcaaaggaaagggtgaaaacaaacgtggagccgaaaaaagtaaattctattttcaactccgacacggtcctgggcctgatagggttcctgatcggcctgtggtggctggtcatggccatgcagctgcccagctctacagcggtggacgggacgcccggtccctcagctttccccgttgggatctctgtcctggtcatggcagtctccgtgatcatcatcgccatcggcgcaaaaaacaaaatcacatattttgatctcaaatccatcaccaaggagaacggtatcgctattctgatctctctggtcttgttcgtggccttcctggtggtatggaacctcttccactacattgcggccagcctgatcctctctcttggcctggggctgctgtataagatgaagccggtccccgctgtgatcctggcggtggcatattctgtgtccacctatctggtattcagcaaggtcctcaacgtcatgctggatttctgagacgggaggaggaaacaatatggatttttcactgatcagcaatacttttatcaccatctttaccacggatgtctttttctattgcatcctgggcgtagtggccggtatggtcatcggtactctgcccggcctgtccgccaccatgggcatcgccattctgactcccctcaccttctggctggaacccgcgcagggcatggctgtgctgctgggcatctataactccgccatttgggccggcggcatctccgccatccttatcaacacgcccggcacccccgcctccatcgctcagaccttcgacggctactacatggtcactcagggcaaggtgaagaaagccctgaatatgaacaccatttattcggtcatcggcggcctgatcggcactgtggtcctgatcgtcttttccttccccgtggcggagtttgccctgaagttcggcccccccgagatgttcgccatggctctgttcggactgtccatgatgatcggtgtctcgggcggcagtgtgttcaagggcctgctggccggcgctctgggcctgttggtctccaccattggcatggaccccatgaccggtgccctgcgcttcacctttggcaacatcaacatgctcagcggcattgagttcgtcgtagtcatggtgggcatgttcggcgtgggcgaggtgctctaccagatcagtaagagctcccccgccgacaaggaggcccggaagaacgcccagatcgtgagcaacaccgcagaggccttccccactgccaaggagaccaaggccagcgtgatccccactctggtatgcggtgccatctccgccgtcatcggtgcggtgcccggcactggcggtgatatcgccgccatcatctgctggcagcagaccaagaacttctccaagcatccggaggagttcggcaagggtgcagtcaacggcttggccgtcacctcctgcgccaacaacgccgtcatcggcggagccatgaccactatgatgaccttgggcatccccggcgatggcgtcaccgctgtgctcatcggctccctgatgatgtatggaatgcagccaggccccatgatgttcgtggagaaacctgaatttgtttacaacgtgatgggcctgatggtggtgggctacatcatgatcctgatcctgggccttctgtccaccaagttcgcctccctgatcctgaaagtcccccaggaggtcatctgggtcatcgtcgtgggcttctgcatcctgggctcttacgcggtgaacaactccatgttcgacgtgtatgtcatgttcgcagccggctttgtgggcttcctgtgcaagcgctgtgaggtgccgctgggtcccttcgtgctggccctgctgctgggcaacctgtgcgagagcaacttccgccgcgccctgtccatgtctctgggtgattacagcatattcctgacccgccccatcacggtggtcctgctgatcctgaccgttctctccctggtgctgcccgccatcggccagctccgcaagaagagcaaagcggccaagtgatctccacccccctgaacaacatttggaaaagaaaggtcgttgtattatggcattttccattcagcccggcgtatggccggtcatgatcaccccttttaccgaggacaacaaaccggacttcaaggccatcgagggcctgtgcaactggtacattaagaagggctgcaccggcatttttgcggtctgccagtccagcgagatggccttcctcaccgagcaggagaagctggatatcgccaaggcggtggtggacgcggtggacggccgcatccaggtggtggcctccggacataccgctgactccaaatcggaccagtataagcagatcgaggacatgatgaagatccccggcatcggcgcctatgtgctggtctccaaccgcttggatcagaacaacgagggcgaggaggtcttcttccagaacgctcaggagatttttgaccggttcccagaggtagacttcggcatctacgagtgccccatgccctggaagcgcctggtctctctagactttctccgcaaagtggccccggagggccgcatggtatttctgaaggacacctgctgtgattatgagttgattcgggagcggctgaaggccgtggagggcactcccctgaagatcttcaatgccaacgcccagtcctggtatgatagctactgccatggctccgccggctacaacggcgttatggccaacttccacccggatctctataagtgggcctatgaccacaaggactctgatcctgagaaagcccagctggtagcccacttcctgaccaccgccgccatgatcgagatgcgggcctaccctgtttccgccaaataccatcaaaacctggtggacgtccccatgtcgctggtgacccgcagcgccgacgcagccaaactggacaagaatgcccgaggcgaggtggagagcctcatcgccatggagaattacgtccgaaagcagctgggcatcctgtaaaaatgtgtatccgctcttgatttctctgcaaaaatgattagaataaaagagtggaactgtacaaaaaaagtgtccaagaaggagctctaacatgctgaaaaagccaaatattctggtggtgggcagctttatgatggatctgatcgcctccaccaagcgcgcccccaattccggcgagaccgtcatcggcctgaagttccagaccgcgccgggggggaagggcgccaatcaggcggtccagtgtgcccgcctgggcgcccacgtgaccatggtgggccaggtgggggacgatgcgttcggtaagatcatgacggataccgctgccgctgccggtgtggacgtgtcccatgtgtcagtggacccccaggagtcctccggcgtaggccacatcaccctggaggtgacggaacacggcgcccagaaccgcatcactgtctgtcccggcgccaacttcaccatcacggtggacgacgtggcctggctccgggaggagatcggccgctttgacctggtgatgatgcagttcgagctgcctatggaggtcatcgaggcggtggcccagtgggcccacgacgccggggtccccgtgatgatcaaccccgccccagccgcccccatgtccgaccggctgctcgcctgcgccacctacctctcccccaacgagcacgaggccgccatcctggccggccactccatcgacgtctccaacggcatcaacatggaggacgtggccgtggtctcccaggccttccaggcccggggggtggagaacctcatcatcaccatgggggaaaacggctccatcgcggcggggaaaaacggcatccatcacacccactgcgtgaagatggagcatgtggccgaccccacggccgccggcgactcctttgtggccgccttctgcaccggcctcaccgccggtctgccccagggcgaggccctggcttttgccagccacaccgccgccatcactgtgtcccgtatgggcgccatgcccagcctgcccatggtggaggaggtccagcagctccttgtggagcgggactaccagggctttgacccggcggagctggacgctttgaagcagtaatctgtccttgactgtccccgtccccgcgggggcagtcaaatcctatccataaggagagtcgttatgctgaaacctgagagcaaacaggcggtatccaatttctttgccgccgcagagaccgaattcaatgcctttttgaaggcccgcagtcctgaggagtacgaggccgccgcccagctgatcctggattcccaggccaagggcggccgtctccacgtcaccggcatcggcaagtgcagccatgtgtccacctacgccgcctccctgttctcctccaccggcaaccccgcctactacctccacggcaccgaggctgtccacggctcctgcgggcagctggcggccggggacgtggtcatcgccatctccaactccggtgagaccgccgagctgaaggccaccgtgctggctgtccagaacaacggctgcaaggtcatcggcgtctccggcaacccgaacagctggcttgccaagcacaccgacgccttcctcttcgccggcgtcaaggcggagggcggccccctgaaccgggccccccgcaactccgtgctggcggagctgctcacccttcaggccctctctgtggcgctccaggtggagaaggactgggaccccgtcaaatacgtccgctgccaccccggcggaaagctgggcgagctgcgggagaacgaaaagtaaatattccggggcgggccccgtcccctccggagaaaaagtgaggtcattcaaatgctgaaaggaaagctcatccaccccgacatcatggccgccctggccctgtgcggccacggggacaaggtcctcatcgcagacggcaactaccccctggactccaagaccggccaggcagagaccgtgtacctggggctgacccccggcctgcccactgttaccgacgtcctggccgccatccagagcacggtgaatatcgagaaggcggaggtcatggaccccgccgacggcaccactccggagatcttcggggagttccagaccatgctggacggcatggagctgaacaagctgggacgctatgagttctatgacgcctgctgtcagcccggcgtccggctggccatctccaccggggaacagcgtatcttttccaacctgctgatcaccatcggcgtggcctgatccggcctgtctcactcgtttttagggagcctttctccgcatggatgcggagaaaggctcctttgttcccgtggcatttttctcatttctgtgctataatgcctgtgacagcctgaaagaggaggcgcatatcacagccattgagaacggcgagaggatcacgcggggactggaggatggcccccgccgcgttctcaactggctggagctggacccatggcccgacgagatcagatctctgcccctcttccaaaacgaggccgccggcttctccggggaggatcagcactccttcgagctcaagcgcccagccgggtccggcccggaggggggaaacggactttgaggggacggtcaccgacctccagacaggcgctgcgcgctgtgccggggtgagcctgccgcaaaaggagagatcgaaattatgatccgtgacatctgcaaagacgagacctttctggcccagaaggccgagccggccacgccggaggacctgcccgcggcagcggacctgctggagacgctgacccaccacagcgcgggctgcgtgggcatggcggccaatatgatcggcgtgaacaagcgcatcatcgcctttgacaacgagggcagctatctggtcatgctcaacccggagatcgtcaaaaggtccggcccctatgaggcggaggagggctgcctgtccctctccggcacccggagggcccggcggtggcggtccatcaaggtccgctggcagaacgagcgtttccaggagcggtgtaagaccttcaccggctggaccgcccagatcatccagcacgagctggaccactgcgagggcatcctcatttaaaaggagcgtcatgtcatgagaaccgccgtctgttactattcccgccaccacggcaacacccggaaggtgctggaggccatggcccgggagggggagatcgacccgatcgacgccaccgtctgccagaccgtccggctggaggactacgactgcgtcggcttcgcctccggcgtctactttgggaagttccacaccagcgtcttacacgccgcccggcagtatctgccccatggcaagcctgtgttcttcgtctgcacctacgggggcggcatgggacagagcacccgggagctgaaggagctggccggggagcggggctgcgccgtgctggggaccttcggctgcaagggctacgacaccttcggccccttcaagctggtgggcggcctggccaagggccggccggatgagggggacctggaccgcgcccgcggctttttccgggacatcctgacccgcctgtgagagaggaggcggcgtgatggaactgggactgacctttcccctccagcggttcctggggataaaaacgccggcctggggcacagagccggaccggcgcttctgctgggacctgcatgtcatccgcctgcggggccgcgggtgcctgctggccgtccactgccacagccgctacgcctttgtccgctgggatgtgccccctctccagcgggaggacatccccggcctcttccgcgcaggcctgaccgacagcctcaccgccgctggcctctccccggcccgggtggagggctatctggaaaaggccgggcccgcctgcctcacccgcactcatggccgccgggaggtggccttcctcaaccgggcgtgggaggacgtgctggcgctggacctgtgcctggacacggaacgccaggcccagcccctgctggaccgcgccgtcaacacctgctccagccggtgcgcaggctttgagggactggggacagggctggagcggatatccgcatcgctgttatgagcgggacgcagggcatcccccctagttttctcctctgcttcgcgagctctgcaaaggctgttgtaaaggccgcaggccacagaggtaactgttgagcgcgccgccttgcactgcccgccattttttcatgcaaaaaagaaatggaaagagagaaaagctatgaaggaagttctgcaaaaaaagacgctgtttgtcgtcattccgctgctcatcgcactgctgtccgtgttcgtcctttccggtcccgcctcgtccccggatcttcacggctctactctggcagccttggaggagaagcagaccaccgtgctggaattgtccgccgcctccgccgccgcttctgcggcgatcacgctgatccccggtgacgtcgccaccccgatcgccgacaagctggccgatctgagctcccattttctgctggtgctgtgtgccgtgttcctggaaaaatatctgctgaccatcaccggaacggtgaccttttccttcctgatccccgtgtcctgcctgctgtatgtgctgtatgtcctctttgactggaaaagccttcgtctgctggcggcaaggctgaccgcgtttggactgctgatctttttggtcatcccagccagcgtctatgtctctgatctgatcgaggactcctaccaggcatccatcgaggccaccattgaaacagccagagatgccgccgcagagctggagagcgaatcagagacggcgggcgagggagaaaaaggcttcttttccgggctgatctccaccgtgacagacggggtctccgggatcacggacaaagtgggcgagatggtcaaccgctttatggaggcgctggccgtgatgctggtgacctgctgcgccatcccggtcctggtcctgctgtccttcctctggtttgccaagatcctgctgtccgtggagctgccggtcagttacagcggcatccaccacgggctgaaggatcggcttttccgaaaaaaacggggagagccccagtaaaggcctcccgcaggtcgggtgtgcggagatacttcgcacgagcccccgccagcaaggaaactgatccgatcataacagatgggaagtggctctcttatgcagatcacagctgtttttcaccggaaggggctgcggctggccacgggtgtcctgctggcgatgcttcttctggcggccggatttttctggtatgtatccgactactaccgggcagaggatgcggccctggatgtattggccagcggcgagaacattgaggtccagggcagcctgaccatcctctccccgtcctatcccacggacactgccatcatcttttaccccggggccaaggtggagggggctgcctacctgcctctgctggaccagctgcggaggaccggcctcacctgtattctggtggagatgcccttccgcatggccatctttgatgtcaacgccgccgaagacgtgatggcccaatttccggagatccggcactggtatctggccggacactccatgggcggagccatggcctcccaattcgccgccgggcaccgggaccaggtggacggcctcatcctgctgggggcctatctctacggcgaatacccgtccgcagacaccctcaccgtctacggctccctgaatcagagcgtggaggacaagatcgactatacggaacatgtggtggagatcgacggcggcaaccatgcccagttcggcagctacggcctccagcggggcgacccgccggcggagatcacgcctcaggaacagcaggcccggactgtggaggccatctccgacttcctcgcccagcggcaggagagataggcgctccctccatcctttcccacaggtacttcaggccctgtgccgctctccggggcacaaaagcaaattgacaggagtatcgctatgcagacttcaacagatttgagaaacctattggcccgcatcgaccggaagggctatccggcctataaggacacccggggcgcctatcagttccccgcctacgtgctgtccatcgaccacgtacagggggacccctttgccgctccctccaaattgagcatccatgtgaacggaaagcaggccggattccccaggcagctctatcagaccccctgccggcgcatcgcccttcaggatgcgctcacccgccagtttggccggcgggcggcccaggcctcctttcaggccaagggctcgggacacagcggcctcatctctatcagccggtgcggccaggaggtgctggagcggaccgcctgcgccctggacccggagcacggcgatctgctgctgcggctggaggtgggcttccccgccaacggccgcaccatcaacgcccgggagctggagaagatcctcttcgacctgctgccccggtgcgtggaggagtccctgctctaccgcaatctggacggaaagcgcctccaggaagcggctgacctggcggaggaccagcaggatatccgccggcagctgcccgccctgggcctgtgcgcctttgtggccgacggcagcatcctgccccggacctccggtgtctcctccctgcccatgaagcaggccgtccccttccgctcccccagagagctctcggtcaccctggagctgccccaccgggggaccatcaccggcatgggcatccccaaggggatcactctgatcgtgggcggcggctaccacgggaagtccaccctgctcaaggccctggagctgggggtgtacgaccacatcgccggggatgggcgggagtatgtcatcaccgaccgcacagcggtcaagatccgtgccgaggacgggaggagcatccggaacaccgacatctccatgtttatcaacaacctgcccaacggaaaggacactgtccatttcaccaccgaggacgccagcggcagcacctcccaggccgccggcgtggtggaggccatggaggcggggacctccctgctcctcatggatgaggacaccagcgccaccaacttcatgatccgggatgagctgatgcagcgggtcatccaccgggacatggagcctatcacccccttcctcgaccgcatccgggagctctatggtatccacggcatctccactgtcatcgtggcaggcagctccggcgccttcttccacgccgccgaccgcatcatccagatggaccggtatgtcccccgggacatcaccgcctccgccaaggaggaggcccgggccttccccgccgggagcgccgtcatggagcctgctcccgcccccggtctctgccgctgtcccagaccctccccccagttccggggagaccggatcaagctcaaagccctgggccgggacggcatatccatcgatcgggagaccatcgatctgcggtatgtggagcagctggctgacggcgagcagtctgctgccctgggctggtgcatggtctacgcccagcggcgcctgatggacggcaggcgcaccctgcgccagatcgtggacgagctggaccggctgatggaagaacagggcctgcccgccctgtgcggctccccctccggcgtcccctttctggcccgcccccgccgtcaggagatcttcgcctgttttgaccgctgccgcttcctggacctgctgtgaccggctggtccccgcaggccccacgcccccatccagatggggggcattggccccaccacacagaggcgtccctctccggccggtccggagggggacgccttttctatgggcggcggtgtcaacgtgggacagcggcgcatagattgttttggggcctcgccccgaaggaggtaatacgaatgggtattacaaattctaataaagtgatcaatgcggataggatcgactgtgacggctccctgaaagtcacgctggccctcactgccgctcctgatattatttccacccccactgacattgcgctggtactggaccgctccggcagtatgaccgggaccccgctgaccaacatgaagaccggcgcgaagaccttcatcgacatcatctcccagtccaccggcggccagtcctccggtgagatcggctccggcagccacatcggcatcgtcagctttgccgacacggcccagcagaacacccagctgatcacctcggtatccaccttgaagaacgctgtagactccctttcagctggcgggagcaccaaccatgccgatgccttctccaaggccatcgccctctttgaccccagctccagcaatgacaaggtcatcgtcatgttcaccgacggaaagaccaccgccggtgcgcccccggcccccgtcgcagccgccgcccgggcccagggcatcgtcatctactgcatcggcctgctgggctctgacggggtggatgtcaatgctctcaacgactgggccaccgaccccgacgccagccacgtagcggtcacccccgacgccgccgaactggaggagctcttcgcggagctggcggccaatatctccaagactggtgccaccaacatcgtcatcaacgagaccgtgaccgctgatttcgtcatcaccagcatcctgacgccctccgccggcagcgccaccatgctcaatgccacctccctgcgctggaccatcccccagctgggcgtctcctccccggagagtgctgcgctggagttcttcatccgccacgtgggccagaatcccggcaccaagctggtcaatgagtctatcacctactccgacaccgaggggaacgtggtggactttcctgagcccaccgtgtctgtggagtgcgacgtggtggtcaatcctgaggagtgccccgtgccggcggacctgaccatcgaaggctgctcggactccgtggtggtggacatgggcaatgtctatctggagtccctgggccgcatcatccagatggatgtgaccatcaagaatgtatgccctggcaagcgggtggccctggccgccattctcactgaggtggatgaaaatggaatggagtatcagcgcgggagcaaggccatgaccatcccggcccataacttccccacctgccgcgatgtgctggtcaaatgcatcaagttcgtgcttccggaagatcttgatatctctggcggctccacccaggtcatgtgcaacccccgcagcttcaaggcccggttcatcgcccacaacatcgacagcgacttccgctgctgtgagtctgtcctgaccctgtaaactgcccctttccccgcaaaccaccgccttccgcggtggtacatacctccccgggccgtttcttctccttctggcggggcggcttgccgctttcctggttttcggacaagctccccaagaaatatggtccttctggcctgttccggctttggggagcatgatacttgtatggtcccggcggccccgcccgctccgtcctgtaagcgcagcagtgcggtcagcgccttcccggcactggccgcactgatttggtccctgccagtcccctattgaaaatacttctcccggatctgctggatgggcatctcccgcccggtccacaggcggaaggacgccgccccctggtggagcagcatatacatcccgttgaaggtcttcagtcccgcctctcgggccatcctcagcagctgtgtctcccggggctggtagatcacgtccgacacggtcagcccggcgtggagccaggaggcgtcggggatcaggcagcccggtatccgctccatacccaccggcgtggtgttcaccagaaggtccgcctgccccaggcaggtccgcagcgcctcccggtcgtccagatcgtggaggaccacccggcactgggaggcccgctccagctcggccgccacccgctccgcccggggccagaaggcgtccctggggttgaacacatcaatggccgccattccgtccagggcggcctggaccaggacggcggttccggcaccgccggcacccagctggaccatccgcttcccctccggctgaaagcccgcctcccgggcgctcctcatatagccctccccatcggtggtgtggcccaccaggcttccgccctcgttgaccacggtgttgaccgccccgcagatgcgggcggccggagagaggcgctcgcacagggccgccgccgcagtcttgtggggcatggtcacgttgaagccacgcacccccagagccttcagcccctccaccgcctcggccaggcggtccggcgccacgtcaaaggccaggtaggtatagtccaggtccagcagagcgcaggcctcgttgtgcatcgcgggggagatgctgtgggccaccgggctgcccagcaggcacagcagtcccgtgcggccggtgacttgacggctcatttatccccctcccctcagctccggggggccagggcccggtggaggatatccatggcggcgttcagctcctccacggggatctgcccgggggcggagacctggcccaccgcgccgaaggtcatggccgagccgaagtactccccgcacaggcggctgaccaccccggcccccatggacatggtgatgatgggccggtcggcgtacttcccgctcatctcctgggtggcgtccagcagggcaatgacatctcccgggcaccggggcatcaccgcgatcttcggaatgtccgcccccagctcctgcatcttccgcaggcggaagagcaggtcagccttgtccggcgtgccgccgaagtcgtggttggagcccaccaccgctttccccgcagcgtggatggcctgaatgttccggcggaccacctcgtccccggagaagacctccacatccacggcgtccgcgtctcccgactgggccaccgcggtgttcagcgccgtataggcctccatgtcgatctccttctcgcccccctccttcctggtgcggaaggtgaacaggatgggggtctcccccaggatctcccgcagccccttcagtgtgctcagcaccttaggcagctggaagacatcctcatagaagtccacccgccactccaccacgtccagggcgtgggcacggaactcccgggccttctccaggatgccctgggccgtagcggccacgatggggacgatcaccttgggctttccgcagcccacctcgacattgcgcagcatcactgttttcatcaaaactttctcctttaccaaatatcaaaatacggggggccgccgcaggtatccctgcggcagccccagatccaatttttcaaaagcccagctgctttgagatgctcctgccgtccagggcattgggcgctgtccccaggtgcacgctctcagccgcagccagacctgccgcctctcccaggcgcatacaggttatcatgacacggatgcaggcatgggccgcataatcagtggaaatacaccgccccgccagcaggaggttggagatctcgttggtgaccagacagtggtaagggatatagaacacgcccgtcttgggcttgacgatggtgctggagacaccgtcggtgtcatggatatccacagggtaggagcttctgactacagggtctgcaaagagcttcccctctaccacgtcctcacccgtgaggacatatttcccctggatccttcgggagtcccgcaggccggtgaaatctcctgtagagatgaggtaggccttctcaaatcccggcacgttttcaataaagaagcggctgatcctccttacctgacgccgggcctccatctccgcccggctccactgagccgcatccagaggatcgatccgaattcggctcatattggagtagatcgttccggatgggagggggcgtgccaacaggttattgacataaaggcacccttcttcgatccccttctgtgccagacgctcccgctccggctggctgacctgctcataccgcgctatgtccacaccggccattttgtacatcaaggtcccgggctgaaggactcctttttcgtcccctatctcccagcggcagccggcactgaccgccacgctcccatggaaggaggcgtcaatgaccactttgccgctcacagtttggaccccctgctcgttgtggatggtcagtgcggtgatgacgccgtcctctacctgcgcgccgatgacccgggtatgaaggagcagctccacgcccgcctggtccaccagatcgaagatcagatctttgagtatctcggactcataggggatgactgggatatccaggtctctgcgtccgcatagatagatcgtctcgatgccgggggtcccgcccgcagcggcgaggccgtccatcacgtccttgatgatgccctgctgaggcctgtccggctcaccatcggcaaaccccatgaacatgctcacctgcgctccggtggcggtcccgcccaaatacgccttttcctcgatgagcagcgtctttgcgccctctctggcggccgtcacagcggctgcaaaaccggcggtaccgccgccgaccacaataacatcaaactgtcgttccataagcagctctcctttccctctgtcacatgatggccgcggcgatcgggtagcccaccaccgcaaagatcacggccgctgtgacggaccacaagagcccatatttgagcatcgtatccgtattcagccatccggacccggccgcaatggcggcgtgggccgtggagggcggagtcgcgcaggccacgcaggcacaggcgccgatcacgcaggtcaatgcggcaggatcgaccccggaaatagctccgccgtacaccagcggcagcgagatgctgtacatcagagtgacggtgaccgtgttggaggcaaagttggtgatcatgaccgtggccagggcgataaacagcacgaagataatgggggacatactgccgatgatgggggagagcgctccgctgaccacagcggtgatgcccgcttcttcatgggtcagggcgctgcccagcacgctggtggccgccaccatgaacacagcaccccagggcacccccttggccacggcctcattgaagttcatcagaggcttcccctccacatggaggacgcacagcaggcacgctccgatcatggccggggtgggcgtccccagcgaggagatggcggaggccacctcgggcaggacaggcgcaatgatcccgggcagcagccacatggccaccaccagcacgaagacgagcagcgtatatttctcctggcggctcatcggagtggtctcagacttcagcacagagctgtccagactgctcaggcgctccgtccctggacgacagacgaatttggtcagcaccatggacgccgcgaaagtgaccaggcatgccgctacgccgaagatggtataggagacgaaattcaccgggaccccggcgtcgttctcatacagggagagtgccatcgtggtgaccgtgtgggcgatcggggtggcagcagtggacagggaggcaaaaaacaggatgcccagcacgacgatctgagggaaacggtcgcccttctcgtacttcaattccttgaagatctgctctgcaatgggcaggcagacgataaaggccgggatgggagacataaaggaaccgatgaccaggggagccagaaacagcagccccaaaaacagccaggggttcttctgcgcccagggccgggtgacgaaccagaccgcgcagcgcttgaggaagccggtctggcccagggtataggtcaccatggagctgaaaagcacaaaggaagtgatccagcctcccatagagcccgacaggccgctggaatacgtgtacagcggggacaggatcagcgcgatgatgcacaggatactgggccaggtgaccgaaacgaacatccacagcaggatcgtgccgatgaaaataccggccacctgcatccccagaggggtcagcccaaagacggggggcagaaactgacatccaaacataagcaggacgccgatgatagtcgcgatcgtttttttcgtactcatgatcttctcacattcctcctgatctgattttcaagccggctcgttctctgtgtcaaattatagagcaaaccatctcaggagcaattcttcttccctctctatttattctcaagaggaataaatagaatcttttattccttttttgtgcattttcccctctctttctcctggtattttccactctgcccccaaaacattcggtccattctcattgtaacggggcaggcgtcatgctataatgaaaaggatcattctgagagggggtgctctgttggagctggaccaggtccgccacgtgctggcggtggtaaaataccgcacatttctggaggcatcctttcagctcaaccgctctcaatcctccctgtccaaaagcatccgccggctggaggaggagctggggatctccatctttgagcgcaccacccgccgcgtggagctgaccccggcaggccgtgacttcgtcgcttacgccgaacagatgatggtctgttatgaagggatgctccacgccatggaacagcaccgcagcaacggcaagcgctccctccgggtgggcagcatctatttcggcctgcacaaccgcctggcccctctggtggccaatttttccaagctccaccccagcatggagatcgagatccgggaatccaccaccacgccgctccttcaggatctccataaaggggagctggatgtggtctttgtctccagcatgtacccggaaggagctgagcgggccaatttctctcagtatccagaataccgctcccattcctgcttccgggagtcctatcagatcgtggtcagccgggaccacccctttgcaggccggagccagctcacatatgaggacctggctgaccagccctttatcatgacggaccggaccatggacgtctatcacagggccgttcagaaagcctttgacgcccacagggtccccctgcatatcgccatgtactgcaccactgtccgctctgttctgcatatggtctcccagaacatggggatcgccatgctctctcccctggtcatcgaggagtcggacgacctgtgcatcatccccctgaaggatgccctgctgcgggacactcagatggtgatcctcaaccagaaagagatcccgccccacgtgagatccttttatcattatgtcaagactcaaaatctggcgtagccttttttcgatatcctgaaaggccccgcggggtctgccgttgagcggacctcacggggcttttcattccggcatccaccgtggggcggacgcctcacgccgctctgagatcttgcgtgccaggcggccgcttacagcaccgcggcggcgatggggtagcccacaaaggccaggatcacgatgctcagcagggccatcaggccgccgtacttgaacatgtccttcacgtccacccagccggtgccggccaccacggccatgggcatggtgctggggggagtggcgaaggcgtaggaggccgcggctccgatgacggaggccagggctaccatattgatgttgcccatagccagggcgatgggggcggagatggtatagaacacggtggcgcacacggtgttggaggagaagttggttgcgatgatgcacagggtggcgatgaccaggatgaagatggtctggttcatcccggagaccaggggggtgacgttgctgataaggaagtcggagatgcccaccttctccagcgtcagggcgccgctgatgaccaggacggcggcattgaagatcagggcgctccagggcacgccgcgggcggccgcgtccttataatccataatgggcttgccgtccaccttggtcaggcagaggatcacgatggccaccatcacaggcaccgcattgcccagcgcagagatatacccgccgacggtgggggcgatgtccttcaggaagccctggaggagccagatcacgatgaccaccacgaacaggaccgcggagatcttctcctgcacgctcatgggctggaggtcagagcgcagcctggtggcatcatagtggcgcagcttgttcaggtccgggcggtagagcaggcggtacaccaggatcagggccgcaaagatcagcaggccggtgacaatgccgaaagcgctgtatgccatgatgttcacggacaggccggtctgggactccagcagctggatggggatcaggatgatggcgtggcccaggggggtgttggcggagccgatccccaccgcgatgcccaggcccagcaccagcatctgggggaagcggtcccccttctcatacttcagctccttgaagacctgctccgcgatgggcaggaagaccagcagggccgcggtctgagacatgaaggaggccatgaacatggccccgaagaggaacatggtcacgaacatccaggggctgcgctgggccagcttgttggtaaaaaaccagatggccagccggcgggtgaggcccacctgggacagcacgtggctgagcatgaagaacaccagcaggaaggcgatggtggagttgccgaagccgcttttaaagatatcccccggcgacatgatctggaagatggccaggatcgccatgcacagcaggctgggccagtcggtgccgatgaagttccacatgagcatgatgccgatgaagataccgatgacctgcatgctggtctggttcaggcccgcgggagcggggataaactggaacagcaggatgaacgcaaaggagatcagcagcatcacgagttttgaggtcttgcctttcacttttggatctctcccttctctttcttacacaccatatttctgatccagacagctccgcaggctggcggaggagatctggtccagagtcttgttttcccgcagggccaatgccgccgcatagcccgccgactctcccacgttcatcatgatgggcatgacccggaccgccccaaaggccttcgggtccgcggacaggcactttccggccgccaaggtccgcttcatccccagggggagcaggctgcggtaggggatatgatagaccccggggagcatcttccacaccacggtgttggtcacggggtcgtggaggtccatgggatagcatccgcaggccacccggtcctcaaagcaggtcatccgctccagatcctcgatggtcagccggtaggccccccggatgcgccgggcgtcccgcacaccggccagaggggcgatgccggagaggtaggccccctccaggccgggcacctcccgctggacgaagcggaagatgggctcgatctgggacctcagctccaccatcccccgggtggcgtcggccagatcctcgtggtcaaacttggcccgggtgacattcaggctcacgtcccgggtgccggggatgggggtaaaggccaggatgcctcccttcagcacaccgctctcccggccctgccggatggtctcccccaggcgtgggctgtggataaaggcgtccagctggtccaggtccacgttggagatgcggaacatcagggtggcgatcatccgctccctctcgtccgccgcctccgtctccccgcccagcgcctggaccagggaggcgtttccggtggcgtcgatcaggtattttccggagagggcgatctcctgatacggcccccgggccgtgatctgacactcctcctctccctctctggccgcggtcagctccgtctcatagagcagggtgatccccgcctccacggccagctgctccagcagaagcttgagccgctccgggtcatagcggaggcggtcgatcttcacctctttgttggaggacattgggactgcgaagtggtaggccgcatgtccgccccagatcaggcggtcaaagacctcccgctcgatcccccgatagaggggcgccccctgaaagcccgccgcgttcatctcggtcagaccggagctggcggccaggccgcccaggcaggtcccccgctccaccacggccaccttcagcccctcccgggccgcggcgatggcgctgaaggccccggctgtgccgcctcccaccacgatcagatcaaactgtgtctcttgctgcatgtactcccttctttcttctgttgtttggcgtcattttaaccaaaatccgggacaaaaagcaatctcactttggaaagtcatatttccgaaacggaatcggattctattttcaaggcatattccattccaaaacagcatatcattctgttttggaatttttattttccaatttggtatcatactgcctgggattttgggaaactctcgttgtctttctccgccccccatggtatcatagggcatatcacggcaatctgcacaagggatggatgtcagatggacctgtttcagttgaaatgctttgtcaatgtggtggatcagcggagctttacaaaggccgcctttgaggtctccagctcccagtccgccctgtccaagcagatcagcaagctggaggatgagctgaacgtccgtctgtttgaccgcagccgccgggtggtgacgctgacgcccgcaggccgggagttcgagccccacgcccgaaagctgctggccgactatgacgagatgatggcctccatcaagcggttctccaacagcgggcatctgcacatcggcagtgtggaccacatgggccgggtggggctgactacccccatctccacctttttgaagcagtatcccgacggcggcgtcaccatcgacatcgagcgggggacctccctgggggtgatggaccagctggtggcgggaaagctggatatggccttcatcgcccacatcatctcccccttttccaaggcgtccaacatcgacgcctatcagctggaccactaccgcctctataccctggtggtggacaactaccacgccatcgtcagccgccgccatcggttcgccgggctggatgtggtcacctggcaggatctggcggaggaaaagctggtcattttggacaagagctacggtctcaatgccatcatccgggaatccttccgccagtgcggcctgcggcccaacatcgccttcgagtgcgaccaggtggacgccatcctggggatggtggagggaaatttcgggatctccatcctctccaagcgcattgccgccacccagtatgacgtggaggccatccccatcgacccgcccatctcccgcaacaccgtgctggtggtccccaaggaggtggaggcccgccagcggctggccggcggctttgtccgccacatcgtggattattacagggacaacacccccggcccctgcggggagccgtagcctccgccctccgcgcccgggcggttcccggcattctcccccctcgcgcactgtccgtcagacggagcgcgaggggggagctttctgtccggccctgcctctcgacagggcctcctccccgtggtacaatggacaaaaccacaaaggagactgtcccgggacatggagacaaacattttgatcgtagacgacgaggccgccatcgccgacctggtggaggtctatctgaaaaatgagggctacaccgtccacaagttcggccgcgcgggggacgccctggcctgtgtggcctccacgccgcttgacctggccatcctggatgtgatgctcccggatatggacggcttcaccctgtgccagaagatccgggaggagcacctgttccccatcctgatgctcactgccagggtggaggacatggacaagatcatggggctgaccctgggggcggacgactacctcaccaagcccttcaatcctctggagctggtggcccgggtcaagacccagctccggcggtacacccggtacaaccagggcggccagccggggggagaggcgcaggagcacgacttccgggggctccagatctcccgggccacccacaagtgcgtgctgttcggcgaggagctccccctgacccccctggaattttccatcctatggtacctgtgccagcaccgggggcaggtggtgtccagcgaggagctgttcgagtcggtgtggggagagaagtatatggacagcaacaacaccgtcatgtcccacatcgcccgcctgcgggagaagatgcacgaacccagccgaaagccgaaattcatcaagactgtgtggggggtgggctacaccattgagtaaggaacgcaagccccgtctggcgcagcggctccagacagaccgtgggctctaccgcgccctccagcgctgggggtattatctgctggccctgatggcctgggtgaccgtggtgctggcggtctccgccctgggggtcctggtgtgcagccgccttacctggtatgagaccgaccctctctaccacctgctcctgtgggtccgggactactacttctttttctgcatagcggtggtcctgctgggctgggtggtcatcagctggcacttcatctcccgtccagttcgccagctggatgcgctgatcggcgcctccgcccagctcacccgtcccacggaggagcccatccgcctgcccgcctccatgaagagcgtggaggaccagctgaacctggcccgggaggaggccctgcgtgcccagcgggccgcccgggaggcggagcagcggaaaaacgacctggtggtctatctggcccacgacctgaagacccccctcaccagcgtcatcggctatctgacactgctccgtgacgagccccagctctccccggagctgcgcgcccgctacaccggcatcgccctggacaaggcggagcgtctggaggagctcatcaatgaattctttgagatcacccgcttcaacctcagccatctggagctggagaagcagcccgtggacctgtgccggatgctccagcaggtggtcagcgagttcgcccccatgctgggggagcgggacctgacctgcgccctggagcttccccccagcctggaatatgactgcgacccggacaagctggcccgggtgtttgacaacctgctccgcaacgcctgccattacagcactcccggcagcgtggtccgcatctccggcggggaggagggggattccattgtcctcaggttcctcaactccgggcggaccatccccccggagaagctggcgcgcatctttgaccagttcttccgcctggacagctcccgcgccacccggacggggggcgcgggccttggcttggccatagccaaggagatcctgactctccacggcgggaccatcaccgcctggagccgggaggatcaggtctgcttccaggtgacgctgccccggggcggacggcgtgaggagggtccagcccgtgagccatgacgccgcccccctgttcgcaggctgggagaaggggatgatcctctcctgtctccaggggcacatgggccaggtgcgcaccaggggcgggcatccgccggagagcgccctgtgcgccatcggagatttctgctttttcgccggccggccggacccggccctggtgcggcaggccgaccggcccctgctggtcccccggaccggggactgggcccccgtgatccggacggtgtggggccgccgtgccgtccccttcctccgctatgccctctgtggggccccggaggactttgaccgggaccggctggccgccttcgccgccgccctgcccccaggcttctccctctcccccattctggccgggcactatcccctgctgacggcccaggactggtcccgggacctgtgcggcaatttccgggacggtcccgacttcgcccggcgtgggctgggggtcatcgctcttcgggacggggtccccgcggccggcgcctcctcctacgccgtctgggacggcggcatcgagatccagatcgacacccggccggacctgcgccgccgggggctggccctgtcctgcggcgcccggctgatcctgacctgcctggaccaggggctcctcccctcctgggacgcccacgaccggcgctccgccgccctggcggagaagctgggctaccgcctggaccgcccctaccccgcctatcttctggaccagaccggtccgtaagaaaatcgcaagattttcttacggatcttatcagactttcgcaggaaagactccaagcaaggtgcgcccccctctgataccatagggtcatcggagggggacgcgcttttttctggtctgtcccctcccccacacagaaggagttgacagaacatgaaacagatcctggtgctgttcggcgggtgttcccccgagtacagcgtctctctggcctccgcctatggggtgctcacccatatggaccggagcctgtatcagcccatccctgtgggcatcacccgggagggggcctggcgctggtacggcggggcgctggaggccatccctgaggaccgctggcagcaggagcccgcctgcctcccctgcaccctgcggctggaccggggcggggccgccctgctcctgctggacggctccggccggacccttgcctttgaaggggccttccccctgatccacggcagcaacggagaggacggcacccttcaggggctctttgagctggccggggtccccctcatcggctgcggcaccctgtccagcgccctgtgcatggacaaggaccgctcccacaagctggccgccctggccggggtccccagccccagagggatcgtgctggagcccggcttctctcccgcggaactgcgccggggggcggaggcggtgggcttccccctctttgtcaagccggtccgggcgggctcctccttcggcgtgagccgggtggaggggccggagcagctggatggggcggtgagggccgcgctggcctatgaccgccgtgtcctgctggaggaggcggtctccggctttgaggtgggctgcgccgtactgggcagcgaagaactgacagtgggcctggtggacgagatccagctgtccggcggttttttcgactttgaggagaagtacaccctcaagacctccgccatccactgccctgcccgcatccctccggaggcggccgcccaggtgcaggaggccgcccggaccatcttccgcgccctggactgccggggctttgcccgggtggacctgttcctcaccccggagggggcgctgctgttcaacgaggtcaacaccatccccggcttcaccccccacagccgctatcccactatgatgcagggcgccggcctggacttcacctccctggtcagccgcatgatccggctgggggtgggagcatgaggcccctgcggctccgccgggagcagacctgccagggcccgctggtcctgatcgatcgggcacaccccctccaggagggcgcgccgccggagctggtccccgtggaccggctccacccccaggtgctcctggagcggcgtgcggcccggctgctggccgcctgcatccgctccgtggggggcgggcggaccatcgtccccgtctccggctggcggagccgggcggagcagcaggccatctgggacgacacccgggcccgggaaggggatgcctttacccggcagtacgtggcccttccggggtgcagcgagcaccagaccggcctggccatcgacctgggggaggacgtccccgatcttgacttcatccgccccagcttccccgactccggggcctgcggcgctttccgacgggcagcggcccggtacggcttcctccagcggtactgccgggagaaggaggccctcaccggcatcgccgctgagccctggcacttccgctatgtgggggcgccccacgcccagctgatggaggagcacgggctctgtctggaggagtacgtccccttcctggaggtgtcccctcggctctgccggctgggcaacggcaggaccgcccgggtgtcccgactcccctgccccagcgccgtcctggaactggagccgccggcggggtgctggcagctctccggagacaactgcggcgggttcatcctcaccgtctgggagggagagccatgagcgcccgccgggatgtccctgtgctggaccgcttccgcctgctggcggcgttcctggcggtgtgcaaccacaccgcccctctggccggactggccccggaggccgacttctggctcacccgggtgctggcccggatcgcggtcccttttttcctcatggtcagcgggtactttctctcccgggacggctggaggggcacgggcagatttttgaagcggacgctgaccctctacgccgccgcagttctgctctatctgcccctgaactggtacaacgggggcttctcccccctggagtggctcaaaaagctgctcatagacggcaccctgtaccacctgtggtatttcccggcggtcctgctgggggtggtgatcgcccgcggcctggcccggctggggctgcccgccgccctggcggctgccctgctcctctacctgatcggcctgggcggggacagctactacggcctgaccgcccagctgcccgccctggacgccctctatggcgggctgttccgcctgtgctcctatacccggaacgggctgttcctggccccccttttcctgcttctgggggcggcgggagtccggctgggccgggggatctccgccctgggcacccttctctccctggccggtatgtccctggaggcgttctggctccgcgcccagggctggccccgccacgacagcatgtatcttttcctccccctgaccatgctcttcctgttctccctgctgctaaatggcggccgggggcaggaccgcaccgcccgcaggctgtccctgctgatctacctcctccacccctggagcatcgtgctggtgcggggcgctgcaaagctgacagggctggaggccctgctcatccagaacagcctggcccacttctgcgccgtggcggcgctcaccctgtgcgccgccctggtgctggacgccctgcgccccctccgccccgccccctgcggccgtgcctggaaggagctggacctgggcgccctgcggcacaacgcccgcaccctccgctccgccctgtcccccggctgcacgctgatggcggtggtcaaagcggacggctacggccacggggcggtgccggtggcccgctgcctgcggcgggacggggtgcgggccttcggggtggcctgtctggctgagggcatcgcccttcggaaggccggggtgctgggcaccatcctcattctgggctacaccccgccccgtgaggtccccctcctccgccgctggcatctcacccagacggtggccgacgaggctcacggccgggcgcttgccgcccagggaggactcgtccgggtccacctggccctggataccggcatgcaccggctggggctgcccgccggggaccgctccgccatcgcccggatgtaccgcctgaaaaacctgcgcatcgacggggtgttctcccatctgtgcgtctccgacagcctgaaaaaagaggacatggacgcgactctggaacagctcaccctgttctatgacacgctggactggatgcgcacccaaaacctctctccgggccgcgtccacatccaggccagctacggggtcctcaatctgccgccccagccatgcgcctgggcccgggccggcatcgccctgtacggtgtgtacagctccctctccccggtccagcgccgcctggacctgaagcccgtcctctccctccgggcccgggtggcctcgttgcgcaccctgcgccccggggagcgggccgggtatgggctggccttccaggcccgccaggaggcccggcttgcagtggtcaccatcggctacgccgacggcctgccccgccagctgccccagcagggcgggcgtgtgctgatccgcggcgctttctgtcccatggcgggacggatgtgcatggaccagctgctggtggatgtcaccgccctgcccgatgtccaggccggggatgtggtcaccctcatcggccgggacggagcgcaggagctccgggccgaggagctggccgcccggtgcggcaccatcaccaatgagcttctctcccggctgggcaggcggctggagctgcaaaaggtccctcgttcttcccagagtagtgggcggagcgcagagacgcggggatgaccgaccccgaccggaagcaagacaggataagatgagaagggcatgggtcctgtccccctgcccttctgtagttctgatcccctgtgaggaccccgtctgtcatatggcggagccgtactcccgacgcatcaaggccagcgcctgaatggcgctggccttgccttatcttccaacctgtgtgggaccgccgcatccggccactcccctcagccgctccaggatggcctcgtccgcggggcagaatctatactgcgggatctctgccgcccggatccaccggatgtcctgatgctccagctttcggggcgttccctccgcgatggaggcatgaaacagggtcaagtggacggtaaggtcgggataggcgtggatgacctccatgaagggctcccccaccgccacccggatgtccagctcctcccggcactcccggaccagggcctcctccctggtctcccccggctccacctttccgcccacgaactcccaaagcagcccccgggccttgtgggccgggcgctggcagatgaggaaggtctccccctcccagatcagggccgccactacttctgtcatcgctgtgcgctcctctctgtctcctccgcagcccggtcacagctgccgctggatccaggccatcagcagattcacgatcttctcctgctgccgccggttcagctggatgcccggcgggatcttataccacttgtacaggcacttgcggcagcagcaggcacaggcgtgctgggcgaggaacaccgggtgtccccgcatgggggtctgccgcccgtcgttgggcagctccgccggagccagccgggtctcaatgaacccccgggcgtgctcccgaatggtgtccagccccttctcccctatataggcccgctcccgctctgagagccggaatttcgcccggaagggggacgcctgaagcttctccagcgcctcgtcgatggtctgcacccctcattcctcctctctgtgtcctcccccggctcatcggacttccttgctttccctttggagggagaggacagctcccagcaggacgccggccagggcaggcaggacccatcccaggcccacctccgccagggggacggcggaaagcaccccgtccaagactggaacagctgcccccagtccctgtaccgtgtacaggatgctggccgctccagtaaacaggatgcccgccggatagatggcccgcagccgctgcagccgctccggcagaaaggagagcaggatcagcacaatggccggcggatacagaatattcagcaccgggacggagaactccaggatctggtccagtcctgcgttggcgatcaccatgctgagcagggcgaaaaaagccgcccaggcagacgcggggaacctggggagcagggtgtggaagtaggtgctgcacgagctgagcaggcccacgcaggtgttgaagcaggcgatgacaaagacagctgccaggatcgctctgccccaggggccgaagatggctcccaccagattggtcatggtagcggccccgttggtggtcccgggaaaggcaccgccggacagcgccccgatatgggccagcatggagtagactgacaggaacagcaccgccgccactccgcctgcccggacggtgctacggagaacggccttctcctccgtcacccccagcgcccggatattcattacgatcacgatgccgaagttcagggccgcaatggtgtccatcgtctgatagccggtgaggaagccctccaccggagccgcgctgtcataggggggcagcgcgggaccatagccccccacagggtggatcaggcatcccaggaacatcacagccaccagcgccagcaacagcgggcacagcagcctccccaggcggctggtcagcttttccggccggagggccaccaaaaaggccgctccgaaaaacagggcggagtagcccagccggaaccagatcagcggcgttccctccggcaggaagggaggcacggccatctcaaaggaggtgctggccgtcctggggatagcaaggcaggggcctatggagaggtagatcaaaatggtaaacaccgtggcaaagacgggatggaccctgcccgccagccgtgtcaggcttcccgaccgcaccactgcgatcacacccagaatgggaagtcccacagcactcaccgccagtcctgccatggccggccaggtgtccacgccggcctgtgcccccagctgaggaggaaagatcagattgcccgccccaaaaaacatggaaaacagcgtaaaccccaccaaaagctggtctctgcgtctgagtgtctgcatctcaactacatcctttctcttgtatccttcctgcacctctgtttagtccaagtcatcctgcggcaggccgtaaaagtccaggataaactcccaaaaatccaacgccgcctctgtcatgaggctttttttatgacgcatgatatggatggttcgttttgccatctcgtcttccagcaccgaatactggaggccgggcgcaatggaaagggcgtccttcaggcaggactctgggagcaccgccacagcgagatcagattggaccagcttgactttgaccaggaactcatctgtcttgcagtacacttttggaaaatatcccgcgttcatacacaagggaaaggtgatgtcgctgaacaaaacatccttccggtcattctgggccatggtgacaaaatactcgtctttgagcagggagagatccgccggaccggctcccagcgcgttggccaatctgttcccatagatcagtgcataacgctcctgaaagaggggacgagagacccaaaaggtcttgttctggtcgtggagcgtatctcccgcagaagaggacagaagaaagtccagttgatccgaatccaccatttttgtggcctcaaacgcgatgatctggaacgtgatcaggggattgatctgggtgtactgggcgatacagtccgcgataatgggggcataggaagtataagcgatctgaatgccccccttggtgtcatagatcccccgtttagcagaattgacccccgcattgagcagctccaccgcctgctttgcatattgggcaaactgctccccggtcttgttcagcacaatgcggttgccgatccggtcaaacagcttgacgccgatctcccgctccagagaggtgatgtgcttgctcagagacggctgggagatatggagcagatccgccgtggcggagacatgctcgtatttggccagatgcagaaaatactcgatgttccgaatgtccactccgcaccctccattattccgtttttaatatagtactatattttagactaaattgacaagttggtcaaccacttttattataagaactgacaatgagatgtggccaaatctcaaaataaaggaggtcgtcctttggaacattttaaccgtttcggcaatatgtcgcctacacaggaatatatgcatcggccatatctgatgaatcgcgcgccctttcagatccggggcaatctgtactttgtgggaaatctctggtgctcctcccacctgatcgataccggggagggactgatcctgctggatactccatgcgccggcagcatgcccggcctgatccacaacatctggaagctgggcttcaatcccgaggacctgaaatatatcatcgtgtcccacgcccatacggatcactacgcctgcgtcaacgccctggtccatctgtctggggcaaaaaccttcctcagtgcggtagacgcaaaagacatgcgggagcatccggagcgcatggaggccatgaaccgggagctgggatattacaatgagagctttgtgccggatgtggagctccaggatggggacctgatccagctgggcaacaccacgatccgctgtgtcctcacgccgggccacaccatcggagtgatgtcccacttctggactcttcaggacggccaggacaccatccgcgtggggatctacggcggggctggctttgtcagcgtctccgaggcggcactgcggcgcaatgggatgcccctctctctccagcaggattttctcacttccatcgataaagtgtgggacgagcctgtggatctgatgctgggcaaccatcccttccacaacgacacctaccagaaatacgccaggctgtgccagggagacaaggacgcgtttctggacccgggagagtggcaccgctttctcaacgagctgcggacccgctaccagacgtttcttgccatgactcccgagcaggtggaagctatgtatgcaaaatcacagataaatgattattataagatcctttgagcaacaatagtcctttttgtgggatgccgaaatcaaaagatagggggaccggtacgcagatgaagacattaaagttcttggacaagcacctggaagagtttatcatggtgctcctgctgagcagcattgtggtcatcatgctttttcaaatcattcgcagatatattttcaacgattccctgagctggtcagaagagttctgccgctactgtttcatttggatgatgtttgtcgcattttcatacagcgcacgccttggttctgacttgcgggtagacgctttgatcggcatgcttccccaaggatgcagaaatatcattgagatcatcaatctgatcctctgcatcatggtggccggtttcctgttttaccactctttcggcaccgtggcaggtgttatggagaccggggaagccagtgttgcgctgaagctccccatgcagtatgtctatgccgccagcgtagtcggctacggtcttggcacggtccgctatatccagcggctggtactgtttattctgggactgaaaaaatcccctgctgaggagggtatggcatgatcttagctgttgtcgttgtttttgttgtaggcatcctgatgggattccctctggttttgaccctcatcggtgccactgtggcccccggactcattgaccctgattttgccggcaacatacagttcgtgctccgaagcatcattggtggaggtgacagtaccagcatcctggccgctcccctgttcatcctctccggcatcatcatggcaaagggcggcatttcggaaaaaatcttcaatgtctttgcctatttgctgggacatgttcccggtgggatcccctgtgccgtcatcgctacctgcctgttctatggtgcgatctccggttccggcaccgcaacctgcgccgcagtaggtgccatgaccattccagtccttctctctctgggatacgataaagagttttccggtgcggtggtagctaccgccgccggtctgggtgtcatcatcccgcccagtattccctttattatgtatggaatggccactggagcctccatcggcaagctgttcatcgccggcattgtccccggaattctgatcgccgtctgcctgatggcctatgcggtattctactgtatccgaaaaggtgaggatcgaaatcggatcgatgccaaactggttcagctccgtgagatggggtttctccccctgttgaaggacagcttctgggcactgctgaccccggtcattttgctgggcgggatctactccggcgtagtcaccactactgaggtcgcctgtgtgtccgtgatctatgcattgatcgtgtctgtatttatttataagaccgtagaggtacgaaaaatcttttggctcgtgggagaatcctgccgtgctctggccccccttgcgctgatgatggctgtggccactgcgtttggacgggtcctgacgatcctgcagatccccaccattctggcacagtttatcacgagcaatttccattcaaaggtcgagatcctgctcatcatcaatgtagctctgcttttgatcggcatggtcatggacaccggtcccgccctgctgatcctagcccccatgctgatcccgctggccacagaacttaacatcgatgtgatccacctcggtatcatcatggtcgtcaatatggcagttggatttgtgacccctccgtttggcgttaccctgtttgtcgccagccccttgtgtgacacaccgcccatgcgcttgggccggaaagcggtcccgttcatcattacattcctgattgccctgatgttcatcacttttattccccaaatcagtctgtgtcttttgtaaaaaccatatatgtcaaatattaaaaaggagcgatcacgatgaaaaagctactctctcttgccctggcgtgtaccttgactctcggtctggcctcctgcggcggcaccgggacttccaccagttccaatgctcctgcttcctcctctgcggtggaatcccccgccgcccaattcgatgccgcctcttatctgtctggagattatccaaagctccccgaggatggtcctgcctattcactgtccatcggccatgcgatgcaggaatccacagagagccacaaaatgcttctggccctgaaagacgcagtggaaaagtatagtgatggaaaaatcacgatcaccatatatcccaattcccagctgggcagcgactctgaaatgatcgcctcctgtgtagccggagacatggatatggtgcttcagagtggatctactcacgccactttcgttcctgaaactgttatttttgacattccatttcttttctcgggatacgacattgaaaaaattgagagcgtccttacagacagcaaattccgcgacctgtacaatcaggcaaacgaagacggcggactggtgtgcctgatgctccgcgccggcaccgacagcatgaatcttacctccaacaaacccgtcaccagcatggaggacctgaaggggctgaagatccgcaccgctcaggtggagagccggatggcggtctggaatgcattgggtgccaacccgactcccatggctttcaatgaactctacatggctcttcagaacggaacagtcgatgcgcaggacaacaacctctccaacgcccttagcagcgccctgtatgaggtgcaggagtaccttgtccctacacaccatatgactcccagcatggatctgaccatgaacaaagataagttctactccatgccccagtcctatcaggatctcctgactgcgatctgcgaggatatgagcgcttatgactacgacgtatgcattgcaatggagcaatattattatgacagtctggtccaggaacatgggatgcaggtctgtgagatcaccgatgagtttttaaccgatatgcagaccgcagccgctcccgcagtagagagcgcaaaggcggccgtgggcaacgacgctctttatgacacactgtaccagcttcttgacggcggcgaatccgcctgacctgccctgcttttcataaaatttcatgtttgacttctctatctcttctcaagtcaggaggggcggcttctccattgcgggaggccgcccctcccggctgaacggctccgtcaaaggtgtctggataaaaaacatatcccctctgtctcagctcaagcccaaaatcaccctcatggcggctcttgcacggagctgggcggcaggctccaaaaagaaaggcatctgcaaaagcagatgcctttctttttggcaggatacgaggattcaaaacccctgggctgtttacagtttacctgatcaattcccgaccggctatctggccggcggcgcttttgcgccgtaaatccggaactgcgtcagcggcggagaatgcgcagggacggcttcgctaccctcacgcatcaaaaataccgaaggagggcccggtcaacggaagcaaaccccaaaacaaaatgcgacttgttgaaacaagtcgcattttgttttggcagcgggagaaggattcgaattagaaatcaactctttttatgagtaaaatgcagtaaaatgacgggttttcgaaaagaaatctcctcaaaaagttaattgcagtaaaaagcagaaaatagcgagaaatcggttaaagggtattttaaagggtcaaaaaatgggggctgctgactttaatagcggttgtatatctgccctctgctcccggcgtcaattacatatacgatcaactcgccattgtccacggtgtaaataatacgatattcaccaacacggagccgaagaagtttgtcgtgtccttttagcttctttatatcctctccatttggcaacagctcgatagcagcaaccactcggcggcgttcattgaccgggaggctgtcaataaacttttttgctttcttcttgatgatgatttgatacatcaagcaagcccccattcccgcttgcactcatccagggagtagcctttgtccttttcggggtctgggtcgttctcgtagttttcaagcatccgctcacaaaagagatcatctgcctcctcgtccgcagtgattccctgtacgtaagccaacacatagcccattttatactctggtacgctatccaacagagcgattattttttcacggttactcatggtctacacctccttcccgctccatcttttcatctatggcctcattgataaaaccattgatgctttgtcctgtgtgctccgtgtgggcctgtatagtttctttttttccttttggcatccgcacaagcactttatcgtatgctttatcctcataccgcttaatactctcatagctattttttccacccaatagtctcacctcctcgtattgcattatacattaaatgtagttagatatctatatgcaaaattgacaaacagatatagatatctttatgcactttaccactttcatatagatatctatatgctataataagaccatagcaaggggggacaccccaagcgggacaagcgaaagtggacgataggatcaagaccactacataagaccggaacgggatacagaatgagccctgcaagatgggagtcccctgtaaagcccaccggcgcttgtcccagagaaaacaaggaggaaatttgtaatgagcacaaacgaattagaaagcaaggtccgggagctgcgccagctgcaagccctgatcgcagaggctgaggcagagacggaaaccatcagagacgctataaaggcgtttatgggcgattctgaggccgtgcaggctggggagtatagaatcacatggaagcacgtaacttccaccagaatggacacagcggcccttagagcggccttgccggaggtggcggccagatttaccaggaccacgaccacacgccgcttctgtgtagcataaagagagcccccatatcccagccgaccaaagcaagaggatataggagcctgtaaccccggagggggctatggtgatagcttaccacagtcccctccagatttcaagatggaggagataccgatggaaacaatacatggcaacctagccactctcaagagcgtggaggccataatggaagaaacagaccgggccattgtccctgtggtgggtgactgcctggagggggctggggtgcaggatggcggacgggtggctgtggcctttgacagatacccggcaccgcccagacacaagagcagaggcggggacggttcggaagatctatgcttgtgctatgcaactttccccggcgccagaaagccctcggtcatgctcaaggcttatgatggtgtgtggggcgcttaccagatggtggggaccagatacaagagcatgtgggacggggataggttccgcccaaactgtggtatgttcgcagaaaggatcttcggtgtgattttcgcaagctgggacaaagatgggaatctgttgtgggagcgggatttgaacagctttccggccacgctggggagcacgtcgaccatccacggggaggtggagccggcatgagagtatcacaccgtgcatctgaatatttggccctgttcgctgcgggctttacagtcacagagatctcccgccgctgcggggtctcaaagtctacagtctccaccctgttgaaaaaagccagagccccgaaggtacaaagagaatccgcttcgaggtcatgcccgtatagctcaagctgctttacctgccccatgcgtgattgcgttgttgagggaacggagataaatgctcttgtctcttgggaggaggttgctgtatgagcacatcagcaaaaacgcttattgctgccccggttatctacaatgaactcaaagacgcagaggagaaagctattgcggtgcttggtcttttagaagatgtaattcaacctgcttttggagatttgaggtgtgatggcctgttagatcagaaagggaaaagccggggagattgtgcaatcgactgggtagagaaaaactttaacgccttatactcagcctgttatgcggcaagaagtttaatcgaagatgtggccgatactctccagatgcttcctgtacagcaagagacagaaataggaaaggaggccgcacagcatgactaaagaagagcgccgccagagggcggagagagcccgcctggagcgggagagggaggcgcagatagaagcactccgccagatcagggacgacccacaggccacgccgggggagcgactggaggcggtgaagttgctgctagagctggaataaagagatgaaggagggggctgcccgcacgagcggccccctttttctgtataatgtttcagagttggaaaaagttcccctcaccggtcccttagcgagattcccaaagggggtaggggtgggggggatgtactatcggcatatccgggccagatcttccatcagccgctttccgtgccggagctgatattgtgagaagcgaatcaggtggcggcggtatgttgtttcgtgcatccccttcggcttatctggacgaaaacccaaaaaggaaaatccatctataggccacggtgggagggtcagatatttctttgcgtattccatccccttccagtagtccaccatcccgtcctttgtctgctgctggcttttgtaattcagccgggcgcacttccgacataagaacccccgccgcccggtcaggtacaagaaccgcacccgcccgccacatccagggcagaggaaaaaggtctgccgcccgccatagccgttgcgcttgtgggatagatagatcttgtattcgcttggaggaaatatctcacaaaagctatcttcctggtatatgtccaggtattcccaaccacagaatagcccgccccaggcatgggtaaatgccaactcaaaactatctattcggggtgtcctctcaacctgttcatgggtcttattccaccctccagcattacagcgaaaatacaaagcatcaccttcttttgtgcctaaacactatgtaagatatgctctcaagtctctggataccctgggatgtcgcagagcccgcagagcagcggcgtgtatcttgtggtccaccttctgctccagccaataccgccgccggatcaccgtcctctgatgctctggcaggccgtccacagccctgtgaagtgcttcccactctccgatgctctccagggcttcctccgctctggggtccggtatcacgtcctccaggtacaggagatctccctccctgtccgcaaggggcgtctccaggctgaccgctgattgaatggggtccagctggtcccgctttgtacgctgcccgctggcctcagaaaaggcccctctgagctttagaccgtaccatgtgaggaatgacccgcccctatcctcccagccctccagggcttccagaagggcaagaaaggccacctgctcaaaatcatccacagacagccccgcccggccacctaccgccatagtccaccgatacgcccgatcatgggcaaaccgccgcaccgctgcccacagctccagcagcttgtccttgtccccgccctggatcgccctcgctagttcttcattggtcattgatgtccggcccctttcgtggtagaatgtgggtggcaagttcacacaccatcacggggccgctctcactcgctgggagcggtttttcttggttcgctctgggtttgatatagctccagccagtcccccagcttcatcaccaccagccacggggagcgggagcggcggaagaacacggcggggaggccatcaccaaagcgcacggcgtcccgctccgcctgttccagccaggaataaggccgcagctgctccgcccgcttgcactcgatatggacgccggggaggcccacgatatcgggagtgctcccgtaactcaccgcccgccctggctccacattgtacccatattcctggagaagccgggcaagctccagctctcccgcccggccttttctctggcttgttctacccgttagaaccacccccagccgcaagcacttcctctatactctccaatacatccgcaattcgctccagttgcttcacaatcgctaaagcctggttgtccgtcatgttttcaccttcttcccgtttggagtgaacatcattccaacatcaccgccgcccaagtcgatgagcttagcccccatcccctgggccgtggtcaggaaacagccaccaccgggatgatctatgtagcggtccgggcagtccttttcacagggcttcccatccaggggacaaattatatctttcatactttgccatcctccggtttctcaaattccctttttatttcctcacgaaaagcctcacctgcaacagttgtccttgatctatcaacggggtaaaatgttcttgttgaccaatccggcagattctttgccattctttcttccgcacaactccgaacaatatccaagtgataagttagcttatacaaccgatcccacgttttggaatccatgacgcttgcataatctttgtcgcattggatttccacaattagatcatgaagcgcagctaattccaagcccagccgtttccagatttgagggtccttcgcctttttcttgtccatgtcgttctcctcgataccttttattattttctatacttgaccactttggttttcacgcaccgtcagagagacgctaggtggtctagtacggtctaaccgttgcgacacaagggattgcgtacttgaccagggtggtcaagtacaaaatctgtactcgccatttacagccgtactagaccagggtggtcaagtacggaaacccttgatatcactagaaaaacttcgtactagaccacttttgaaatgtctgacggtggagcactgtcaaagggtgtcggtatatcctctcgcaactcctcaaaattagaggttagatcggttaatgcctggatgtgccacaccctcctatcattgcttccagtatggaagtacctcacattgccctctctctttaaatcggcctttgcccgcttcaaagagctaaagctatacccggcggcggttatcagctcgtccaaatcagcagtaggcattgcacccccggtttcatgcagagttttcataatgaacgccttgcaatcctcccgcattggtgaggacttggcctgttccgcccccatgacatactcacgatctcgccgccagcttgtcccctctttatgtatctgctcgtcgctgtcaatggagaaaaggactgtttcctgcaactgggcataattgtttttctcattggacaggtagcggacgccctgatcctcggtaaatccggccataagcacagaccgggcaatatcccaaatgtcggcgctgtcagcaatacgatcccgcccacaggcacctttgcgtttgttggtatggcagacaatcagcgccgtggtgttgatgtcctctccgatggtgataagctgagcggtacaatcccgcatttcgttccggcttcccatgttgacgcgcggtggggtaaagccctgtatagggtcaaagacacatagcgcaggacggaagtagcgcagtaccctctccaattcctcagaaccgaactttaacttatggagcatcccagaacgatctccaacaaaatcaggggtaatgatatttttcatgttggccccggcaaggcgcagttttttccgcagtttcttccttacactgtcctccgtggtcaagaacataattttcattggttcacgggtatatcccggcgggtcaagtatgcaggttgtaccattgcttaacgccgcaattatgtgacaccacaatgtggtttttcctattcccccatccgccgcaataactgatatttgtcccgcaggtatccaccccggaataagccatttggcgtcctcctctggaaagtcctccagtgatttgaacaaggacagcaaaggatctgcctctgacggaggcggctcccattgtggtgttgtgctgatgagcttagcaatcatatcacatgatttctctgctccaaactttgcgacaagatcggatatatcccccttttcaggcatattggtccatacttgtgttaagtccagcacttgcacactagaagccacaccatgaatagcggcggcggtctcctgtgcatagtcctttcccgtttggtcgttgtcctggaatatcaccacagagaggccctttagctgctcggtatactctggcctccatttccccggtccagctccgtcttctccgctgacagcatcatagcctagcttgtggagggtatcacagtctttttctccttcgaccacaaagacggctccagtcagttgaccggctatgtagagggagtgcggggcgttgccccgtcctttcttccatgcgccgttctccaggtggaaccaaatcccgtattttgacccatctgtccggcgatacatgacctttttgacctgtccgcctgggtatatatgctcccgctcggcctgtccataatcctgtttcctgggcggctcctggatattaaattcttttttcatccactccaccgcctcagtgtttgatatgccaagatactttgatacaagatcaacagcgtccccatgctcaccacaaccaaaacacttccagccatcagcgtatatctgtaagctggggtttttgtccccagcatgaagaaagcaccgcaccttgtcctgtcggttcaaatccagccccaggcggcgggctaccgtgcggcaatcttcccttttcagttcttcaaagtcgattgccacgcattacacctctgctttctcgattgcatcagcggcttccagaatctccgccgctctacggcgaagcgaatctacacagcggtccttttcttctttgctagatgggaggtagtatccgtccaggttgttgctgaggatcgggatatgcctccgtcgctctatgtggatctgctttcttacctctctctctgaaagctgagtaatccgcaccaggtcccggagatggagcccttgtcccgctccagcaagcagaaactgggaaatatatcccgcttgcgtccggccctggtctgatgtacaatagttttgggaagtggtgtccgcccgtgaagccgaccccgtttcctccgcccgttccggtgctgcaacactggagcgggtttttctttgttcactcattgttcgttcacctgctttctaatccattcctgcaagccagccacactgaccagtgttcggttgcccagtttgaaggatggaaagtccccacggtggatgtactgatagattgtgggtttacttactcccagtagccgggccgcttcgggtgcagagacggccaaaggctccagtttttccatcactgcacctgcctttcctgggcggatttttgtgctttccgttcccagtagcggaggttgtttgctctgactttttccttgtttttccgtcgccattcgcgctgatattcccggcgtagttctagggccctctcgtttaactgcttttcacccatgttttcttctcctttctcttgactagtgatttctctaatgctatacttacaacgtaattataacaaacaaaaagagaaaatggaacacttagagaaaatctttcggcatatatacactaagcgagaataatttaggaggctttgagtatgagtagagcaaaaaaagacaccccgcctcgctttccagagtttcgggctgcctttcttgaattgatgggagatatgacattagatcaattttcaaaaaaactggaaatgtcccgtgctaccgtgggattttatgcagcaggccagagaatcccggacgctcttggactaaagaagatagctaaaaaatgcaatgtttcggcggattggttgcttggattatctgatgttaaaagtgtagatatggacattcgagttgcatgtcagtctacgggattaacagaaaagaccgttaaattattacactatgggaaagaaggctttgatttcgctggtgtgaaggaattttttaattttttaatgggactacctgctgttacagtatttgagaactgtctccaaagagcagcactagcttctttagcttatgaaagggttccaccagaggagggcggagggctcaatttagatgaactccgcgaattgccttatgatgattataagcaaaaaatgcaagaactggacgctttagctacagaaagagaacgtcaaatgaccgaagatttactaagtggttattgcataaaaatagggtttgatgaagcaatagatttttttacaactcgtgcgactgcaatccttgatggtgttactaatgtatgtgtgggaaatattgcaaatagaattacggatgataaataaaaaaccgcccccagtgctaccaacaccagggacggctatagggggcagtaaacttgtgggcctactgctcctccattctaccacaaacaaaggaggaattgcaatggcgagaaagagcaacaccagagccgcacaggggagtgggacgatccgacagcggaaagacggacggtgggaggcccgttatactgtgggccgtgatcccggcacagggaaacagatacagcggtcagtctacggggccactcagcaggaagtgagaaagaagctggcccaggtcaccactgcactggactgtggagactactttcagccatctaaaatgacgctggccagatgggtggagttatggcttcaggagtacaccagcgacaagaagtatctgaccgtcaagcactacacggcgcagtgcaagacccacattgtacccagcttgggggcggtgaagctggcggaattgactgcaccccagatacaggctttttacaatggacttcttcgtgatggtatggcccccaaaagtgttcggaatatccacggtatcctcaccaaatgtctctcaaccgcagtcagcgtggaatacattcgggacaaccctgcaagccgtgtcacactcccccgggtggagaaaaaagaaattcacccactcacagatgaacaggtgaaggactttctccgggtatccgctggggatgaatatgaaattctcttgaaggtgatcctttttaccggcctgcgggaatcggaggccattggtctaacctgggactgcgtggacttcaaagcggggaccgtgaaagtctgcaagcagctccaaaagcgtccgctgtctgatggcggctttaccttcgctccgctgaaaaacgacaagacccgcacacttcgccccgccccctttgtcttggagctattggagcgccgcaaacgagagcaagcagagcagcggctcaaggccggggagctgtgggtgggctggcagacaaccgatcagcagaaaagcgccctagtattcaccacagcgacggggagcaatctcagtccccagacggtctataaccattacaagaagctggcctctcaaatcggggctccagatagccgggtacacgatctccggcatacctttgccgtcctctccctccagaatggggacgacgtaaaaactgttcagggaaatttggggcacgcaacggcggcctttaccctagatgtttacggccatgtgtcagaacgcatgaaagaggatagcgccgcccggatgcaggaatacatatcgaacctgtaaagggtcaattaaagggtaatggtcccaaaaagcagcaaagaaaaaccctagaaccgttgaggctctagggtttctttatggcagcgggagaaggattcgaaccctcacaaacagagtcagagtctgtcgtgctacccttacacaatcccgctatttctttgtagctctcgcgagcacgaacgttattatagcaaattgtgcggaattgtcaaggggtttttggaaaaattttttctttcttttcttccgtctcccggccggccgccgcgggggcctcggaaaacagaatctcctccgcctccccggccccgtagcaggcattcagcaccgccagaaggccgttggcggtgaggtgctccggcagctccagccggcgcagcagggccaggcgccgggcgccgctgtcggggcggcctgacagccccgccgcgtacaggtccgccttggtgagccccggcgacggggcgcacgtccctccctcctccaggaaggtggcccccgcccgtcggagggactggatcagcacctggggcggcatcccctccactcccagtttgccctcccggcccctctgcttcttccgccgctccttgccgtacacgtccgggatataggcatgcttcagatactgccccgggatacagctcttgatccggcttcggatcacaaagcccgccccgtcggagtcggtaagcacgatcagcccccggcgctcggcggcccggcgcagcagggccatctgatcccggtccttgaagataccgaagcccgccgtctccaggatcagggtatccaccacctgggacagcgcgtttttgtcataccggccctccaccacgacagcctcccggatgtgaagcaatctcctctcctcctctcattcgcctgcggaccgttctcagccccgggccccctgccgccccgccggccgtgacggagccgccagctccagcagcaggccggtcagcagctcctgggcgtcctgtccggtggacttcatggccaggtccgtctggccgcagcggaccaccgcccgccggcaccagctcagggagaaccggcgggccgaggtcatcagcttgtccgccgggtagggcttcagcccccacagccccgccacatagggggcccccttccccttctcgatggccagccgggcggagtagagctggcgcatctgccggcccagagaccacatgatgcggatgggcggctcctgcatctggtacagctcccccagcaccgaggccgcccggtcgaagttcccctcgccgatggcgtccgtcatgcggaacaccaccgcgtccagctggggggtggccaccgcgtcgatgtcctcccgggtgatccgcccgcccttggcatatgccccgatcttctcgatctccccaatcagatttgtcatcaggtccccgcacaggaagatcaaatcgcaggccagccgggtgtcgatctccttgcccagcgcccggaagcgccggcgcacccagtccaccaggtccccctggtcctgccgtgcgaagttgaccaccgtcccgttctgcttgatggccgccgccagcttggtcctggcatcccccttgtaggggatcaggtcatagacaaagaccaggcagcagtagtccgggagctgggcaaaggcccgtgcatactcctcccggtccttctcccccgccttgaacaggtcaaaatcccgtaccagcaccagggtccggggcgccatcatgggcaggcagtccaccgcctcctccaggcggcggggggacatctcccgcgccgggatggtatggaggttgaattcccccatccccccggtgagcagcagctccttcagccgccccaggtagtggtccctcagataggtctcctccccgtggaaaagatagagcctccccggctctcccccggccagatcctttttcagctgctgatatccggccgtatcggccttctgtttgggcggcatagcattccctccgtcttttctttgtacgctcaccgggtcctcacggtcacggtgccgtcccggtcggtgcgatagatctccgcacccgcgcgctccagccgttccagcgtctccggggccgggtgcccgtaggcgttgtcccgccccactgagaggatggcagtctccggctgaagggcgttcagcagggcctgagaggtggaggaggccgacccgtggtggcccgccaccagcagctccacgtcccggagccccgcgtgctccaccagcatgccctccacatccccgctcatatctccggtgaccagcaggtccagtccgccggcgccggccagcacggacagccccagctcgttggcctctcccgctcccagagggggatacagcgtcagctgccccttctccagctccactgtggtatcccggcggacccaccacagcgggatgcccttctcctccgccagcgtcaggatctcccgccgcagggggctgtcctcctccacgtccggcagggcgatggcggacaccgacagccgctccagcagctcgggcacgccgttggcgtggtcgtcgtggaagtgggtgagcaccagcagatccagccggtcccgccccagcccctgaaggcagtccgctgccgtgtccccggggtcgtccggtccgtccccgccgcagtccaccagggtgtagtggtcccccagccgaatcaggacgctctgcccctgccccacatccagcaccgccgccgtcatatcccccgcctgaaagctccgggcgtggaacagcaggctggcgcacagcgcagccaggcaggcacagacaggggtcttccatcccttcttcccccggtacagcagccccaggagcagcaggacatagacgaacagcagccaggccagatagtagaaggagctggtgctcagtgccgagaagggggcccgggccagccggggcaccacccagtccagatagcggacaaaggggagcaccgggagagccagcaccctgcccagttccggcagcactgcccctgccgctccagcgatcagcccgccgctgaaggccgcagacacggcccacagggtcatcagattagccaggggggagatcagggacaggctcccgaaatagagggccgtcaacggcgtggtgaacaccatggcccccagggtggcggacagggccgccgccccgaagcggaccagcgcccccagcagccggagcgggatggagtccttgggcggccgcttccacccccgcagcatccgctcctggagccggtctgaaaaaagcaggatgcccgccaccgatgcaaaggagagctgaagtccgatatgggctgcggaaaaggggttccaggccagcaggagcatcaaggccagggcgagggccgtcagcgggtcccgctcccgccccagcagggcggccagttgcagcaggatcagcatcaccgccgcccgcaccactgagggcgtgcagccggaaatgagcgtaaagaccagcaccaccccgcaggtgaccagggcggagcgccgctttccccggcccagcaggccggagaccagggcggccaggaaggacaggtgcatcccggacaccgccaccgtgtgggacaggccggttcgctgaagggaggaggtgtagtggtcggtgaggttgtcccggttcccggtggtcagtgcccggatcaggggcgccgcatcctctgggaaggcggcgtccaccccctgtttgagctggtgggccagctccgccgggagataccgcagcgggagccgctccggccgcgtcacccgcagttcgccgtaagcctccgcccgcagaaagatgccctttgcggtgtagtaggtgatctcctccccgccgaaggtccgctctgccagggtgcagtgggccaccgtctccacccggtcccctggccgcaggtccgccccctgttcgtccgcatagaccagcgtgggcaccggggcccccggctccccgtccgcccggaccagcactgaccagccgtagtcggtctcctgggggtactccatcaccgtgccggacagccggatggtcctgtcgtccagcgctcgggccggggcataaaacaccgccccataggccgccgtccacagcagtcccagggccagcccgccgcagatcagggcccctcttactcgtgcccgcccacggaggcacaggagggccacggcgcacagcgccgccagggcacagctcagcgggagcagcgccccctccagcagcgggatgcagttggcggcaaagacggccagagagaaggagcccgccgccgttgccagcacccgcacagccctctcctcctctctgtccgccttttgtccgttctctcagatcagggggagccgccccttctcatccagctgtctggggatgacccccatctgctggaggatgggcagcagcgcctggaacagtacatatatcaccagggtcttgggcaggacggtcaccaggttcttgcccaggctgggcaggaaccacccccagtagaccccgccccggagcatcaggttccacagggagcccatcagggcgttgaccagcaggttcaccaccaggttggccagcacgatgcgcagcaccgtgatccgcgcccggtaaaagcacagggcatagaccagcacccctgccatggtagacagggtgtagccagggaagaaatccccggtgggctggaggataaagcccaggatatcctccacaaagccgaacaccagtcccatcaccggcccgcagaccagggcgcacagcgcccgggccagaaagccccaggtcatcttggtgtgggcgatggggatgccggggatgagggacagcgcccgggccatcgccaccatcagtgccgcgaacatcagcagcttcaggcttttcatggcctgattcccctccagccaccagccgggctggagcggggtgcggtacagggtcttggaacattggtctcgatacataaagaaaacgcctccttctgcgatccggcagccctttcgggattgccgcacagaggaagcggaggtcccgccccggtatgcggcagcgggatgcgggatcatgcactgccgcgcgtctgcgctgttcgtccggcggacaactccccgtcccgccggcactacacggtcccctttgggaccagcacgcatgcccctactctgcctttgttttagtgtacctctttttccgaaaaaaagcaagaaaaaccagcggaggggacacagatcctgcaaaagcggggggccgatggctcggccccccgcttctgttccattttcagctgcggccgcagagatcagccggtctgctgctcctttttctccagggtgatcccgcccacgcccacgttgactgcggccaccgtcaggccggtcatggactccacgctgctcttcaccgcgtcctgcacggcccgtcccacctcggggatggtgtgtccataggacatcagcaccgccagttccaccgtgacctgctcgtcctccacctggatatggactcccttggtcaggttcttcttgttgctcagcagctccgcgatgtcgctgcccaggttggcactcagcccgctgactccctccacctccaaagcggcggcggcagcgatgctggccaggacctccccggaaatatggatattgcccagctcgtcagagcgggagacgtactctctattctcactcacggatggtcacgctccttcacgtcacagtttccgcgtctgcggagatcttgttcactattgtaccacagcagaggcgctttgacaactgaaacctcaaaaagtcccttttgccttttgaagtggttttggatataaatgacctcccaccatcaaaatcacggaagaagatatgtccacagatagctgctgctcaataaatttgaaaatttcatgggcaatactctaaatttcaaatatcagaatggcttgatctgttccgactgtcgacatggctgccaatttatatgtacccttcttcatcatttcttccgcctttttttcgatagcctttgccaggtcttctgtaccggtagaacattccacgacaactgatttgtaaaacatcagatctaccctctctcacaagttaaatttcttattctttcgattatgctgcaatacgcgggatgaaaaacaaatttttcttattttatcatgtctctctgcttcaatcaacacatagcgagatctatagagacatctcacccagcagaaatcagataagaaagaagaggggagcagcgctcccctcttctttcttatcctgttttcccgcgcgtctctactccacctcaatgatcttgatctggctggcggtgaagccggccacctctgtgacgatgtccacgatgcgggcggtgtccgcctccgtgatgccgccctccggcgcggccaccgccaggctgacgctctcgtccccgatgaaggccacgcagtccgtatagcccttggccactaccaggttctcgatctgggcctcggtgacggtgtagtccgccatggcctggatggtgtcgttggcctggtccttcatggtctggtctgcatcctccccggcagccgcctcttggagcagggtcagggcgctgtcccgggcctgctggcggttgaggcgggcagtggcgaagtagctgttggaggaggacgtctgccccgcctcacccgtgcccgctgtcgggtcctcctgtccggcagtgccggaggcccccaccagcgggtcctccgtctgtccgtccaccatggtggactcccccagggtctttcccgccgccgtctcctgctcgtagttccagttcagatagaccgccgcgcacacgaacaaggcgatggcggccaccaccgcgttccgcttccagagctgagacaggctcacgccctttccctttgtcttcatacccatgtcctcctcaaattcaaaattttaatttccttcacagatagagatgcggtcgctgcccaggccggtgagggccgagaccgcctccagcagccgcagctggaccgccgggtcgcccccgccgggacagaccaccagcgccccctgaaactggggcgtcagagtgtagaggggcaccaccccctccgtccccgccccctgtcccaccgtgacggcggaggcggaggatcgctccccgtcccgctccacgttctgggccaggatctggcggctgccgctcttcagggtcagcaccacccgggtctttcccgccccctggatatcggagagcacctgagacagcttctcctcaaacaactccaggtcgaactgaccttccccctccggcgggccctgggcctcctcgctccccccggacggacccatgggcagcatcatcagcagcacccccgccgccatcaccagcagtacatactgataccgtttcagcgcccccttccaacgctcccgcagctggggccagatctctttcacggcgactcctcccttatgtattcctgccgctgcgccgggatgtccagatcactctggatctcccggacaagctgttcctgttcttcctgggccaggtcccccgtcacgctgcacctccaggggaggaacacccccgcctcttcctgggtgcaggtcacccggacctgacaggtgatcccaagctccgccgccttgtccataacatatgcggcacactgctcctctatgaccagcttcatccagtcatttgtatctgtcctcagccggtccgcctgttcctcgatctgtgccgaatacccggacagcccgccctccgccggcagggtgagttccgccgccggacggaacaccgccgccagcagcaccagtccgcacaccagccgccccacccgcttgggtccgccctcctgcatcagcccttcggccagggctgccaggatggccgctgccgtcactcccagcagccactcccgggccgcatccatcatggtgtcaccgcctttaccgccgaggccagactgaccagcagcatcagggcgcaggctccggtcatgcccagcacgatgccgaaggccccgccgatactgtccagaaggtcggacagccgcttgtcagacaccgtcccgatcagcgccgccgccagcttataggtgaggtagtgaaatgccagctgaaggaaggggatcagacagatggccaggacccccagcatccccacgatccccaccgtcccccgcagcacgccggcccccaccagcacggtctccgccgcgtcggccaggatgcctcctaccaccgggacggcccgagagatggccattttggctgtcttgatcgcggcggcgtcggccgagccggcgatggccccgctggcggtgagatagcccacaaaggccagcaggacggcggtgagcagggatgtgaccacccatttcagcaccgacgccagctttttcagcccctcgttccccaccgccgcgtgggcggcgcacaccgccacataggcgtagacgatgggcaccagcagggtgtcgatggctccgataagcaggtcggagaacagcacggtggccccctgccgcaccgccgccccggtggccgctccggtggctgcggtcagcaccgccaccaccggcagcagcagcccggcaaagccgtccatctgctctatggtctgccgccccagaccgatcatggtctgcatgtcgctcaccgacagggcggtcaccgccagggcgcctgccatctgcaccgcctggaggcccccctcccgctttccggcgtacaccccctccgccagaccgcagaacaccgccaccgccagcagcttcagcccggtctgggcgctgcggcgcagcagctcccccgcctgtcccagggcctgttccgccaggccggacaggccgccgctcaaatccccgtccggctccacgccgtaggattccgccgcctgccacagctcgtccagcccctccacctgctccggctcccccgccgccctgcagggcatcgccagcaggagcatcaccgccaccactgtcaaaacctgtttcatcccagcaactccgccatcatcgtcagcactccctccgccagcgggagggccaccgccagggccaggatggtcccggccacctccacaaaggccgctgcgcccccctccccggcggcccggcacacctcccccgtcaccttggtcaggatggagatggccgccgttttcagcaccggctccaccagggtgctgtccagccccgcccgcccggccagtcggccgatggcctccaccaccgaacccagggcgccggcggccagcatcagcatccagcaccccgccgccagcaccagcaccagcgccgcctccggcgcgccccgccggatcactgcggcgcacagcactgctgtcaccgccagagcggcgatctgcatgatcccctccattacaggtggaacagggtcttgaccatggtgaacagctgggcgatctcctgcaccaccatcatcagcaccaccaccagccccgccagggtggtcatcatggcctgctcgtccctcccggcccggctcagcacctggttgagcaccgcgaccaggatgccgatggccgcgatcttaaaaatcaaatccacatccaacgtcagatccctcttttccgctcctcagtaactgtaccgacttgtcccggttttttccgtcggaactccgggccggcggcagattctccactttttacaaaaggaggatgaccagaaaggcccccgctgtcacccccagggccccgtacacctttcccagccggagacgctcctccccggcccgggcccgcagtccctccagctcccgccgggccccggcgatggccgcctgctgtccccgcccgtcatagcgccccagcacctcccccagggggtacagggcccgcttcgcctccggtgagacgggaagctggtcggtgagccgccgccaggcgtgggcaaaggtctcccgctccagtccgtccagcgcccgccggcaggcggagaacaggcgccgggcgggctcctccgtccggtgagccagctcctccatcagctggggcagcggggtcagccgcagggccagctcccgctccatcagctccagtccggcgcacagggcccccagggcccgctcccggtgggccagctccgccgcagcgctcattcccagccagaccgggcccgccgccaggcagaccgcgccaagcatccggatcattccagcacctccacttcatagatcctccggcccgcctccctgcggatgcggaccagccgccggaagactccctcctccagcagcccccggtacagcttccgccgggacaggtcctcccgtcccgccccgtgggcggtggccagcagtgtcacgccgcagcccgccgcggacaccagcgccgccacgtcctccggcgcggtgatctcgtccaccgccagcacctgggggttcatcccccgaagcagggtcatcagcccccacgccttgggacacccctccatcacatcggtgcgggggcccacgtccagctgggggaccccgtcgaacagcgccgcgatctccccccgctcgtcggccacccccacccgccggggaggcgccccctccccggcggagacggcccgcaccagatcccgcaggagggtggtcttgcccagccccggaggggccaggatcagggcgctctccagccgcccgctctctaacagcgacggcagcacctcctccgccgccccggggaactgccgcgccacccgcaccgcagcggaggacagcttccggatggtccgcactgccccgtcctccagggccaccgtgccgcacagccccacccggtgtcccccctggacggtcaggtacccccggctgagctggtccagcacggcgtggacagaggcccggctggccagttccagcagctgctccagctcctgctgggtcacggggggcccggccagtgccctctccccctccggcagcactgccgccatagggagccccacccgcagccgcagctcctcgatctggctccgccggtcctccggcagggacatcaccccgctccgcaggcgcaggggcaggacccgcgccgcctgctccacgccggattctctctgcgtcatcagcctgtccacctccgtttgactcatcctatgaggacaggcccccgcctattcctcctttttgtgtgatatttttcgcacatctctcttgacatctctccagggatgtgatatatttcactcacaacatgtgagaaatatctctcatctcagaaaggagcctctctatgcggcacccgttcaactatctgtccctgctctcactccccgccctggccgccctgatctatttccccaccggggacgcggattttctcggctttctcggctttttggtctttctgcgctacctgtgggtcaacccggacgagctcttcctgctcaccctgcgccgggcggccaccagcgccttcctggctgagtgcgtgctcctggctccgctgctgctcctcttttacctcctggagcccggctccagtcccatgccccaggccctgggcctcagcttcgccctctccctgatcttcttctgcctgttccacacctggctggagtggaaggaaagcagggactgcgcatgagcctgcgcaccaagatccgggagctccgcctccgggaccggctcagccaggaggagctggcccagcgggtgggcgtgcggcgggagaccatcggccacctggaaaatggacactacaacccctccctgaagctggccatggacatcgcccatgtctttgggtgcactgtggaggatatcttctcctttgaggactgacccaatcggccctctcccgcccccggagacgcccgccaaaaatttttcaagtttttttcaaaaagggcttgcattattttgacaggtgtggtaatatacaaaagctgtccggtgagttcacttcggaccgcggctttccgggtgtggcgaagtttggtatcgcgcttgaatggggttcaagaggccctgagttcgaatctcagcactcggaccaaacaatgataatccgaactgcattatccaagtgggtaatgtagttcggatttatcatttctattgaaaatgtgctttgatggacaagggcaggattggttttcctgcccttgccttttttatgaaatccatatataattatataaactgaataaaggtggtgtgttatatgagaaaatcatggtggaaaattcctctatattgtatagttgcaagttggatatgctttcaactggaagttcgttttttggtaagatggacaatagtaacattgccagacgggtcaatatctacagatagtacacgacggttaattcttaatattgtgctatttataattgttgttgcaattggtggatttttcttttttcgtaaaatgactcacaaagaacttttttgctctgcgtctgttttggttgtactcaatattgtatttggcttaattgcttataaaatgcaaggaatgttttctttttattttgccgagttaacagagtgggatagtcttatttcaagcctgctattccaagttactcaaaatgtttggatttctgctgtaatcaactggatattgcctccatatatttttgttctatttggaaaaaaagcatctaacgagagttaataaaaaggcgggagcatcgttatagatattcccgccttgtgctttagtcctgttttgacttttcttgttcctgctgtgctttccgctctgccaactcccgcccttgcccttttcgctgttctatgctatatttcactcacaatatttcatttcaaagggaaactgctatggattatgaatttcagctctctccatatgatggagcatctcttgttccacaagtcagttgtgcattagaaaaaaggactgaatccatctcaagagaaaaatacccgaagatgtggaaaatcaccgatcattttaactcaaaaaaagtttctgaaattgttttaaaaagacggcgcttgcgatacagggtatatggtattttacttatcattatgggagcatttttgcttatcccgggattaatggagccgcaagaattggcagtccctttatttgcgggtattttgggccttttgctcggtgtgtttactctatggagcagtaaagcccaaaagctacaaagcgagcgttttaatcaagccgcagtaaaacttttgaagggtttagagactcctccccctgttcgtgttcagttcacgcaaggcggaatgaaaattgcagaccagcagacagttccatattctgattttaattttatatatgaaacaaaagatttatttcttttgacatggaatgaacaggtaactattttgcaaaagaaagacatggtctcaggtaataaagatcaattcatttcttttctgcaagaccatattagaccataaaagtatcatatcacaaagcggaggccaatatgaagcgaaacccagccattgcaatcataatgtgtctgcttgtatcattcacattttctgcctgcgcgcctgcggcccccagcggccaaacgcctgaattttttcatgacattggaaaaacactgagtgaattaaaaaaagagcatcctgaaggcgaattgattgtaagattagatggatctccggatagcgctgctatatgttttggggaccccgaggcggaatatctttactacttttttggaacacagagcggtgatgctgaaaaggctatgaacgaatgtgaagaccagctgaaatgcgccggttttgtcaccaccgcaagcatactctttccagacatggaagatgacatgtcctttgaagatttcttttcctggatcggtgtggacgactatgagtacttgttggggccagaggtaataactggagagggctggttaagattcacgtatcatgatatggaagtcatggtgaatacaaacgaagccgctcctggcggcggatgggatttcacaggagcagagatcgtgaagcgtgatgctccggtatctattgcagacccagaactatcaaatgccaatcaagacttagcggatgcggtcatgttcgatcaaactgtgtcatgagaacgcaatactgcacccggcgtgtgcatttatttttgaaggatcgtcgtaaagagaacgatggctgaatcagtaaaaaggcgggaacatcatttcagatgttcccgcctttttcacaccgcatctatccgttctgctccctgtcctgcggcgggcagaagaagggccgcgcctcgtcaaacaggtcgatcatgccgcagtagttgaacgtttcatacttccacagccattcctgctgctcctcgttcagctccgactccgtcagcgtctggccgtccgcggtgatcaggcccaccggcgtgatcaccggcagctcctggtacatctgggccaggaagttcatgtagcccgtcaggggcaggccggccgtctgagcggtgagcacccccagatagttggggctgaggatcacgccgctctgctccgggatgtcgtagttggcccataacccataagaagaaggggacggcgtactgctgcagcacctccgccgtggtgcgctccgacagctttttcccgtagagctcctcgtagaaggcatttttcaggggcggctggtgatccccgaaaaagacgatcagggtgggctcctccacctggctgtaatagccgatcagttcctccagcgcgtcgtcgctggcctgggccagtgcgatatactgctcggcactgctgtccgccgtgcgcagctgggtggacagccggatggtcttggtcaggttgttccatccctgggcatatccgctgtggttctgcatggtcacattgaagacaaaggcgggagaggtggtcccggtcacgtcaaagatggtctcgtagtccgatctgtccgagatatagcggcggatcagataggggtcctccacgtcctcctgatacagctggtggtcaaagctgaggcactggtaggcgatgggccggttccagccggaggacagataggggtggaaagcggtcgtctcatagccctggctcccagccagggctgccagggagggcatgccctcctccacatacagctgataggccaccgtgtgcggcggctggaagagagtggagaagccggtgaggtactcaaactccacactggccgtgccgccgccggtgaccggggagtacatccagcccttgatggtgttctcggtcatggagtggaggaagggagtggggtcctcctccagctccagcccctcaaaaatggtcaggtccgcgaaggactcgttcatgatggcgatgatgttcaccggccgggtgacggagccgtccgcctctaccgccgggtactcctccgccagctccagcacccggtcccggctgtaatcctccggcttgtccaccgagctgtaccgcatggctaccgtgaagttcagcaggaagccgttggcctgggtgacccactgctgggtgtagatgcccagggcgggcagcatcccggtgcagaagaaggcgaagctgtaacccgcgccgaacaggatcagcagggctccggccagccggggcatccggtcccgccgccgctgggccgggcaggcccagaccaggaagaggtaggccaccagcagaacggccgcctggacgatgtagtggtccagcgagtagtcgaagtcgctggccacgttggccgcggtccgccagcccgccacatccgcagggaacaggatgcgcccccggaagcgcaggatatagtggttgagcagccccaccaggaagcacagggtgaccgccaccgccgcagatcgccgccgccgccccaggatcagccggcacagggcgaacagcaggtaataccagatcatgttcatcagcacctgccaggccgccagatcctggaacacatcgttctcattcaggatctccaccatccagagggccgcccacggccccagcaggaacaccagacgggagatccaccggtccgggtccccccgcatgcttcggaaaggacgcagcagggtatctttgcagaaaagcgctctcatgtttatcctccaaaaacggcagaccaaatatgccgtatttttataggatagcgcgtccccgaaaaattgcaatagccttcatcaaattttaatgaactctgcatccttttccagggtatcctctgaaatagacgaagaaaagggaaaaaagttccaccctttttctgctattcaaatatacgcttttgtatgaatatttgtcagggggccgcctccccgtccgcggcctgcttctcagttttctcctcctgccggtgcgttcttttctggtattcgctttttcaccaaaaagacggccttatttttctcaaattcgcatatttatctattgactatgcatagaatagtggtttatactcagggtatcgccctggcttgccggggcaccaaaataaaggagatctgtttgaatgaaaaagtttcttgctttgaccttgtccctggccatggccctgagcctggccgcctgcggcggctccggaagcggctccgcttcctccgcccccgccgcttcctccggcgtgtcctcttccgccggggacgccggctccagcaccggcagcaccagcacccccgccgagctgaccaccgtggaggccggcaagctcatcatgtccaccaacgccgccttccctccctatgagatgaccgacgacagcggcaatgtggtgggcatcgacgccgagatcgccggcgccatcgctgacaagctgggactggagctggtcattgacgacatggacttcgacgccgcccagctggcggtccagcagggtaagagcgacatctgcatggccggcctgtccgtcaccgaggaccgcctgctggtcatggacttctctgacagctacgccaccggcatccaggtcgtcatcgtgcccgagggctccgacgtcaccctggacaacctgggcgagcagctcatcggcacccagcgggccaccaccggcaacatctactgcaccgacgactacggcgaggaccatgtgatcgcctatgacgacggcatcgtggccgtgcaggacctgctcaacggcaaggtggacgccgtggtcatcgacaaggcccctgcccaggagttcgtggccgccaaccccggcctggtcattctggacaccgagtatgccaacgaggactacgccatcggcgtggccaagggcaacaccgctctggtggatgccgtgaacggcgcgctggccgagctcaccgccgacgggaccattcagtccatcattgagaagtacatccccgcggagggctgatcgtccgcacgccagatcaagaaagggcggcccctggccgccctttttcttacgaagacatagagaggggtagaacaatggacctggcctactattatgagctatggcgcgggatgatgctctccgctgacccggctgttgcagacgccgtcgcctggtggcaggaattttatgtgaagttctatatggcctttattgaggcggaccgctggaaacagtatctggacgggatcgggaccaccctcaccgccactgctctggccctggtcctgggcgtagtcctggggatcctggtggctctggtgcgcaccgcccacgaccagcagcgcgccgaccgccgcaggaacccggtcctcggcctgttcaacggggtatgcaaggtgtacgtcaccgtcatccgcggcacccccatgatggtccagctgctgatttggagctccgtggtattcgtcagcagccgcaatttcacccaaattggaatcctgggcctgggcatcaactccggagcttatgtggcggagatcatccgcggcgggctgatggcggtggacggcggtcagatggaggcgggccgctccctggggctgaattactttgataccatgcgcttcatcgttatcccacaggccatcaaggccatcctccccgccctgggcaacgagttcatcatcctgctcaaagatacctctttgatcacggtcatcggcggcaaggagctgctccacgccgctcagggcatcatgggccgtacttacgaggcaatgttccctctgatcggcatcgcctgcatgtatcttgttctggtcatgatcttcacctggcttctgggcaaactggaaaggaggctgcgtcaaagtgatcgacgttaaaaatctgagcaagtcctttggcgaccacctggtgctggacgacatcaccgagtccatccaggtgggggagaaggtggtcatcatcggcccctccggctccggcaagtccaccttcctgcgctgtctcaacctgttggagacccccaccaaggggaccattaccttcaacggcacagagatcaccgatcccaaggcgaagatcgaccagatccgccagcagatggggatggtgttccagcatttcaacctgttccccaacatgaccatccgaaaaaacatcaccctcgccccggtgcgcaccaagctcttgacccaggccgaggccgacgacaccgccaccaccctgctgcgccgggtgggactggaggacaaggcggactcctaccccgcccagctctccggcgggcagaagcagcgcatcgccatcgtccgtgccctggccatgaagcccaaggtgatgctttttgacgagcccacctccgccctggacccggagatggtaggtgaggtgctggaggtcatgaagcagctggccgatgagggaatgaccatggtggtggtcacccatgagatgggcttcgcccgggaggtgggcagccgggtgctcttcatggatggcggaaagatcctggagcaggagcagccccaggccttcttctccaatcctaagcacccccgcacccagctcttcctctccaaagtcctgtaagctcaaaaaggcgccccgctgtcctttgacagcggggcgcttccgcctttccagatggtatgcagggccgtccaaaagtccgttgtatgggcgccggccgtttcccgccgcatccccggggagggcccctcataacctccggctcagccaatggccagcttgatataagagaccgtccggagccgaggctccggacgatctcttatcatcgaaactgatcctgttccgcttccgcctttggcgaaagctccgcgtgctcccttgctcgtcctctccaaaccggacccgcttcgctgggctccggtttggccggcggcagagatgccggcttccgcggctttacagtcccagcttcatggacaccacgttgtccaccatggccagggcattatccagcatcagtacgtccttgccaccgccccagcccggatgattccgggctggggcccctttattttttctatacccgggcgaaatgaattcgcccgggcaaattctccgcttcgctccgaatttacgtgcctcacggcacggctcgcttccgctcgctgggcggcggctttacagtcccagcttcatggacaccacgttgtccaccatggccagggcattatccagcatcagtacgtccttgccgccgcccatggcgctgtccggcttgccgccgccggaaccgccggcgatggcggacacctgcttgatgatatcccccgccttcacgccccgcttgacggcctccttgccgcacaccgccaggaaggtgatcttctccccattgacggaggccagcaccgccaccacgctgggctctttgtcacgcaggaagtcgcccatgttccgcagacggctggcatcggcatcgggcacggtggcagtgaggaccttcaggccgcccacctcgtgggccgagaagaggaaccgctcagcctcgcccagagcctccttggcccggaatttctccagggactggcgcagctccttcatctccgtcatgatgtgctccgccttgtcccgcagttcgccgggcttggccttcagggcggcagcggcctggaagagcatctcctggttgcggttcatcacgtccagggacgcctgcccggtggtggcctcgatgcggcgcacgccggaggccacagagaactcgctggagatgtggaacacccccgccttggcggtgttgtccagatgggttcctccgcagaactccacggagtacccccccatgtccaccacccggacggtgtcgccgtacttctcgccgaacagggcggtggcgccggtcttcttggcctcctcgatgtccatcaccttggtgtccaccggatatccctccaggatggactcattcaccaggcggttcacctcgctcagctcctccggcgtcatggcggagaagtgggtgaagtcgaagcggaggaagtcgggctccaccagggagccggcctgatgcacgtggtcgcccagcacggtctggagggccttgtgcagcagatgggtagcggtgtgggcccgctggatggcccggcggcgcttggcgtcgatggaggcggtgaccgtatcccccaccttcacattgccggagagcacccggccgtagtgcatatatttcccgcccttgttcttctgtacgtcgctgacctggaagcggaagccgtcgttctccaccacgccgtggtcggccacctggccgcccatctcggcgtagaagggagtctgatccagcaccaggatgccctcggcgccggtgcccagctcctcccgcagctcctcgcccgccaccagggccagcaccttcccctgggcagaatggctctcatagcccaggaactgggtggcgggcatgtccttgccaaactccacgccggcccagcccaggtcgcccagggcctcccgggccttccgggcccgggtcttctgctcctccatcagggtgtcgaaggcggccttgtccagctccatgccctcgtcctccaccatctcgatggtcaggtcgatggggaagccgtaggtgtcatacagcttgaaggcgtccgccccggagaaggtcttctccccccgggccttgtgcccttccagcatctccccgaagatcttcaggccgccgtcgatggtcttggcgaagttctcctcctccacccggatgaccttggtgatatagtcctggcgctcccgcagctcaggatagtggccctcgttctcatggatgacggtgtcgcacacctcatacaggaaggggtggtccacccccagcagcttgccgtggcgggcggcccggcgcagcagacggcggagcacatagccccggccctcgttggaggggagcacgccgtcacagatcatgaaggtggcggagcggatgtggtctgtgatgacccggagggacacgtccttgctgtggctctcgccgtagtgggcgccggtgatctgggacaccttgtgggtgatgttcatcacggtgtccacatcaaagagggagtccaccccctggcacacgcaggccaggcgctccagtcccatgccggtgtcgatgttcttctgcttcagctcagtgtagtggccctccccgtcgttgtcgaactgggagaagacgatgttccacacctcgatatagcggtcgcagtcgcagcccacagtgcaccccggcttgccgcagccataggccgggccccggtcgtagtagatctcggagcaggggccgcaggggccggagccgtgctcccagaagttgtccgccttgccgaacttgaagatgcggtcctccggaatgccgatctcgtcccgccagatggccatggcctcgtcgtcggcgggggtggtctcgttgccctcaaagacggagggatacagccggtccgggtccaggcccacccactccgggctggtcaggaactcccaggaccaggcgatggcctcgcgcttgaagtagtcgccgaaggagaagttgcccagcatctcgaaataggtgccgtggcgggctgtcttgccgatgttctcgatgtcgccggtgcggatgcacttctgacaggtgcagacgcggtggcgggggggctcctgctccccggtgaaccagggcttcatgggcgccatgccgctgttgatgagcagcagggaggcgtcgttctgggggatcagggagaagctgggcaggcggagatgtcccttgctctcaaaaaaagacaggaacatctccctcagttcattcaggccaaagggcttgggctcgcgcatggtggtctacctccaatattttttcatgtttttgtgttacaaataaccgggccatatcatcagtcgccccggaacaggccggtgaaattgttcaccagattggacaggctccagctggacttctgaagtccggcggacaggccgatcagctccatgtccgggtcaaaggccacccggatggacaccttctcctgggagaagatgcacaggagctgggcgatgccgtgctcctccccctcggtgctgccagtgacctgggcggacttgagctcctgatagtcccccgcctcctggaacaccggctccaccaggtcctggacgctctgggcggtcaggtctgcccggatatcctcccggaaggactcatataccgcctcgtagtcgccctccaggagctggtccaggacagcctccccggcggtcaggacggtctctgtgtccatgccctggggcaggggctccgcctcctcctgggaggagcagccggccagcatcacggtcagggccagggccgccgccagcagcggcacgatcctctgtttcatggtctgtcctccagcatcagctcggaccgggcatagagcaccgcccggcccgccagaatgacccggtccccttccagccggcagtacagggtcccccctctgggggatgcctgccgggccacgaaccgggtcttgcccagcttttgcgcccagtaggggatgatatggcagtgtccggagccgcacacagggtcctccggcacccccatctttggggcaaacgagcgggagacgcagtcgtacccctccatccccggcgccgtgacctgcatcagggcccccttcaccttcagcagcttgtccatgtccggcttcagcgccagcacgtcctccgcccggtcaaagacgcacagcaggtcccgggcccgccagacctccgacggccgcgcccccagggcctgggtgatctcctccgtcacctccagccgcttcagctggtaggcggggaaatccatgctcagcagctctccctccgcccgcacggtcagcagtccgctgagggtctggaagccgaccctctccactcccggctccacgaatctggtgatgatatgggccgcggccagggtggcgtggccgcataggtcgatctccccgccgggggtgaaccagcgcagccggtactcctccccctctttcacaacaaaggccgtctcagacaggttgttctcccgggtgatcttcagcatcagatcctcctccggccaccgctccatcacgcagaccgcggccgggttgccctcaaatatcctgtcggcgaaggcgtccaccacatattgtctcattccatcagctccttgttccataaaaaatcgcccctgaccaagtcaggggcggatcatcaccacggtaccaccctgatcgccagagcacgccctttcgggagcgctccggcctctcagcatcccagctaacgggggatcgtccgtcccgctcctcacgggccgctccggagtggcctgcgctgccgcttctgccgagggctcacaccgctcccctctcgcttcaggctgcctgccgcgcttggctccatcatcgcatttaccgcaatattttatcacaatttcggcgcttgtcaaccgttcccgccgctttttccaaaacgtgcctcccattcggcgggcttgaagcccaccagcacgaagtcctctcccgccaggatgggccgcttgaccagcatcccgtccgcagccagcaggtccagctgctcctcctcgtccatgccgggcagcctgtccttcaggcccagagccttgtattgcaggccgctggtgttgaaaaatcgcttcaggggcaggccgctcctgtgctgccactcccgcagctcctcctttttggggttgtccagcttgatgtcccggaactcataggggatcgcccgttcctccagaaaggcccttgccttctggcaggtggtgcatttggggtagcatacaaagagcatgttggtccctccgtcctgaatgttgggcagcccgcaggaagcgcacgccctgctccatactttaccacactccgggacgcaaatcaaggttctgctccgccgctctcttgaatttctgcccatgcaatggtataataggggcgacaaaaaggaggtgacatccatgctggtctccacaaggggcagatatgcgctccgggtcatgctggagctggcccagcacggccgggactgctacaccgccctgagctccatcgcttcggagcagggcatctcaggcaagtatctggagagcatcatctccaccctctccaagggcggcctggtggagggcgtgcgtggaaaggggggcggctaccgactcacccgtccgccggaggactactccgtgggagagatcctgcgtctggcagagggctccctggccccggtggcctgtctcgactgcggctccgacccctgtgcccgggccggcagctgccgcacccgtcccctctgggagcggcttgacgcgctcatctgtggatatctggaccaggtgaccctggccgatctcctctccgctcccggctcggactcctctccctgctgagtggccgtccctgttccggttccacggccgcggctcctgtcctggagccgcggccgctttttccggccctccggcgcagagcctgatgcccgcaccggcccccgggtcctgtgtaggggcgcacttcgtgcgccctcattcctgccttgaaacgcccccccaaatattgtatcatggtaacagaaacgacaggggttctcggcgggtattttcagggaaaactctgcttaaacatcccctccgatgcgtctgtgcgtccccgccctctgcggggcgggaccgcggaggggaaagcctgccctggggccccaaaacaagagcaggagaaaaaacggtcagcacggacgatggagggagctctatggacctgaacacgcgaaagatcctatccctatttgcaagcatcctattcaccattccggtctatatcattctgcacgagggcgggcatgccctgatcgcgctgtcctgcggcgcccgcatcacagaattcagcattctgggcgcctatatgcgctatgaaggcggtacgttcaccgctctgacgctgtctcttttttatattgcgggaatgctgctgccggtcctcatatccatcgcctatatgctgctctatcgggacgcagcgcagtccgtcttttatcgaattttttcttttctgtttcccttgatcctcacagcccctgccctggcatgggggatcgtccccctcctgtatctttccgatcaggcacccccaggggatgatgtgaccggattcatagaaagctccggtgcaagcccctgggctgtcctgttgggtgctgtcctcctttttgccggctgtctctttctggcctggcagagaaagatcatccaaaactattgggctgctgtcaggctcggcgtgtcatgagccgttcccgcagggccaaggctgtccccttggtgcggataggacgataccctccgtacactgagggcatctatggcgcggagcagaaggatctcaggggatgcaaccggcagttgcggaagtttcagccgtagttggtagcgtgtgaccatggatcgcagtatattgtttccaagggggtaacacaaatgttgtctgaaagaatatatcagttcagacgaaagagcggcctttctcaagagcagcttgcggagaagataggcgtttcgagacaggccatctccaaatgggagagcggaacatcaatgcctgaatttcaaaaactgttggctttgagcgagtgcttccacatcactcttgatgaacttgtaaaggacagaggggctgaggaaaggacagaagaaacacggtcaacgccaaaagaagccaagggcccgaaagccatggatcagaaagccggcatttgtctttgcctggctggcgccatctgtctgacactatccggactcatgatggtcataagccccggtgcggcagagcagctgaataccgcttcaacgatcaccctcaatgggtctggtgtgctcatcgccctgtgcgtccttttgatggtcactggagcggtcctgatcctgcgaaagaaatgaacggaggcaagcctatggggaaattgagtcatctttttagcgctgtcgcaattttgttgtcagatgtcatgtgtgccgttgtggcatttggctatcgtgatatgctctgcgggatcgagcactcatgttacagcgcacctgccagcgtggcatttctctatgccatcccgtttggcatcgggatcgcggtatgttcccttgtcgcgtacatacttcataaacggtcaagttaacaaatgatccgatctcaaaggctccgctcgtacaacgtcccccggctgtaccggggactgcgcgcagaaaaggcccgccgctgacgcggcgggccttcttatgtcaggggccgtccgggagctctccccggcgcgggtcacagggtgtcctcctccgcccggtccagggcctctcccacatcgaaggggggcatgtcctcctccgctccgcctggagctgccccggaagcgctctcgggaggggttcccccggggacgccctggcggtacttcatctcctgccactgctccttggtgatgagcagctggcggggctttgagccctcgaagggccccacgatccccttctcctccagctggtccaccagccgggccgcccgggcatagcccagcttcaggcggcgctggagcatagagaccgacgcctgtcccgtctccaggatcacctcggctgccgcgtcgatgagctcgtcgaactcctcccccacctcctcgggggcggagccgcccacgcccttggcgcccttctccttctcggcggcgtgctgctcgatctcctgcatcacctggtcatcgtagctggcgtcgccgctgttctgcttgacaaagtccaccactgcggccacctcctggtcggagatgaggcagccctggacccgggtgggcttgccggagcccagggggaagtagagcatgtcgccccggccaaccagcttctccgcgccggtggtgtccaggatgatgcgggactccaggctggaggccaccgcgaaggcgatgcggctggggatattggccttcatcaggccggtgatcacgtcggcggagggccgctgggtggcgatgatgaggtgcatgccggaggcgcggcccatctgggccacccggcagatggactcctccacctccttggccgccaccagcatcaggtcggccagctcgtcgatgaccaccacgatctggggcattttggtcatgccctccgtcctggcggccagggcgttgtaggcggccagatcccgcaccccaacctcggcaaaggtgcggtagcgcttcatcatctcggtcaccgcccactgcagggcgcccgccgccttcttggggtcagtgaccaccgggatcagcaggtgggggatgccgttgtagatgcccagctccaccatcttggggtccaccatgatcaggcgcacctcgtcgggggtggccttatagagcagggagatgatcagggagttggtgcacaccgacttgcccgagccggtggtgccggcaatgagcaggtggggcagcttggcgatgttgcctacgatgcagtggccgccgatgtccttgcccacggcgaaggacaccttggaggggctgtcggtgaactccctggagccgatgacgctgtggatgttcaccggcgacaccagcttgttgggcacctcgatgcccaccatggagatctggtccgggatgggggcgatgcgcacgccggaggcccccagggccagggcgatgtcgtccgccagattggtcagcttgttcagccggacgccctggtccagctccagctcgtaccgggtcaccgaggggccccgggtcacgttgacgatgttggcgtcgatgccgaaggagtggatggtgtcatccagccgctgccggttggcgttgagctccaccagggcctccccgccgatgtcccccggtccctccttcagtagggagagggggggatactgataggggtgctcccccgcctccgccagccgggactggacatcccgggccacctcctgggcggcctggcgtgcctcctcccgggagaccttggccggctccggctcccgggggctctccccggagaggggggcggccggcggggcgggcgggacagacgggacaggcgcgggggccggctccggcgcctgccggaccagctccgcctgggcgggctctgccgccggctccggcaccggggcgggctgctccgccgtccgctgctccgcccccgccagcacctggtccggagcggggacatttgccttgcggttgaaaaagctccccttctttttcacctcgggagcggtctgggccgtcttgcccaccagggggccgtcctccaccgggatgtcgatgtccgcccggcgggagggggtccgaacgggctccggggcggcgggccgctcctcccgcttgctccggcgcgggcgctccggctcctcctccggctcatactcatagcggggcccgtcgaagatccagaccgccacctcggccacggagtggcggaaggcccccagtcctgccagcaggaaggccagcacgaacaggatggtggagcccaggcggctgaacacctggacgctcccctgggccagcacgccccccagcacgccgccggaggtcagctcctcccccgccgcccacagggtcttcaccagggcggcgtcccagggcaggaccctgcccagcagcccgtggacgatgcaggagaagagcaggggcagcagcagggcgcaggtcacccgcaggcgcaccggccgcccccggtggaaggccaggatataggccgccagcagcagggccggaggcatcagccagaaaccatagcccagcagacccttcagcagtccggagaagaaatcgatgaaaatggcctggatgtggaaatagcccagcgccgcgaacagggccagcgccagacacaccgccgccccgatctcccgacgcatgggccggcgggccggcgctttgctcccgcggctgttcccccggctgctgccggaggcactgccgctcctgcgcgttcccccggaggaggtgcgcttccctccggtcttcttttgtgatgcggccatgtgtccgcctccctttccggtcaatcaggtcttggtccggggcgccctcacagccccgccaggctggcggccagggagatggctcccgccgcccagcagtagtaggcaaaggcgccgaactttcccttgcccgccagcaggttcaccaggcggatggcgaagtagcccaccacgccggccaccagcatgcccaccagatagacgggcagaaggctggtgtcgatccccgcctggaccgcgtcgatcagctccagcagggtggcgccgaagacggcaggcaggctcatcaggaaggagaaccggacggcaaaggtgcggtcatagccccgcagcatccccgccgagatggtgatgccggaccgggagatgccgggcagggtgcccagcgcctgggcgcagcccaccagaagggcgtccagcacagtggcagtccgctccgttttccgcccccgggccatccggtcggagaaaaacaggatgaagccggtggccagcagggcgaaagagacaaaggtcacgttggacatggccccctccacaagatccttgatcggcagcaccacaaacaggggcagggtagccacaatgatgagcagcaccagccgccgggcggggggcagcttctcccggccccgccgtcccctggaggccaggtcccggatgcccaggaaaaattcccggatcatgtcgatgatgtcctgccagtagtagacgcacaccgcgatcagggtggcaaagtgcaggagcaccgtgaaaaacatctgggactcctccacgttttccatggcgaagaagtgctggaacagggccaggtggcccgagctggagatgggcaggaattccgcgatcccctgcaggatccccatcaagatcgacatccaataggtcaaaacgatgtacctccgtgaaactgtcatactctgtcccgttccccggaagagtcccctcctccggaaacaggcactttattatattagcacaagcggggagggaattccagtctttttcctccaaacttatgtcaacttctcgtcttttcccctccaggcaggagaggccccgtccggcccaggctggacggatggaaaaaagacgctgtccgtccgaacggacagcgtccctctcacctgtccggcccggccggcagggtcatctgcttatagaagtccagggtgcggaagccccgttccagctgggtgagcagatacgcctcgctcaccccggccagctcctccagggccccgctgtccagccggaaggaaaacagccgccgggcgtccccgcagaccacatgccgcatagcggccaggacggggggcgagaccggcatggagatcccctcccccacaccgcctcggcatttggcgcagtggagcgccccctcccgcaggtggaagcggggctcctccggccgttccgcgccgcagacggcgcagccgtccaggatgggctcatagcccgcagcgcacatcagccgcagctcaaaggccgccttgaccagggccaggggcttctggggcatctggtccagggcgtacaggctgttgagcaccagggagagcagctccggcgccggcacgtcctccaccgccagcgcctccgccgcctcggcgaagtagcaggccagggccagccgctccacatcccggcgcagccccagaaactcccgctccaccgccgcctccttcacggtccagcggccccggtactcatacagcaccaggtccgaccaggccagcagctggaccccggcggccaccgggctccccttcttacggcagccccgggccgaggcggtgagcttcccgctctcctgggtcagcagggtcaggatcttgtccgactccttgtaatccaccgcacggaggaccagcgctttggtgcgcatatgcatctcgtccgctcctctatgtatctccggccggtccgccgagggcgggccggccgggcagttcacatatcctttttgtccatcatgcccggcacagacgggggcagagtcccgccccccggcgctccgggagggggcatgggagggaagaccacttcctccccctccttcagccgggccgccagataggcctggggcagtccggtggcaaaaaagaagttccaaaatccgctctgttccatctgtcttgccctcctgtctctgctgcttaggctggcatctccagtggaaaacatgcgcggtaatttttaggcccggtcttttccctcactcatcccggtatccgaagttgcggatcagattcacgttgtcgcgccaattttcttttactttcacccaggtctggaggtacaccttggtccccatgaatcgctccatgtcctgccgggccagggaggacacctttttcagcatggctccccccttgccgatgatgatccccttatggctgttcttctcgcagtagatggtggcgtcgatctcgatgacctcgtcatcccgctcggaaaacttggtgatctccacggcggtgccgtgggggatctccttgtccaggcagagcagcagcttctcccgcaggatctccgccatcatctggcgctccggctgatcggtgaccatgtcctctgggaagagctggggcccctggggcagaaacccgtccagtacgtccagcagctcctccaccccctcgccggtcctggccgagacagggaccacggcggtgaactcatgggcctgcccgtaggtctggatgacctccagcagctcctccttgtgctccagggtgtccaccttgttgatgaccagcaccgaggggcagcccagggtcttgatgcgggcgatgagctccgcctccgggccgccgacgttggggatgggctccaccagcagcatgaccgcgtccacgtcggccacgctctccttcaccacgttcaccatgtagtcccccaggcgggtgcgtgccttgtgcaggcccggcgtatccagaaagacgaactggctctccccccggttcagaatggcgcagatccggttccgggtggtctggggcttgttggagacgatggccaccttctcccccaccagggcattggtcagggtggacttgcccacgttggggcggcctacaatagagatcattcccgattttttgatggacatagcgtttgttcctcaactttcttttccggcggtgtgagcactttccgccttatgatccgttccccgctccagcagctggtccagcttctcctccatccggcggagccggtctgtctcctcttccagccggcgccgggtctgctggagccgctcccgcagctgtatgatcagcgccccggccagggccaggagggcggtggccagcagaaagcagaccatttcctccccgatccaggaggccagcagcccgccgaaaaagagcagaaatccgccgccaacagccagcaggagccacaggacaaaaaagttggcgagcatcgttttccctccctgtttttcatggagcgccgcccgctgacgggcgggcgcaggtcctttaccagatgcccagcaggtgctgcatgcccaggctgacgcaggtgatggccgcccagcaggtgaagcccagcaggatgggcttgcctcccgtcttcaccagcttgaccacgtcggtgttgatgccgatggccgccatggccatgacgataaagaacttgctcagggtcttgagcagggagaaaagctcattggcccccgccagggcgggaccggagagcacggcggtgaccaccgtagtgatgacggaggccagcacaaagtacaggataaacatggggaacaccgacttggcggacaccttcacgccgctcttcccgccggccttctccgcctggcgcacccggaagagggccagcgccagggtgatggggatgatggccagggtgcgggtcagcttgacgatggtggcatactccagcaccgcgccgccggtgttgtgcagggtgtcccaggtggaggcggccgccgtgacggaggaggtgtcgttcaccgcagtgccggcgaacaggccgaagccggtgtcgctcagcccgatggccccgcccagggtggggaagatcagggccgccagcacattgaacaggaagatcaccgagatggactgggcgatctcctcatcgtccgcctcgatcaccggggcggtggccgcgatggcggagcccccgcagatggaggagcccacgccgatgagggtggcgatcttcccgggcatatgcagggcccggctcatgaggaaggccacgatgagggaggtggcgatggtggacaggatgatgggcagggaggtgagccccacctcaccgatcttccgcaggttcaggccgaagcccagcaggatgaccgcgtactggagcacctttttggaggtgaaggccaccccgtccttcaccttgtccttgtttttcatcaccgcgcacagcaccatgccgaacaggatggccagcaccgcgctgcccacgatctccagagccggggccagctccaccaaaaaccaggccagcagtgccaccgccaggcacagcagcactccgggtgcccttttctgccaaatattcatctctttctctcctagatctctctttctgtctcccgcggccggccgccggcctctccggcatttcgggccggtgcgcctctgcgggactgcttattgtaccacaccggcccgccccgcgcaatcccctccgggcccggcgggacattttctcccgcttccccgcgggacgtggcctctcatccccggcggatgcccagcccctccaggatgtgctcctcccgccggcgcatctgggccttcatggggccttcgtccatgtggtcatagcccagcagatggagcacagaatggaccgccagatagctcagctcccgctccacactgtggccgtactcctccgcctgggcggcggcccgctccagagagatgcacatatcccccaggggcaccagcccggtgtccgggtcctcgtgctcttcccccggcttctcccccggagagaggtcgaacatggggaaggagagcacgtcggtgggcctgtccaccccccgcatgtccagattcacctgatggatgccctcgtcgtcggtgaggagcacgttgatctcacagggcaggtccatcccctccgcctccagggcggcggagatgacccggcggagcaggggctccacagtgtccggggcctccacctccgcctccaggatgatccggtgctccggccccgccggaggacatgtcccccggttgacctcccgcgcatcggtccggcccgccagatagtccagggagacgccgaagaactccgccgccttcacaaaggtgagaaagctgggggcgttcccatccttctccaggcgctggtaattccgccatgcgatggacaggtgctctgccgtctgcacctgggtcagaccgcgctccttccgcaggcgcctcagccgttcattgaatatcatttgtacccgcctccattgatggatatcgtatctcttcctcccgctgcatcgtttctcccggcgggcgcgcgcaccctgcgcgggggctcctcagggcgggacctctttgggatgcccgaggtcagggccgctcccgcctgtcctttttgggaccgcggcgctcctcgtcctcctcataggccttgatgatccgctggaccagcacgtggcggaccacgtcgctctccgtcaggcggcagatggagatgtcctccacccccttgagcacccgcatagcctcccgcaggccggagaccttgtccgcgggcaggtcgatctgggtgatgtcgccggtgatgacgatcttggagccgaagccaaggcgggtgaggaacatcttcatctgttcccgggaggtgttctgggcctcgtccaggatgatgaagctgtcgtccaaggtgcggccccgcatataggccaggggggccacctcgatgttcccccgctccagatacttgttgtaggtctccgcgcccagcatgtcgaacagggcgtcgtacaggggccgcagataggggtccaccttggactggagatccccaggcaggaagcccagccgctcacccgcctccactgcggggcgggtgaggatgatgcggttgacctccttggcccggaaggcggccaccgccgccgccaccgccagataggtcttgccggtgccggcggggccgatgcccagggtgaccacgttcttcttgatggcctccacatacttcttctgtcccagggtcttggccttgatgggccgccccttggcggtgacgcacagcacgtcccccgccagctggctgatctggctctcgttgccgctgcggaccagctggatgatatagcgcacgttctgctcgttgatggcctccccccgggaggagagggacatgagggcctcgatggccttgaccgcgtacatcacgttttccgcgttctcgccgctcaccttcagcatggagtcccggctcaccaccgagacctccatctcgccctcaatgatacggatgttctcgtcaaaggagccgaacacgttgatggtctcctccagccgctccaggctgatgctctgttctgtcatttgcaggaaatctccttacttgttatggttgttccggggcgctgtctccggcgtccggtgccgcgggcacctcccggccgatctcctcccggcactcggcggtgagggtgacctccagccagctgtccgccgcccgggcggtgtagtaggtggagaccacccggccctcctccccgatctgctccttcagctgcgccagcaggcgctcctccagcagagtctgggcggcggtgcggtccacctccgtctggacgggctcataggcccggtaccgctccaccgtccaggacagggggagcgtgagcccgccgggcagcccggcctggtacactgtacttattttatcataccagggccaggaaatgccagcgttttgataaaattccacgggatatcccaggaccgtcagggtaaagcggcttttttcctctcctgtgtacgccttgacctgggcggtgagcgggatggacgcggtgagggtgcgccaggtcctggcctccacccggccccgggcgtgggtctggtagtagcgcaccggctggtcgctgtacatggggggctccatgctcaccgtgccgctgatgaggatctccccctccgtcactgtgtccccctccttcaccgccgcctccccgtccatggtctccacccgggtcacgatgccgtccgcctttgacaccacgtggtagtggccctcctccttggtcagctcggggggctggaccgcctcccgcacctgcacctccagccgggtgccgtggaggttcagggacatccaggacagctcatccagggacagcagggcctcctcggcgatctgccgccgctccagggccggaccgtatgccccgggccgcacccccagccgccgcagctcgctgaggatcaccccagtggggacggtctcgttccctgtcacctggatggtgagcacgaagctggacaggatgcacaccgctgccagggacagtgcgaaccccgccagaaaggcataccgggtgcggaagcgggccagaaaggcgggcaggcctcggctcccctccgtctccacagtgcagcccacccgctccgccagcttccacagctgcttccggtcctcctgccgcaccgtcatggacagggtgtgcccatcccgccactccagggcccagaaggagatcccattctgggcgcacacgttcatcaggcgctccgggaagggcccccgggccaccacccgcagctccccccgcagccggttcacaatccactgcacgcgcgttccctcccctcaggccagctggatgccggcgatgcggccggtgatgagcagctccagcccggtcatggcccgcagctccagcccctggccggtgatctggatgacgaaggccccgccgctgacgtggatctcctccgttccgtaggccaggatgccccggtggttctcgatccgcagctcccggtcccctaccagctccaccttgggcagtccggccagggcgtctgcaggcagatcgaacagctctgccgtcttttccaaaagcccctcccggcgcggttttttctccatggcgcatcacctctgcttatgtgtatgagggaggatgggaaaagttgtacccgatttttccgcgccggccccgccccagcagggcgggcagtcccggacaggaacagccgccgcccggtttccgggcggcggctgtcctcagcagtcccacggggctgctggccgtctttttctctctgttcatgggagcggcggcgcgggatgggcggccagagcgccgcctcacgcctcccttcgtatctccggctcctccgggccgcccttgccccgctcctccccattcagctttccctccgcccacaggcagaacaggtcaaggatcagcgtcaccgccagcaggagggcggacacccaggccaccgctccgctggtgtccatcagggcggaccagtcctggagctccaccagatgcttgttgtagaggacctgcaaaaacagggccccggcgcaggccgccatgctgaggagacaggccagccctgcccggtccccgcccggctttctccgggagaaatacaccgctgggatgccccaggcggtcaggcccagcagcaggctccccaagttcatccatccgtaccccacttcattcgtcctttctgtgtcctggagtttttgtcctcccataggtctcccccaaaggggcggccgtttcttcggggcccgtttttctccgcagggtccaattccctcatcgggccctgtgcaccgccctccggcctctgtgtagggcggggcctgcccctagaatgacccagaagggtcccgcccggtggctgtggcgcggaaggaagacccctcatccgtcacggcatccgccgcaccaccttcccctcccaggggggaaggctttggactggggacacggcagcgccgcaccacccttcccccgagggacaaccttggtggaagtttcccaaagtcatccctgcgggatgccttcggtctttgcgtaggggcggtgcttgcccctccgtcccattggaccggtccggcggaaggcgccccctccggtcagccggcgtcttcaaactccacccggatcacttccccgtcccggaactggagcaccatgacctcctcccggccgctgttctcccggcccgcgccgatgtagtagccgtcccggtacatccccacctccgggtcctcccgggtataggggtgctcccccagcagggcctgcacctccgccaggtccatgccctccagcccgtcgtactgctccagcaggctgtctaccagcacgccccggtcatccagctcctcccaccgggcctgggtgaaggtctccggctcatagaccggctggggcagcatgcggctcgcccacagccacaccaccgccgccgcggccgccagtatgaccaggaccacggggacggtcagcactgccgtcagccccagttccagagcccggcccgccgccctcttcatttccgctgcgttcatcgctgtgttcctcctctctttttatgagacccgccaacaggccaggggctctccatgcacgaacaaatttacataacgccatcccacctggtggagcagatccgcatcccggaccaccagggtctctcccgccaggcggaccacctgttctctcccgccgcttcccacaagccccgctccggcgcaggcggccgcccccagcagggctgccgcacagcccaggacgcacaccgctgtcacccagtctttccccaggcagagcgcccccaggccccggatggtccctgccagcaggaggaccgccagcccgcccccggtcagagacagggcggtctggacccacccccgccagaagagcccccgttcttccagcagggcaccgcccccatactggaggaccagcacacagcccagcgccgcggccaggatggccagccgcctctgccctggggctctcagatacaggcaggcccccagcgccgtcagggacagcacccccagggccgcccccaggccggaggcggtaaaaaagctgagccagctcacagtgtccatccccgtcacctcccgggccccagctcctccccccggaggagccagctttcatatcggcagaccctggggcactgatggctcccccggtcgatccccctgtactccgccaccacggtctgtccctcccactcgctgactcggtcataatcccgcaggaaaaagacgaacaggagaaggaagagcgccagcgtcagcagggccgcgccgccggccagacccaggacgatctccggccagcgcccccggacctgggggcgctctcccaggacctggagcccataccagatcccctggaagaggaggacgcacagtgccagcaccatcaggtttcggacccagcaccgccagcccaggccggccagcgccagcaggaagccgcccccgtaccggactgtcaggaccgccgccgcccccgccagggcccggaccatccgccgccgctccactgtctcagtcctcccacacatagacctgctccccgtggacgaaccagtttacataacggtatccagtctcccggaaaatgccgctgtactccgccaccacggtctgcccctcccactccctgacccgatccctccacagccccagcatggacagcagcccaagacaggccgccagcaccagcacagtcagataggagcagatcctgcccaggctctctgcccccgggagcagcgtatgcagctcccggggcaggaggagggccagcgcagccgcggcgatggcagctgccgccaccagtccgccggacacccaccgccgccagcccaggcccgccgtctccagcagggcgccgccccccagccagaccgccagcaggagcaggacggccccggccagaagggccagccttcggcgcgcccggccccgccccagaagcagacactggcacagcatgcacagctcccccgccatggtcaggggcatcaggatcaaaagcagcatcaccacaggcatgtgtttcctccagagtttaccatattatagtttatgttaccttaaaacgcacaccgggccgcgccgttggagcggtcagaaccgcatctcaaagcagaaccacccgggctccagcctgcgcacaaagcagcggttgtcgccccccgcctctctccagagccagccgccgtcccagggctcccagcccgacagcgccgccccctggaagcctgtcaggacgtctgagggcacatggctgatcccccaatagctggtggaggggcccaccccccagcctccgcagaggaactccacggtctgggcccgcccctcccccgccgggtagagggtgacctccgtcacgccccggggcagctccgccggcccattccccgccagcagctccgccgccgcccggtcgaactcctcccgcccggcccggaagagggcctccgcccgttccgccggagggtccccggcggccaggcccaccagggccaggcagagcagcgaggcggccagcagaaaggccagcgccctcttttccctccgctccatcccgctctccctcctcaggtgtcaaattccagataggacagggtggcggcggcgctgtcgtacaccgccagggtgtagttgaatgaggatcgctggaacatgctgccctcccggtcctcctgccggtccagcagataccaccatccgcgctccggcaccgtccagcccgccagctccgccgccccgccccggtagaggaaggactccatcttgtcgtccatggggaaggggttccacctgcccgagggatggtgggacaccgcctcctccacccgggccccgtcctccggggagaaggtcagctccgtgtggagcaggccgtccccgtggaagccgccgtggtcgtcataggtgtccgttgtctgggccgtggggagctccagctccagctcccgggccacatagtcgccgggcctccagatggcgctccacagcatcagaaggaccagcagaatgggcagcgccttcatcggtctccctcctccggcacgaattccagaatatccccgggctggcagtccagggcggcgcagatggcctccagagtggaaaagcggatagccctcgccttgttgttcttcaggatggacaggttggccatggtgatgtccactttctgggccagctcccccagggacatcttgcgccgggccatcatcacgtccaggttgactacgatcttcatgctccgccccctcagatggtcaggtcctggtcctctttcagctccgccgcctggcggaacagggcagacatcaccaggaaaagcaggcccgccatcagcgacaccggaatgaacaaggctgtgaaggtgaacagcggggctgcgctcctcagccgcaggaaccacaccgccatccgcactgccgccagcagggcgatgccccagcagctggccgccgcccgcttcatggaccgggcattggaccgctgaaagggagtctgggcgatgatcgtagacaggatgcaccgggcctgccacaggagcacggcggtacagatgccgcagcccaggaaaaaggccgcgctccaccacacctccggcccgtaccccgaccagtcgcctcccagcatggccaggggccgcaccaccaggatctcccatgcgggcacaccagcccccagcagggagcgcatggtccccatcagggagctgatgctggggtgtcccatccccatcccctcataggccatcatggtatagcccggcaccagaggcaggaccagcagattgaagacaaataccgccagcaccatcccatacaggaccttagccatgcggacgaccacgttgtgttccatgagcgcggctccctcctttgtaattgcccatatcctaccaccttaaaacacgattgtcaatatatttttatcgtttttcgataaatccaaagggaaaagaaacctccggacgggggagtccggagacgcatcccttcaaaaaccgctctctctttctctcaccagcgcacgcggcgccacactgactgttcctattacagagataactgtttcttttccattactatctctgttactgttacggggccctatttgcacgggatcgtacaaccagagccccccgccgcgccggggtgagggggccgtcatcccgccagtgccccgccatagcgccgcagctccttccgccgctgccgccagtccggcatcagccggtccatcagcccgtaaaagcccggcccgtggtccgggtggacaaagtggaccagctcatggagggccacatagtcccgcagggtctccgggcagcgggccagggcggtgttcagggtgatgtagccctgccgccagtggcagttgccccactggctcttcatacggcgcagcctcagctccggccaggccaccccaaggggctgcaccagaggatagacccggtccagcgcctcccccagcagccgcaggcactcccgccgggcgggctccggcggcagctccggccccggggcccactgccgctccagcgcctggatgatccaccggcatttggcccggaccatggcgtccgcctcctctgccgggcagcccagcggcatcgacaggctcacctgaccgttccggacccggaggttgaggtttttcacccgctttcgggtgagcagataggagatgggccccgccggagtgtccgtgatccgcagctgctccatcctgttccgccccctctctgtacccagtctttccatggaggataacagaattttggagaaaatgcaagggcggtgagtgcctcagctccgcccggtgtgctccccccataccgctctcccggcggccggttcgggtcgtacaacggcgcccctctcctcagcccctgtgcagggcggcatatgctgtgccggatgaggagggcaatcgccccagaaggccgggcgggtctgggcctcgcccctgcacaggggccgggaggggtgcgcaccatacagggcccgaagccacggcacacggcccgtgggccggcatttctccccaaacaaaggccgcgggcggcctgacagccgcccgcttctcccattttattttccctgctgggcccgccagagggcctggacctgcgccgttcccgccgtgtaccatccgggctcctccgccgtctccacggttcccggctccggcaccacgctgctcagcacaccggcgccgccgccgctgccgtccggggctttcagcccttcaaaccagccgtagtcctccggggtgccccccaccaggaaatagtggagcaccccctccccgtcggtgtaggtgtggacgtagggggtgtcctcgtccaccagatcggtgatatcggtccgctcgccgccggccacgaaccacagccgtcccgcttccagagagaccaccagcggctccccatcttctcccttcccgtccgacatggtgacggacccatagccctctccgatggtcacctggcctccggaggccatctgatagatcctctctccccaggtccaggccaccaggcccaggcaggccgccgcggccacggccgcgatcacggcccggcggagcttccgtcttctccgtccggccacctgtcccagcacccgctggcgcacccgctccctatccaccagtcccggctgggggacaggctcactctcctgatcctgatactcgttcatcaggcttgagattttcagcttcttcaacacaaaaccccgctttccgcaaatgttccttcagcttttcccggccccggcggagccgggtcttggcggtggacgggttgagccccatctcctccgccgcccgggccaccgtctggccgtagtagtagtgccggacgaagagctcccggtccggcctctccagctctcccagggcccgccggaccagctccgcctgctcccgctcctccagcaggcgctgggggccgtcctccgccagacagagcacgtcctcctccagtgccaggacctcccggctggcccgcaggcggttcagcgcccggttccgggccacctttcccagccagccccggatctgctccgggcgcagcgccttccggtgctcccaggccgacaggaacacgtccgctgtcagctcctcccagtcctggggccggccgggcagcacccgggcggccaccgcggccacatagggggtatagcggctcatcagctcctccagcccccgggggtccccccggcgcagggcccgccacatctcctgttcctgaatgggtgtcacatcctttccctgaaacgcgtttcacccctataaacacagaagacgggcttttggtttcaatttgcggcgtatttgtctgaatcttgcctaccagcggtcgtccaccttctccgcgaagcccagaagctccttcagccggaccgccgtgccgtcgtccagcaccgcggtgccggtgaagctgccgaacacctggtgctggccggaccgcaccacaccggcactggggcaggccgcccggtccaggatggggcggaacttcatccgaaagcgccggtcgtcgctgtcgaaggtccagggggccaggtagtgctcccgtccgttcttccgtgggatatggaaggtcacctgggagagcttgtggagtttcccgccataaaacagggcgttctccgtggcggcggaggtgtctccgaagccgtatccgatgttgaagccgaatgggaccccgtccaccatgccggaggcggagccccagtaccaggtgctgcggcaggtccacacccctctgccccagtccagcaccgcgaaggagtcctccgggtcaaagacatactcccggtcccccagagtgacctttccctgggcccgcatgcagttgatcttctggttgaaatagaactgccccggcttttcaaagggcgtgcacatcacgatggactcctccggctcctgggtgagcaggatctgggcgtccagcgcctgcccgtcccggaagcggtccatatgggcgtggagggtgcgcccctctccctcatgctggaacagcaggccgtagccccgcccggccctggcgcagctgccccggagagagctctggggcagccctgtcccgcccagaggcatgagccgcatggggctgcgggtcacctgccatccctcccagaggtcgatcagggagatggagtccatccccatgtagcggttgtccgaaatggtgagggccagggcgcactggcggttcatcaccagatagcagtccctctccttcagacggagagggccgcccctcaccttggagcggtcgtacacaggcagcagcctccgggcccaccccggctgggtcagctccccctgctcgtccagcagcgggatggcctgtgtgatctcatgctgcatcagtcgtgcctcctttccgccggagtcccgccggcgttccacagggctattttaccatcgatctcagggaaaaggaagggccaacgggggccgcacatccgtgcggcccccgttggagactctcaaaaaaggcacaagtgcctttttcgagaagaggctgcatggcgtgtgggactcgatttcatgtgaaatagtcgccccgcccgccatgagaagtgtcatttccgaggctcatgtcctcggaaatgacggattttgatttcattccgtcgcctgcaggcgacggaactctgcgaggcttcacgtgggggaagtttttcgataagctgagcgcgcgggccagaaggtccgcgcgctcagcttattttcccgttacagcaggccgatccggcccagcggccacagcaccgccaccgcctgtcccaggatatagtcctcatcaatggcgcccagccactcgtgccggctgtcggtggagccgttgcggttgtctcccatgacgaaaatggagtcctccggcacctcgaagtgggtctcctgcatgtggctggaggagggccacagcatctcctccagaatatagggctcgtccagcacctgtccgtccaccgccactgtgcccgcgtcgtagtcgatgtccaccgtctgtccctccagggcgatgacccgcttgacgatggcctccccctccaggaagtcggcagtggtcttgttcagcaccacgatgtccccctgctccggctcatagcccagggaccacaccgccagcagctctccgtccgccagggtgtcatccatggagtggcccaccacccgggtgatgcgccccaggaaggtgaacaccagtacgatgcacacgatggcagttaccagggtctggagccagtaaaacagctcctcctggggcagcttctcctgctcctccgccccctcctgagggggctgctggggcgctccggcccgggcctcaaattcttccgacattggcaagctcctcccgctccgacgggcggagcgcactgtgttgatcggtctcttattataccggctcccggccgggattgcaagggaaattcccgtcacagcagccggaggcggtccaggggccagatcaccgccaccgcccggcccagcaggcagtcccggtgcacgctgcccaccccgctgtgccggctgtcggtggagccgttgcggttgtcccccagcaggaacagggaatccgcctccacctggaaccgcgtcccctgcatctccggcttttggggcagggccatgggctccagaaggtagggctccgccagggcctgtccgtccaccagtacccggccctccccgtagtccagctccaccgtctgccccgccagagccacggcccgcttgacgacggcctccccctccaggggttccgccgtggtcttgctggcgatgacgatatccccggccctgggctcatagcccatggaccagaccagcagcagctctccatgggccagggtggggtccatggagcggccgtccacccggactacccggcccacaaaggtgaacagcagcaccatacatacaacagccgtcatcagggtctggagccactcgaacagcccccttcccggctccttctccgccattgctcccctcatgcgcctcctcccctcagggcggtgcgggtcaccccgggcctgccctccaggtagtttccctcccgctcctggcaggtgaacagcaggatctgccgctcccggcccagctccgccagggcgtccagggccagagccatccgccggtcgtcaaaggtgaccagcgcgtcgtccagcaccaggggggcagggtcctccccgggcagacagagctggcacaccgccagccgcaccgccagatacagctggtccactgtccctcgggacagtgccagggaccgccggggcagcacgctgtcccgctccagggcggccgcctccagttcccgggtgagggagacggcagcgtactttccccccgtcaggcgggccatccactcccccgcccgccggttcagctctggggagaagcgctcctggagctgggtgttggcccgcttcagggcatccagggcgatgctgatggcctcatactccgtcttccgccggtccagctccccctggagctcctcccggcgggcggccagggcagcggggtcacccaccgcccgctgctcccccagggccatgctcctcagccgctccacccgctccagggcggcggtgacggccgccagctgctcctccgtctcctccggggggcgctccggccgcgtcaggccctccggcatggcctccagggcctgcccgccctgggccgccagctcgtcaaacagccttctggccccctccagcctggtccgggccagaccctgccgctcctccaggttcagggcccgggagagggcggcggagcagccaaacaggtcggacacctccggggcaaaggcgtggacaaaggagagcagatcgacccggctgttctcccgccgggctttccggtccgccagtgtctcccgcaccaccttcgcctgtcgggaggcctcctgggctgtttcgtcccggcggcggtagtcctccgccagggcggcgatctcctccccgctgcccgccctataccgggccagcacctggtccgcctgggcggaggcccgccccgcccggcgcagggccaggactgcggccagggccagcgccccgcagcaggccgcgccgcccaggagccagggcaggaagctgccgtccagtacggcgcccagggctgcggacaggaccagcagcgccaggcctacactcagaaggaggggaaagcggcgcttctccctacgggcgcgctccagtgcctcccgccagagggccccgtcggcggccgcccggctgacggcctcctccccgctcatcccgttgaagcggtcgtccagagcctcccgccgggcctgctcataggcctcctcggcctcccgcagcgccccctcaccctggcgtatctcctcctccagcaccttcaggtattgcagctctccctgggcccgcttcagctcctcccgctccggcagggcgccgtaccgggcctgctcccgttccaaagcgtcagcctgccgccgggcagcctccaaatcctgccgtgcctgggtgtaccggcggtccagctccagggcatccagcctgcggtgggtccgccgctccgcctccaggacagtcttcctgccctccagctccgccttctccccctccaggcgggacagggtccggttggcctcctccagccgggagagcaccgccccggtctcggccagctccccctccagtctggggatcaggcccacgctcttgttcaccttcctccggttcagccactcccgcagctgcccctccgcctgggaaaaggacacgtcctcctccccggaggaaaccagggcggcgatgcgccgctccagctccggcacggaggtgacggccagggagcccccctggcccacgaaagcggagcgttcaaagacctcctgccccacccccagcaggagctggccgcaggtgtcgccggtcaggccggacaccggctcctcggtaccggtgtagacggcggagaatgccccaaaggggctgttcccctgacgcccccggcgcagggtgatgtcccgcccgtgccaggtgaggaccagctccccctccatgggggccccggaccagggctggtagcggttcttgtccgccagatagcccttccggtccctgtcccgggtatcgatgccgtagagcatggccttcaaaaagcccgcccaggtggattttcccccctcgttgggggcctggatcacattcagtccggggcccagctccagccgcgccccctccagccccccgaaggaggctgtcatgcgtttgatcttcacagtgccacgtcctccccatgctccaaagcggccagtccgaaccggaccgccagctgcaccgcctcattctccggctccgcctgacagcgcccctccatctcccggaggaacaggccggtgagggtgtcctcccccctccgctcccacagggcccgggccgcccgggtatggtcccgcagggtcaggccccagaacctgggggagagctcccgctccagctcccccagatccagcccctccagtccccgctccccggtgaggaggaggcggtagatgtcctcccccgtctgtgtgggcagcgcggccagcacggcggcggcggggtccgcctgccccgtcaggtccacggacaggatctgatacctccggcggcacagggggacgaattccgcctctgtccgccccttctccacctccagccagagcacgcccttttctcccagctcgtcaaagccacgcccctcggggcagccggggtaagcccagaaagtctcccctgcccggcgcaggccgctgtactggtggacatggcccagggccaggtagtccagcccgctggcggcgatgtcctcctccgagatggggccgtagtccccctgggcggccacctccccgtggaggacggccagctggaccccctccgccggggcatgaaagccccgcaggggggaggtgctctgccggggggcgcagaaggccgctccccacaccgtacagcccagctccggcagccgcaccgcccccagctccgggccggtgaacaggtggacgttccccggccactccagcgcggcatagggggactggggaccgtaccagtcgtggttgcccggggccaggaatacggggcaggggatctctcccagggcccgggccagggcctggacggtctcccggaacactaggtccccgtccagcaggtccccggagaggagcaccaggtcggcctcccgctcccgggccagatcggtcagccgggccagcagctcccgctgctcgtcccgccgccgggcggccgcatcaggcttcaggccggaaaaggggctgtccagatggaagtcagccccgtggagcactttcagcatggttccattcctttcttggtcgttcaaaatgggccggtccgccggcatcactcccagaggtccgcccggcgcacctccacgcaccgcttcttctccgtgtcgatggtgaagcggcaggcctccagcttgcaggggccctccgcctcctcataccggcggggcagcccgcccaggaacaggttcatggagtgctccggccggatgcccagcaccgagcggtaggggcccgtcatgcccaggtcggtgacgaaccccgtccccttgggcagcagctggcagtccgcggtgggcacgtgggtgtgggtgccccacaccgcctgagcccggccatccagataccaggccatagcccccttctcactggtggcctccgcgtggaagtccaccagcaccacgtcgcagggggcgccgcggagcagccggtccgccgcctggaaggggctgtccaggttggagttgagctccagccgccccatcaggttcagcacgccgatgcgcacccccgccggtccccggaatacaccgaagccccggcccggcacccggccggcgtagttggccggccggaggatatggccgtcgctgtccaggaagtccgcgatctgaaggcggttccaggtgtggttgcccagggtgatcacgtccgccccggcctccaggatgccccgggcctgccggggggttatgcccaccccggaggcgttctccccgttgaccacggtgaagtggatgtcctcccgctcctggatctccctcaggcggcgggacaggatatcctgtcccccctcgcccaccacgtctcccaccgccaatatgtgaagcagcatgttcgtctcctccctggagcgcagctccgccgcccggcggcccgcctccctcccctttccggggcactgtttttcctattatacggcatgttgccccaaagcgcaaacatctgtttggccgcggcaccttttccggcctcccccctccgagcgccgcctctgtacacaaagcgcccccgccggacttttctgcccggcgggggcgctgtctcttatttagagctgccgtctcagatggacagcgccgcatccagggcgtctccggtggcccggacggcatttccaggggcgctggccgcctcgcccaccaccaggacctggggcacaaaagcggcgatacgctccctcagctcctcccggctgcgggtccccatggccagcaccacgctgtcatatccccgaagggagccctctgtcccgtcggccaggacataatccaccccgtcggggtagaaccgctccacccgggcgccggtgcgcaccagcacctgggattcccggaggtttttcaacagacagcggcggtgctccggccgcacatcagaggcaatgtcctctttcatctccaccaccgccacccggtggccccgctcccccaggaactcggcggcctcacagccgatcatgccgccgcccaccaccaggaccccggcgcccaccactgccctgccctccagcatgtcctgggcggtgacgaagccgcagctgtccagtccggggatgggcgggatcagcggcccggagccggtggccaggatggcagcgtcgggggccagctgccgcagtagctcgggtgtggcccgggtgccgttccggatctccactccggcctgctggcagcggacgatcatggaccgcaccgctgcggagatctgcccctttccggtgggaaaggaggcgatgcgcagggtgccgcccagctgctccccctgctccagaagcaccgcctggtgcccccgccgggcgcaggcccaggcggcgtacagtcccccgggaccgccgcccactacggccacccgctttttctgccctgccgggccccactccagctcccggcccaccagcgggttgaccgcgcaggtgatgggcctgccggagagcatgttgggcacgcagcccaacagacagccgatgcagggggccagggtctccagctgcccgtccctggcccggttgggcagctccggatcggcaatgctctgccgcccgaaggcgatcaggtcggcccgcccctgccggaccagcagctcggcgtactggggctcggtgaagcggcccaccgcgatgacgggcaccgtcaccgcccgcttgatctcctccaccagcggggcgctgaagcccccgtggaactgtcccggcgcccacatgaactcgtcccgcaggtggaccgcccgggagacatggatggcatccacaccgcactcctgctccagataggcggccaccgcggcggcgtcctggacgctctgaccgccgtccagctcgtcgctggcgttgatgcggcagaggatgggcatgatcccgcccgtcttgcgccggatgttctccacgatcagccggggcaggcggagccggttctcgaagcagccgccgaactcgtcggtgcggtgattggtgcgctcagacaggaaggtgctcaccagatagccgtgggcacagtggacctccaccatgtccagccccgccagctgggcccggcgggcggcgtccccatagcactcgatcaggcggtagacctcgtccctgggcatctcccgggggatctcccgcccgcaggcggcggggacagggctggccgccttcagggggtggccggtgagggcagaactgccctccggccccgcgtgctggagctggacggataccttagccccatagctgtggcaggcctccgccacccggcggaagctgtcgatggtgtggtcggcaaagagacaggccttccgcggaccgcccttggcctgctcatagaccacagcggactcgatggtgatcagcccgaagccccccctggcccgggcggcgtagtaagccagggaccgctggctgaggcacccgtccgggtcggagaagttattggccatggggggcaccacgaaccggttgggcaccgtcacgctgccgatctgaatgggcgaaaacatggtggggaatctcatcgttcagccctcctctgctgcggccgcctgacggcggctcaggatagagacaaagctcaccctgcggtccatccacccgccgatgagtccgatgcacttgcccatggtgaaggccgccagcaccgtgcccacacccagccccatgatccggcccaggccaaaaaaggtaaggaccgccgtcgtcagcaggcagatcacgtcaaaggagatcttgatccgggagtaggccgtgccggtgatctccgccagctcccggggaaacaggtcggtggggataatgggcattctgcagcggttggacagggcgatgccgaaacagatgaccaggtagctgatgcagaagtacagcacccgcagaggcagggtctggggcagccagctgatccagagctcgtggaagtcgatcatgatgccgaagaagaagcccaccacaaagctgaacaggtactccggcacgaaccgcttccgcaggaccatcaggctcagcaccagcagcccctggaagatataggtccaggtccccatggagacccggggaaaaagctcagaaaatgcatagggcacgctggaaatggcggagatccctgagcccgagcggagcatcagcaccacgccaaagctgttgatcaccaccgccagcaaaagggccagctccccccggagcaccgtctgtctctcttccatcattgtcatcctcccgcgccggagcgcatgtttttcttacctacaatgtagcgcagggcgggaaaataaacaaatcaattctttttatcaaaaaatagattttttctataaaatatggtacactggcccaaaggaggggtcctttgtgaatctgtcacatctgcgctactttgtggagctggcccacacccgccactacacccgggcggcggagcacctgttcatcactcagcccagcctgagccacgccatcggccagctggagtcggagctgggggtcccccttttcgagcgcagcggccgcaacaccactctcacccggctgggggaggagtttctggtgtgcgcggagcgcaccctctccaccttggactccggggtggagtccctgcggcgcagcgcccagggggaggggctgatccgcctggggctggtgcgccccctgggggtggacttcatacccgacctggccgcccgcttcctggcggagaatccagggaaagagatccacttcaccttcggcaccggggtcactcagcagctgctggacggccttctggcgcggcgctacgacctggtcttttcctctatgcctccggcggagctggggctgagtgcccggccggtggtccgtcaggacctggtgctggtggtgcccccggaccaccctctggccgggcggaagtccatcgatctggaggagaccctgtcctacccctacgtctccttctccaggggctccgggatgcgggacacggtggacgccctgttcggccagctccaggcccgcccccgcatctcctgcgagacggaggagatggaggtggtggccggtctggccgcccggggcttcggcatcgcggtggtcccccggatggacctgctggaccagctgcccctgaaagtcatctccatcgcccgccccgcctgggagaggagcatctacatggtcagcgacgagcggatctacctctctcctgtggtccgcaacttccagcggttcgtgctggagcagcagggcggggagacggagaccgtgcagaaatgctgatcgacagtctacacggccgcccccgccaaaacgaggccagccgcgctccctttctcctcatatcccggcggccagccggatcacgccgatggtcagcaggtgagccgggtaaaaggcgtaaaagaaccatttggggaccctgatccccgtccgggcggggaggaagatgaagggagccgccaacagggcaaaggcggtccagtccaccgcgtgccctgccgccagcagggcacgggggtcctccgggctcccgctccacagggcgggcagccagaacaggatatagagccccgcccccagccccggccgctcccggcacaggaagaagatcagcatcagcaggatgccgttgccggagtaatcaaaattgaagaggctgacgcacagaaatgctgcggcaaagagccaccaccgccgcgtctggaagccccacatggccagcagactgaggaacagagtgaagaagatgttccagttcatccactccgtctgccagtcccaggggtgggtggccaggatgtaacagggctgggagatgagagcaaagaggcccagccggcccagatatcgcttgatatcccgggtgtagagcagccccaccgtcatgcagtagcagaagatggggaaggccagccgccccacccagcgaaaggcggggtgctctggaaaaaacacggcccctatgtggtccagcagcatggacaggatggcgatcagcttcaaaaaatcggtgtccaggttggtgcgcagccgcggggccggctgacgccgcgctgtcctttggtccatttctcttcctccccccgctccggcgcccaatgccggagcgtcttttgtaggtccaggatagcacaggccgataaaaggcaggtcaaagagagatgaaagttttctgaaaatgggacaaaaatcagggcgcgcttccaaagaagcgcgccctgctcttatttcgcgtactcgatggctttggtctcccgcagcagatgcaccttgatctggccggggtactccagctcgtcctcgatcttcttggcaatgtcccgggccagcagcaccatctggtcctcgctgaccacctcgggcttgaccatgatgcggacctcccggcccgcctggatggcgaaggacttctccaccccggggaaggaggaggtgatctcttccagcatctccagacgcttgatgtagttctccagattctcccgccgggctccgggccgggccgcggagatggcgtcggccgcctggaccaggcaggcgacgatggtcttgggctccacatcattgtggtgggcgtggatggcgtggatgacgccctcgctctcccggtacttcttggccagctccacgccgatggtaacatgggagccctccacctcgtggtcgatggacttgcccaggtcgtggagcagtccggcccgcttggcctcggccacgttggcgccgatctcggcggccagcaggccggcgatgtgggagacctcgatggagtggttgagcacgttctgtccgtagctggtgcggtagtgcatccggcccagcagcttgaccagctcggggtgcagaccgtggacattggtctcaaagaccgcgcgctccccttcggccttgatggtggcgtccacctcccgcttggccttctccaccatctcctcgatgcgggcggggtggatgcggccgtccaggatcagcttctccagggccagccgggcgatctcccggcggacggggtcaaagcaggagacggtgatggcctccggcgtgtcgtcgatgatgaggtccaccccggtcagggtctccagggtgcggatgttgcggccctcgcggccgatgatgcggcccttcatttcgtcattgggcagagggaccacagacacggtggcctccgccacgtggtcggcggcgcagcgctggatggccagggagatgatctcccgggccttagtgtccgcctcgtccttgaagcgggcctcgatctccttgatcttcatggcagactcgtgggtcacatcggcctccagctgatccagcagatacttcttggcctcctcggcggtgaagccggagatccgctccaggacctccatctggctctgcttgatctcctccgcctcggcctgggtggcttccagcttggccaaacggttggagagatgctcctccttgcgctccatgttctcggtcttgcggtccaggttctcttccttctgctgcagccggcgctcctgcttctgcaggtcggcccggcgttccttctcctcccgctcgtactcgttgcgggccttcaggatctcctccttcgcctctaccagcgcctcgcgcttcttgctctcggcactcttgtacgcctcgttgacgatgcgcttggcctcctcttccgcggagccgatctcccgttccgccgtcgccctgcgccgctggtatccgaacaggccgcccagcacaaaggccagcacagccacgacgcccccgatcatatagggtaacattgggtttttacacctccataaatttcagatcttggaacctgcgttccctgcggcggaccgccgcggctgccttttcggcataaaatgagccgcaaggcgcgccgtgccgcacagcggcggagcatccttgcgacaactgaaaaacttcccccatgtttttcatttgtgtcctgttcatattgtaaaggcaactgcggtctctgtcaagatttattcacatttaccacaaatttattgtcagacatttttactcttttcataacgtgctcccatatttcgacaaattttttatttattttgccggcatttctctcatattttttgcttgggggattttccgctccgcccggagggcagaaaaaggcccggcacgccggatgggcgcgccgggccttcccgctcagacctgctggggcagggagtcatcctcccggacccagtcctccacatggactacggagtactcccgctcggtgtttcggatgaccacccggtctatgcccgcgttgatgatgaggcgccggcacatggagcaggaggtggcgtcatggagcagctcgccgctcttggcctcccgtccggccagatagagggtggcccccagggtgtcccgccgtgcggcggagatgatggcgttcatctccgcatggaccgagcggcacagttcataccgctctccgctgggcacattcatggcctcccgagtgcagtagcccagatccatgcagtttttccgccccctgggcgcgccgttgtacccggtggaaacgatctcgtcgttcttgacgatgatggctccgtagcaccgccgcaggcaggtggagcgctccagcaccgtctccgcgatgtccagatagtagttctccttgtcgatccgcttcatggccgccctccttttttcgacagtatagcccaatttgtccgtccgcgcaagacagtttacattttgtttacgattggttccttgaccgccgccatttcccgcggtatcatatcaacatgccaaattggcggttcccgctttccagaggaggctctttcatgatccggaatgccattcagcgctttatgtacggccggtacggcggcgaccagctcaatgttttcctgctggtcctgtatctgatcttttattttatttctatctggaccaattttctccccctgtactggctgtctctcgttgtgatcgtctggggactttttcgaatgttgtcccgcaatctcccccgccggcgggcggagaacgccaagtttatgcagctggccggaccggccatcaactggttccacctccgccgcaccatgcaccgggacaaggagcaccgctatttccgctgccctagctgcggtcagcagctccgggtacccaagggcaagggaaagatcaccgtcacctgccgcagctgcggcgccgtcttccaggaaaaaagctgaagatacacgtaccgcccaggccctttcccggcctgggcggtctttttctctaaagctgtttcttccgcaggagccggatgtcctccccaaagaagtggagcaggtggtactccccctccagccgggaggcgatctggggggagtagcggacagcagcctcctccatagacaggttagaggagatgacggtgcgctttccccccaccagccgcccgttgatcagctcgtagagggcggactgggtgaactgggtggtcagctcgctgcccaggtcgtccaggatcagcaggtcacagcccagatagcgccgggtctcgtcccgggcctcccggccgtcgtcgctgtcccggaggaacttccgggcctcgaactgcgcgaacacgttccccgctgtgtcatacaccaccgaatgtccgttctccgacacagtgcgggcgatgcaggcagacaggaaggtcttgcccagcccgggggccccgctgaggaagaggtttttgaagtagaagcggccgaacttctgggcatagttgagacacacctcgtacaccagctccatgttctcccggggggaggtgccccattcgggccagaagctggtgctgtaatagtccatccggaaggtgtcgaaggactgctcccccaggtccagcagcttggacagctcccggatctgctcctgggcgcacagcgcccgcaggcagcggcacatctcagtgcccctccagcccgtgtccccgcacagggggcaggcgggcttgtcatccagggcgtcctccgccagatccatgcgggccagcagctccgcccgctcctgctggagggccaggttcttccgccgcacctcctccaccgtgggagcgcccccctccccccggcgcagggaggcggcaaacagctcggtcatggtgccccgcagctgccggtcgatctccgacagccggggctggcgctgacaagcggcccgccgcagggcctgctgctgctcctcccgggcgcggcgctccccctccagccgggcggtggcccggcgcaggaccgcagggtcatatgacatctcttattcctcctcccgcttcatctgctccatcaggcggcgcatccgctccatgtcctcccgcacccggcgctcctctccgggctgaggagtccgcccctgggtcggcgccccgccccggttccggcgcaggccgtccccggcctggatggccgccacggtgtgcagccccttctcgtgccagcggcgcaggatgccgttcatatagccccagtccatagactgctttttcatcaccgtcttctcataggccaggcgcagggcctcgttgtcaaagcccatatcctgccaggcggcgatataggtcctctcccgctccaccagggggcgggccgggatgtccagcagccgcagcacctcccgttcccgggtgcgcagctgagccagctttttcaggtgggcctccgccgcctccacggtgtcgatgccctgcctggaccaggcaaagccctccttgcgcacctgggagaggaaggggcgccgccccggcccgtacttccgctccgtctcctcgatgcaccaggtgaccagcatcaggattacctcgccgggcagggccaggtggtcatacagggtgagcaggatcttcaggtcattggcagacagccgcttgcccaggcggcgctccacctcgtccgccagggcggagaaggtggagcccacctcctggagggcggcagtgacgtcctgggtggtgtattcggggggcagcgcctcctgaacagggggtgccgggggcggcggagcggcctccgcccccgccattccctgggcggagagcaggtccagcgccccctggagccgctcccggggccagttcaggccggcggcgttcccgtggcccagcaggtagagatacagcagggcggcgtctccgctgtccagccggatcagccgctcggccgccgccgccggcatggacaggatgctgcccggcatcagaggtccggtcatcccatgcccctcccttccacaaaagtctgcgaccattttactctaaaatcgccccggcgtaaacctccaaaatcccaagggcaaaaaaataaaaaattcatggtaaatttgtttttcaagcggcctgttctgtggtataatgattgccatcttgaaacagcagagaccgggaggggcttcacgatgaaaaacaagatcaccgtctccatcgcgggacaggaatacaccatggtagccgccgagggcgaggactatgtccgccgggtggccgcccatgtggacagccagatgcgggaggtcctctcccagggccgtctctcccaggcggacggcgccgttctggccgccatgaacatcgcggaccagtatttcaaggagcaggaggccgccgaaaacctgcgccgccagatcaaggagtatctggaggaggccaccaagctgaaaatggagctctccgaggccaagcgggagatcttcaagctccagaaccacaaataagcgcaggagaggggttccccgccggggacgggggcccctcttccctgcggacgcgccgcctgagggcggatctttacgggaggtgccttatgctggagcttctcgcccctgccgggtccatggaggcggtcaccgccgccgtacagaacggggcagacgccgtctatctgggatatggggatttcaacgcccgccgcaacgcgaagaacttcaccggggatgaagctgcggcggcggtttcttattgccatctgcggggcgtcaaggtgttcctcaccctgaacaccctgctcaccgaccgggagctggccggcgccgctcaggaggccgcccaggccagcgccatgggggtggacgcggtactggtccaggatctgggggtgctgcggatgcttcggcagacggtgcccgacctgccggtccacgcctccacccagatgacagtccacagcctggacggggtgaagcagtgcgccgacctggggatgagccgggtggtcctctcccgggagctgtcccgggaccagatcgagtacatctgcgcccgctctccggtggagatcgaggtgttcgcccacggggccctgtgcatgtgctactccggccagtgcttcttctcctccgtcatcgggggacgcagcggcaaccgggggctgtgtgcccagccctgccggctgaagtacggctgggggaacaaggcagacggcagccccctgtccctgaaggacatgtccctggcaggccacctccgggaactgaggaagatgggggtggcctgtgttaagatcgaggggcggatgaagcgccccgagtatgtggccgtggtcactggcatctatgcccgggccatccgggaggggcgggagcccacggccgaggagctggagcagctgcgctccgccttctcccgggacggcttcacggacggctactttctggggcagacggggccggagatgttcggcacccgtcaggacgaggcggagccccgggagctgttcacccaggcccgggccacctatgagagcggggagaaccggaaggagccggtgcggatgtacgccatgctccgccggggggagcccgcccaggtggccgtccaggacgctcaggagcatctggcctccgtcaccggcccggtgccggaggaggcggtgaacgtccccctgacccgtgagaaggtggagggacagctctcccgcaccggagggactcccttctcctgtgagaaggtcaccgtccacgtggatgaagggctctccctccccctgtcggccctcaacgccctgcgccggcaggctctggaggagctgggccggcagcgcaccgcactgccggagcgccgctgcgagcccttccgccccggggtacgctatgagaaccggaagcagccccctgtctacaccctctctgtgcgcgccgccgaacaggtcagcccggagctgctccgcctcgcccccgccctcctctacctccccgccggggagggggcggcccacccggaggtggtggagcaggcccagaaggccggggtgcgggtggccgccctgctgccccgcatctgcaccgaccgggaggcacccgccctcttccaggagctggaacggctgcgggcgatgggggtgaccgacgccctggccggcaccctggacagtgcccgccgggcggcggagctgggcttcaccctgcggggggactacggtctgggggtattcaacggccagacgctgaaggagcttaagcgcctgggcttccgctccgccactctctcctttgagctgaagctggcccagatccgggacctgtccaaggggctggacaccgagctggtggtctacggccgcctgcccctgatgatcaccgagaactgcatcatccacaaccacagcggccggcacacctgtgccaacgtgaacctccttaccgaccggaagggggagcgcttccctgtggtgaaagccccgggctgccgcaatgagatcctcaattccaagaagctgttcctggcggacaaggccggagactggcagcgcctgggtctctgggcagggcgtctgatgttcaccaccgagaacgcccgggagtgcgtccaggtgctggagcgctacctgggccggggcagctatcagcccaacgactacacccggggcctgtattaccggggggtagaataaagcgcggaacgcggagaggaggtcccccctatgttcagccggcagcgcctgttctggcaccgcgggccctatgacctgcccagcacagaccagctctttctccaggcgacggcggactgctgcgccttccacatggcccgctgcccccagtaccgggccattgcggagcacctgggcttctccccggaccagctgcgcaccatggacgacctggtccgggtgcccatgctgcccaccctgttcttcaagcgccacgccctcttctccatgccccggcggcggatggtgatgaaggtcacctcctcggggaccagcggcaccttcagccaggtgggcttcgacctgggctgcatctgggcggaggtccccatggtcctccggctgggctggcggcaccggctcatctctttccgccccgccaactatgttgtgctgggttacaagccagaccggcgcagctctgccggcgttacccgcaccatgttcggcatgaccttcttcgccccgcccctccgccgcttttatgccctccgctggcagggggagggctacgtccctgacctggacggtgcggtggaggccctggagcggttctcccgctctcccttccccacccggatcgtgggcttcccctcctatctctggttcggactgaagcggatggaagagctgggcatctctctgcgcctgcggcccggttccaagatcctgctggccgggggctggaagcagcactggcagcagcaggtggacaagtcagtgctctactccctggtccggcgggtgctgggggtgggggaggaggacatccatgagctgttcggcgccgtagagcaccccatcttctataacacctgccccaggcaccacttccatgtgcccatctactcccgggtcctgatccgtgacccggccaccctggagcccctgcccatgggacaggtggggctggtcaacctcatctcccccctcatccgggccactccggtcaccagcgtggtcactgacgacctgggctatctcaccccgggggatgcctgcgggtgcggcctgacctccccctacctgaccctgctgggccgggtgggcctgggggacatcaagacctgcgccgccggcgcggcggacctgctgggaaagggggaggggttttgatcttcgccaacggacgcctgctcccggacagccagctgtcccaggtgctggaggagctggaggaggcggtcaatgagacccgcgcctgccggaccctggagccggagaccgtcatctccgccctccaggctgtgggggagcggctggaccggggagagctggacccgctcatcctccggtacgccggtcccggcgggcgccgggaggtggcgcacatccgccccctgctccggcgggaggccctggaatacaagctggccgtggagctgggcatcccgctctactcctttcaggagcggcccttcggccgcacccagaccgttcctctgggcaccctgttccatgtcaccgccggcaatgtagacggcctgcccgccttcagcgcagtggagggcctgctcaccggcaatatcaatctggtgaagctgccctccggggaccaggggctctccctggccgtctttcagctactgacggagcaggagccccgtctggcccccttcctctacgccttccagatcccatcccgggacaccgccgccctgcgacggctggcagatctggcagacggggcggtggtgtggggcggcgacggggcggtgactgccctgcggcagctggccccgcccggctgcaagctgatggagtggggccaccgcctcagctttgcctatctgtcccggtgggagggagaggaggacgctctctccgctctggcggagcacctcatccagaccgggggactgctctgctcctcctgccaggtcatctttctggacacggacgccctcggggagggggaggccttctgccggagctttctccccctgctggagcgggcagcggaccgcttccgtgctgcccttggggagaagggggaggggagcctgtacgcttgggagacccggctggagcacgccgccgaccggctgcccggaaccctgtttcccggccggggctgctccctcaccctgcgggaggaccgggagctggagctctcccccctccacggcaatgtgctggtgaagtgtctgccccagaaggctctgctccctgtcctgaggcggcagaagggccgtctccagaccgcggggctgctctgtccggcccaggaccggcccgccctcacccagctcctcgcccgggccggagtgacccggatcgccccgccgggcagcatgtcccgcactctctccggggagggacacgacggggaattccccctgcggcggtacgtccggacggtggacatccaggagccgtccccggaccgccccatctgactgttgatactaactgaccgcaaaggagccgatcattatggaactgaacgtcaaagccctctcccccaagatcgggacagagatccccgcccccttctacgccagcgccggcgccgccgccatggatctgcatgcctgtgtggaccaggcggtgaccatccccgccggcgggcgggcggtgatccccactggcatcgccatcgccctcccctccgccggctatgtggccctggtcttcgcccgcagcggcctgggcatcaaacacggcatcgcccctgccaactgcgtgggcgtcatcgacagcgactaccggggagagatcctggtgggactccagaactccggggacgcagactacgtcatccagcccgctgaccgcatcgcccagctgatggtggtcccggtggtccaggcccaggtgaagatggtggaccagctggatgagacccagcggggcgccggtggcttcggctccaccgggaaatagagatccgctgagagaggagggtttgggccatgttcggatttttcaaaaaaaagggcggggagatccccgaggaacagcagcggcagcagaggggggctcaggaggggcagacgcggcaggacgccgcggaggtcccccaggagttccgcgccctgggccaggactttctgccggaggagctgaacatcctggccgtcaccggggccagcggcttcggcggcgggcgcagccagggggagaagctgtggaccgcctccatcggcctgaccgcctggatggaggaggacagccctgacatccaccagggtgacttccgcctggtagccctggccgacgaccgtctgatggactatctgcgccagcgggtgccccgggacttcattatcaagtgccgggcccggctctctttggacggcagccgcctgctgatgctggagctgccccagcccggcttcgaccccgacctgaaggccatcctggatgagcagaaaaagcctgtgagcacctgggtggaggggctgggcaccttcaccctgaaccgcactgtggactggttcgaggccaccgtggactggctgggcagcgagatcgccctggacttcgaccggggcgtgccggaggagatggcctccgcccaggagaccggacgggccctgatggccagtcaggcggactgggaccaccgggtgcgctcctatgccgcccaagagctgctctccctggccaacgactgggcggcggacgcccgggaggaggaggacgaggacagcggcgcgccgctggtcacccaggagcagttcatggagcgcatggagctggagtccatccagctgctgccccagggcgggttcgagttctggttcaacgacggggatctgttctggggccactccatccacgtcaccggctccctggagtcagggccggagagcgcccagatggagggctgactccccgcgctccaattcatggaatttcgaggtgttctcatgtccattatcctggcttcccaatccccccggcggcgggagctgctggcccagatgggggtcccacaatttgaagtcgtccccgccctgggggaggagatcgcttccccgggcctgtcccccgcccagctggtggaggtcctctcacgccagaaagcggaggaggtggctgtccaggccgggccggacgatgtggtcattgccgccgacacggtggtggcggtggacggtgccgtgctgggcaagccccgggacccagcggatgccgcccggatgctctccctgctctccggccgggcccatacagtctacaccggggtcacggtccggcgggggaccttcagccgcaccgcccacgaggctacccaggtccgcttccgcccgctgacccagtctgagatctcggcctatatcgccactggcgagcccatggacaaggccggggcctacggcatccagggccggggctgtgtgctggtggaggggatcgacgggaattaccacaatgtggttggcctgcccacctgcctgctggccggcatgctgcgccaggtggggattgatgtgctcaccggaggacaggaggggcgtccatgaaacattttctgcggcagaatggcctgctgctcctgatcatcgccctgctgctgtcggtgctgatcggcatcgtgtccgccgtgatggggggcaacgccgaccctctctccaacgcggtgggcttcatcaccacccccatccgcaatggggtgagcgccgtgctggactgggccgacggcgtgcgtgcctatgtctttcattatgaggagatggagcagcagatccaggacctggagcgccaggtcgctgagctggaggagcaggcccgggagggccaggaggccagccgggagaacgagcagctgagggagctgctggatctgcaggccaagcggagggacttcgtctttgagtccgccaaggtcaccgcccgctcctccaccaactgggactccactctcaccatcggcaaggggagcagcgcgggtctggaggtcaatgactgcgtgatcaccgagacaggcaccctggtgggggtggtctctgaggtgggtctgaactggtccaaggtctccaccctgatcaataccgacatcgagatcggcggccaggtcacccgcacttacagtgccgggatcctggagggagacttcaccctgatgagccagggcaagctgaagctgagctatctgcccgacggtgcccagctggtagcaggggacgaggtggtgacctccggcaagggggacgtgttcccctccggcctggtggtgggcaccgtggaggccgtcttcaccgacccctccggcatgaaccgctacgcggtggtggagcccgatgtggacctggacagcctggtggaagtctttgtcatcaagagctttgacatcgtggagtgacgccgccgcgtttcctgccgtctctctcccgatcttttccgaaaagggggcgcccctgtgacccgacgagaccaaatctataagtggtgcatctacgccctggggctcttccccatctgggtgctggacgcctttgtcctcagccgctatcccctgctggggatcactcccacccttctgcctctggcggtctccgccgtggcggtgctggagggggcccttcccggctccggctttggactggcggtggggctgctctggacgctggcctacccgggcagcagcagcctgctggtcttcggcatggcgctggccggcttcctggtgggcatcgtctcccagtatgccctgaaccagaacttcctgggttgcctgatctgctccgcggctgtcctggccgtgcaggaggtcgtccgcctgctggccggcctgttcacccagatcgcccccatccagtcgctgctccaggtggcggtgccggagttcctctggtctctgtgctggatgcccttggtctatctcatcttccgatccatcttccgccgggtggggggcacccgcctggcgtgacctgtccgctctgaaagggggcgtgcgccatggagaaaaaacaatttcaccgtcgggggctggggatgctcctcctgctggccgtcattctgttcgggctgggctcctccctctatgacgcccagatgatccacggggcggagtatctggcccgctcccagaacagcattgcggagacccagaccgtggaggccgcccggggggacatcctggaccggtacggccgggtgctggtctccaaccgggtcacctatcaggtcgccctgaacaccgacgccatggagaaaaaccgcaacgacatcctcctggccctgatccgcattgcccgggatgccggcgtggagtgggaggacaccctccccattaccgcccacccccccatccgctacaccacggacacccccttccagtatcccaccaccgatgaagagggcagccccaccaccagcctcacccgcctggggcggctggcggtaaagatgaagtggatcgatgaccccaccgccgacggggcccagggcgccccccttcccaccgccgaggaactgctggaaaaaatgcgggagagctttcagctggagttggagggcgcggatatgcgcgccgtggccggagtactgtacgagctgtactaccgctccatggtgaacagctggcctccctatgtctttgcggagggcgtagacatcgacttcatctctaaggtgaaggagcagggcctctccggcgtggagatcgaggccgccaccgtccgcacctacaacaccgaatacgctgcccatctgctgggccgggtgggggccattgagaactgggatgcatataaggacctggatctggacggggacggcacgccggactatgagatggacgacactgtcggcaaggagggggccgagctggctttcgagtcctacctgcggggcaccgccggggtccgggaggtggagcggaataccagcggcaaggtggtgtccgagaagtggaccaccgccccccagccgggggacaacgtggtgctcaccatcgacatcgaccttcagaagcaggtggaggacatcctctcccaggctattccccagctggccagtgaggacacagagggcgcagcctgcgtggtgatggacgtgaaccgggcagaggtgctggcctccgcctcctacccctcctatcacctggccacctactctgccgatttggcggagaacagcgctgatcccctcaagcccttcctgaaccgtgctttccagggtgtctatgcccccggctccacctttaagatggtcaccgctgtcgccggactggagagcgggatcattgagccggataccgagatcatggacactggcgtctacacgtattatcaggacgacggcccccagtgctggtattggcgccagtaccggcgcaagcacggcctggtgaatgtgtccgaggcgttggaggtctcctgcaacgtattcttcttcgatgtgggccgccgggtgggcattcaggggctccaggagtttgccgccaaattcggcctcggggagcccaccggcatcgagctgtatgaggagaccggcgtcatggccggaccggagtacactcagtccatggggcagacctggtacgagggcagcaccctgtcggtggccatcggccaggagagcagccagttcacccccctccagctggccaactacattgccaccctggtcaacgggggcacccggtactctgcccatctcctcaaggaggtcaaatccagcgacttctcccaggtgctttacacctacgaaccggaggtgctggactccatcgacatccagccggagaatctggatgcggtgaaagcggggatgctggccctgaccaccgggaagggctctctggcccgctatttccaggaccttcctgtccaggtgggcgccaagaccggctccgcccaggtgaacgccgagacggaatccaacgctgttttcgtctgcttcgccccctatgacgatccgcagatcgccatctccctggtggtggagaagggcggcagcggctccactctggccagcatcgcggcggacatcctgcgctactacttctccgccgaggagtcccgggaagagaccttgacggagaacacccttatccggtaaaataggggccgctgatcctatcggagtagagccctcttcttcccacacgccccgcttccacggggccgtggatcttcccaaggaggtttccttttatgactgaccgatctttgatccgcaacttttccatcatcgcccacatcgaccacggaaaatccacgctgtctgaccggctcattgagctgtgtgacgccgtcccccagcgggagatggagtcccagctgctggacaacatggatctggagcgggagcggggcatcaccatcaaggcccgggccgtccgcctggactacaaggcggaggacggcaggacctatgccctgaacctgatcgacaccccgggccacgtggacttcaactatgaggtgtcccggtccctggccgcctgcgagggcgcggtgctggtggtggactctacccagggtgtggaggcccagaccctggctaacacctatctggccctggagcacgacctggagatcctgcccgtgttcaacaagatcgacctccccgccgccgacccccagaaggccaagcacgaggtggaggacatcatcggcctgcccgccctggacgcgccggagatctccgccaagcaggggatcaacatccccgctgtgctggaggacatcgtgcagaacgtccccgcccccgccggcgacccggacgcccccctgaaagccctgatctttgacagccagtatgacccctatctgggcgtcatcgtctatttccgggtgatagagggcacgctgaaaaagggcatgggggtcaaaatgatggcctccggtgccagctatcaggtgctggactgcgggtatctccgccccctgggcatggactcctgccagcagctcaccgccggtgaggtgggctggttcaccgcctctatcaagaacgtaaaggacactcaggtgggtgacaccatcaccggcgccgactgtccctctgcagcccccctccccggctatcggccggcccagcccatggtcttctgcggcatctacaccgaggacggctccaaatatcctgatctgcgggacgccttggataagctccagctcaacgacgcctccctgtccttcgaacccgagtcctccattgccctgggctttgggttccgctgcggctttttgggcatgctccacatggagatcatccaggagcggctggagcgggaattcgacctggacttggtcaccaccctcccctccgtgatctacgaggtcaccaagacggacggcaccgtggtgcgggtggacaacccccacaactaccccgatcccggcgccatcctggaggcccgggagccctatgctaaggtctccatcatctctccccccgactatgtgggcaacatcatgcccatgtgtcaggaccgccggggcgtgtttaaggacatgcagtatctggacaccaacctggtggagctgcactactccatgcccatcggcgagatcatctacgacttctttgacgccctgaaggcccgcaccaagggctatgcctccctggactacgagctggagggctatgagcccagcgaactggtcaaggtggacctgctgctcaatggagaccaggtggacgccctcagcttcatcgcccacagggacaaggcctatgcccgggcccgacgcatctgcgagaagctgaaggaaaacatcccccgccagctctttgaggtcccggtccaggcggccatcggcggcaagatcatcgcccgggagaccgtcaaggccatgcggaaggacgtgctggccaagtgctacggcggcgacatcacccgcaagaagaagctgctggagaagcaaaaggaaggcaaaaagaaaatgcgtaccttgggcacagtccaactgcccactgaagctttcatggcagtcctcaagctggacgaggagtgagacacctatgaaaagatcccatttcggcgttatgctgtttctgacaggcagcctcggataccttatcttcagcttgtatctgtcccaaaatcaatatacctataacggcatgacgggcacccttgcagcgctgcttggcaacgagctactgatcccctacctcgttttttgcgctatgggggtcattggatttgtcatctgcctgtacgaggcctttatccgtaaaccttaaggatatccctccctgccaaaagcaccttccctcccgcgctgtcccatacgccggaggaaggtgcttttttctctccagcctggtgttccagtgtcaggataaaaaacttctatcaagaccattgaaatgaagtattggacgggagaggaagaagtggtataatggcgacagtaaggaaagctggacggaggtccggcaaataataaggaaaaggagatcattacaatggcgaaagaagtcactcctgagcagatcgaaatgctggacgggatggtcgctaaggcccgcgctgcggcggagatcatcgccacctatgaccaggagcgcgtggaccggctgtgccaggcggtcgccgcttctgtgatcgacatgaaggtttgggcgaacctggctgacgaggcggtggacgagaccggcctgggcgacaaggtgaccaagcggaacaagcggaacaagctgaagctgatcctgcgggactgcctgcgtcagaagagcgtgggcgtgatcgaggagatccctgagaagggcatcgtgaagtatgccaagcctgtgggcgtgatcgcgtctctggtgcccaccaccaacccctgcctgacccctgccggccaggtgatctatgccatcaaggcccgtgacgtcatcatctgcagcccccatccgcgcgcgaagaagaccaccaacaagtgcatcaacatcatccgtgagaccctggtgcgtgagggcgctcccgccgacatcatccagggcatcgaggagcccagcatcaccctgacccaggagctgatgaagcgctgtgatctggtcatcgccaccggcggccgtcccatggtcaagtccgcatactcctccggcgtgccggcctacggctccggcgccggcaacgcgactgtcatcatcgacaacacctgcaacacccccgagcgtcaggctgaggctgccatgaacacccggatctccaagtgctccgacttcggctccggctgctcctgcgacggcaacctgatcatccacgaggacgtgtacgacgggttcgtagccgccctggtgaaggagggcgcttacctggccaacgaggaagaggctgagaagctgaaggccgtcatgtgggacgaggctgggcaccgtctgcccaacaccgtggccatcagcccgcagaagctggcggaggccgctgggttcgagatcccggctgaccggaagttcatcgctgtgaccggcggcggcatcgagaacgtgggcaaggagcacttcttctccagcgagaagctgaccactctgctgaccctgttcaagtactacggggagtttgagaacgcactgaccatgatgcaggccatgttcaacgtgggcggcaagggccacagctgcggcatctactccttcgacgacgaccacatccatcgtctgggcatgtgcgcccccgtgtcccgcatcatggtgcgccagcccaacaaccgcggcaactccggttcttccaccaacggcatgcctcccacgtcttccatggggtgcggcacctggggcggcaacatcgtgtccgagaacatctgcctgaagcactacatgaacaccacctgggtggcccgtcctctgcccgaggatatgcccagcaacgaggagctgttcggcgagttcaacaagccggacatggacgtggagtgatctgagagccagttctgatccattccgtgccggcccggccgggccggcacggttttccagagaggcggcgcgaagccgctgaaaggtccaaggcggaaagccgaggccggggccccgaagggggccgctgacctccgtttccatcgctaccccgtacagaaggccgccggacatgcctgccagtcggcaggccggggcccggtccccttttgtattgtctccttcttcccacaaacgcccggtccgaaaggaccgggcgtttgtggcgtttcccaatgaggcgggacaggccgcggggactttccccatttttctggacttttttcttcacccatgctataataattttttgtccgcgtccggagggcaggagacccgccctccgtttcttttcgtctattcatgtcaggagtgatcccgttgcagcagatgtccggcacccttcttgatctgatcctctatctggctctggtggctcttggggcctttctgggctcccgcccccagatccagtcccttcccatgccctggctgggccggtttcagacggcggctctgctgctgctgatcgtgaccctgggggccgagctggggtccaacgaggagatcatctcttccctgggcaccattgggctcaacgccctggcggtcaccctcacctccatggtgggcagcatgctggctgtccacgccctgagaaaatatctgctgaagctgaacgctcagggccgttcctgccaggaggcaccggaggacagcgaccagggttccggggagacggtccacgtggaccacagcctgaccctcgccatcgtcttcaccgtagcggcgggcattctggtgggccgcttcctgctccccgacgccgccgtagcccactgtggcacggtcatccgctgggggctgtacctgctcctctttctggtgggcctggatatgggccggcagggcagcctgatccgggatattcgggccgccgggctccgggtccttctggtcccgctggcggttatggcgggcacctttgcggtgacggccctggtagggctgttcctgcccctgggccccaaggactgcgtagcggcagcggccggattcggctggtattccctggcccccaccctgctggctccgtactccctcaccgtatctgccaccgctttcctgtccaacatcatgcacgagctgttttccattgtggccgtccccatcgtggcccagaagctgggctatatcgaggcggtggccctccccggtgccacagctatggataccctgctaccggtggtagtcagcgccactgccgaccgcatggccatctactcctttgcctcgggactgatcctctccctagccgtcccagtgctggtccccgccatcatcgcgcttcccctctgaacactttccagaacaagagcaccggctcaggcccacgcccaagccggtgctctatttttcccgcatggcgtccaccagacgctccagcgcctccgcctcccgctccgaaaggccgtccatccgcagacacctgctctcctccctgctctggaacaccagagcatccacggagagatccagaagctccatcatctggaacagaagaggcaccgagggcttccgacgggagccctcgatattcttcaaatgagtgggcgtgatatccagaagctccgaaagcgcatcctgagtcagccccttcttcatgcgggccgcgcggattgcatcccccagggcccttgtttccatgctcatttctgacaactccctctccgttatcttacagataatcttttcccttgcgaattatctgaaagagtgctagcatagtatctataagataactaaaaaagatacctgagacgaagaggccgccgtctatgatgaagtccgtcattctgcttttgatgatattaggggtgggaggatgggtcctttctcacagtgcctcttatatcgcccacaggagggcggctcatgggccgctgacccgagacttttttcatggaaactcagagatacccccggcattccgccaggccctggaggagaccatcgtcttcctggataaccggcgggactgggccgccgggagtgcgctggacgccggcacgacggacctgtgctggattgagatcaaggaccgtgacctcttgctccgggctggtctcttttctcctggaaacttgggccgcctccagatccgcaggcgtctgcccctcctgccctcgggtgcgctgcccctcagcggatcggaggcggcccaactgactcattttctcctcgccgctcttcaggtgtattaccggggcgcaccggaggtcacttccgccggcccccggtgtctccgtgcggacttctcccctctccatggcactccagagcactaaaagggcgcgggggccgatccgcagtaagggccccccgcacctcccaaatgggcaccgtatcaccttaccccattggtaaggttttggcatgttctctccccttgacagaaacatatgtttggtttattataatacatatgttcgatttcaagggagggagaccccatggacctgatggacaagctgaccatcctggcggacgccgccaagtatgacgccgcctgcacctccagcggactggaccgggccggacgggcgggccggctgggctccaccatggcggcgggctgctgccactccttctccgctgacgggcggtgcatctccctcctgaagatcctctatacgaacatctgcgcctacgactgccagtactgtgtcaaccgccggtccaacgatccgccccgggctgcttttactccccgggagctggccgaactcaccatccagttctaccgccgcaactatattgaggggctctttctctcctccgccgtgctgcgggacccggattataccaccgagcggatgatcgaggcactgcgcctgctccgccaggattatggcttcggcggctatatccacgccaaggccatcccgggtgcagaccccctcctcacccagcagctgggcctgctggccgaccggctcagcgtcaacatcgagctgcccagcgccaaaagcctggccctgctggccccggacaagggccgggccggtatcctggcccccatggcccagatccgggatgggatcacccagtcccggcaggagctggccaaataccaccatgccccccgcttcgccccggcgggccagtccactcagatgatcgtaggtgccacgccggagagtgaccgccacatcctgatgctcacccaggggctctacgacaagtaccatctgaagcgggtcttctactccgcctatatccccgtctcctccagctccctgctccccgctccccagggctttcagccgcccctgctgcgtgagcaccggctgtatcaggcggactggctgctgcgcttctaccactttcgggccgaggagctgctggacgaggggcggcccgacttcgacctccgtctggaccccaagtgcggctgggccctgcgccacctggaccagtttcctgtggaggtccagcgggccgactatgaggccctgctccgggtgcccggcatcggggtcaccagcgccaagcgcatcctcacagcccggcgggccggccccctgtccttctccggcctgaaaaagctgggggtggtcctcaagcgggcccagtacttcatcacctgctccggccgcatgctggagggtctgcgagtgcgggaggagggcatcctgtcccatctggctgccctggagcgccccgccctggcccagatccagccggagcagctctccctctttggagaggagggggcctcatgagctggcagcaggtctgcttcgattatgacggcagttatcccggctttctcacctgtgtgtttgagagctatgcccaccgcgaggaggccgtctgcttcacctcaccggaagaggaccgcctcaccctctggccggagcggcatgtggacaccgaccaggccaaggcggagcgggtgtaccgctctctgtccaaaaagatctccccccaggcctgccggctggtgacccaggcttttctcacctgtctgcccgagcgggagctgcacatgtaccgtttcctgcggctgggctaccaacggggggcggacatcacccgggatctcaccgacgaccgggtccacgtgctgtggaaggcggtgcagcacctggggagcgaggcccatctgctcaaggggttcctccgcttctccgatcagcagggggtgctggtaggggagatcgagcccaaaaaccgggtgcttcccctcctccgcccccacttctgcacccggtactccggggagcacttcctcatctacgaccgcacccaccgggagttgctgatccatcagcccagtcggtgggccattctgcccgcggaagactttgcccctgccccgccggggcaggaggaggtgacctaccggcgtctgtggaggcggttctatgacaccatcgccatccgggaacgggaaaatccccggtgccggatgaccaacatgccaaagcggttctggggcactatgacggaattccagcccgacgagggcgcactccccgcccctggaccacgggggaagggatggtgaaaaaagcgcagcgcctggagaatactccgggcgctgcgccttatttgcagagctttctgtctggtcagcccaggctctcccggaagatctgaaggatctcctcccgatccagatccttgtagcccccggtgaggtggatggttacgtcagccagcccctccagcatgtcctccgtcacgcccagcgcactggtattcatggtcagcccaagctccttcatccagccctccatggccgccagcccctcctccgccgtctggaggtcggtcttgtccgccgggtccactccccacacctggacggcgaaccgcttgaatttgtccagcccataggggaggatgtgccggtagtagggcagggagaccgccgccagcgtcatgccgtgggtggcgttggtgtagccccccaccgcctggcccagcatgtgcaccatccagtcggtggacttgccccgggacaccagggtgttcagcgcccaggtggcggtccacatgatgttgctcctggcctcgtagtcctggggatcccggttggcagcccggctggagcacaggagggagcgcatcagcccctcgctgagatagtcgctggtgttgtcatcctccccggagaagtactgctcgcagatgtggttgaagatgtcgtagatacccgcgaccatctgctcccggggcagggtgagggtgaagcggggattcaaaatggagaagcggggcatcaccgcctcgtccgcaaagacgtggccgatcttctgccgggtctcctggttggtgatcaccgagccggcgttcatctctgagccagtgcccaccatggtgagcacacagcccaccggcaggatggggcattctggctcctcaaagcggagatagtatttctcccatgggtcctccggacagtggaccgacacagcgaccgccttggcatagtcgcacaccgagcctccgcccaccgccagcagcaggtcagcccggtgcgcccgagcgaccccaatgccctcatacagtttggccagggtggggtttggcatgactctggcgatctccgccacctgttttccctcctggtccagaatggcccgcacggcgtcatagataccgttgcgcttgatggagcccccgccgtagatgaggaccacccggtccccatattttggcagctccttgtggagcccctccagcgactgctctccaaagtacagcttggtggggttgcagtaagtaaaatttcccagcatgacagttcctccttatacttgacggcccatggcccgggcccgctccagggcgggatgcccggcagtctcccccggtccattcacccctccggcaaagactgtccctgccagtctggccttttcaaaacagtcgatccacccggtcaggccgctctccgcccgcgccgggacctggtcatcctcctccgccgccgcggtgagcagatagatgtcccggaaggcgtagtccgacgcaaacagggcattggctcggtccagcagggtcttcatctgcccgctcatctcgtagtaataaatgggggtggcaaaggcgatgacctctgcccggcccattttctccgcgatctccactgcgtcgtcctggatcacacactggccggcgctttgacaggccagacagcccgtgcagaaggcgatggatcttccccgcagggagatctgctccacctggtgacccgcctcccgcgcgccagcggcaaaggcgtcccccagggcttgggagttgctcttctccctcaggctggtgctgatgaccaaaatgcgttttgacatattcattcctccttattcctgttctgctgcatctgcggacccatcataaaccctggagtccacttcaagtcaagcgtttttttactgatttttttggggggagccggtctcccgtcctccgatgtcccctgaaggaaaacagaccggccggcgcagctctttggctgcgccggccggcacaaaaatcgtgcgttttcagttttcttgatctcgatcgcactcccgggacagagccctcccccggtgtccccatctcccggtggcggggactcaaaaacagatcgagacttggaacttggggaaagccttccggctcacaccatcagggagcagaccagctgcgcgtactccgccgggtcctccagcggcagatctgccagcaggagagcctgtccgtagagcagcttggcgtatttggagaccgtatccttgtcccctgcctccaccgccttttggagcgcggcaaagggagcggaatccgggttgagctccagcacccgctgggcccgggcggcgcggtccccatccaccttccgcatatacttctccatctccagggagaccgggccgtcagccgtcaggcacaccgcccccgacttcaggatggaggaggcacggacctccttcacctcctcgcccagggcctccttgacagcctccagcacaggtttgcccgcctccgccttctcctcggccgtcttcttctcctcatcgctctggggcagggcatcctcgtcattcaccgacttgaacgccttcccgtcgatctctcccaggccgcgcatgacaaagtcatccacgtcctcggtgcagtacaggatctcgtaccccttgtccaaaatgcgctccacctggggcagctttgcgatcttctcagcgctctcgccgcaggcgtagtagtaatagggctgatcctctggcatccgctcccggtactccgccagggtggtgtccttcccctccttagaggaccagaacagcagcagatcctggagcagctccttgtgctggccgtactcggctaccacgccatacttgatctgggtgccgaaggacttccagaatgtctcgtacttctcccggtcctccttctggagcttcatcagctcccccttgatcttcttctccagggcagaggcaatgaccttcagctggcgggtgtgctggagcacctcccggctgatgttcagggagaaatcctgggagtccaccacgcccctgacaaagcggaagtggtcagggagcaggtcggcacacttgtccatgatgagcacgccggagctgtaaagctgaagtcctttctcatactcccgggtatagaagtcgtagggggtgtgggaggggatatagagcatggccttgtaggtgacggcgccctcggcgctggtgtggatcacggtcagggggtcctgccagtccccaaatttctccttgtagaaggcgttgtactcctccggcttcactttgctcttctgccgctgccacaggggcaccatggagttgagggtcttccactccttcactgtctcccactcgggcttgtagtcctctccggcgtcggcgggcttctccttctgacggtagtcctccacctccatcacgatgggatagcggatatagtcggagtattttttgatcagctcttgtaatttataggtctcaagatactgatcgtagttctcctcgtcggcgttgggcttgatgtgcatgatgatatcggtgcccggcgtctccttctcgcactgggtgacggtgtagccatccgtgccagcggactgccacatccacgcctcctccgcgccatatgcccgggagatgacggtgaccgcgtccgccaccataaaggcggagtagaagcccacgccgaactgaccgatcacatccaccttggaggccgccttgtcgtcccgctccagctcctgcttgaactggagggagccgctcttggcgatggtgcccaggttggactccagctcgtccttcgtcatgcccactccgttgtcggacacggtgagggtccgcttctccttgtcgggaacgatggtgatcttcagatccttgcgcttgacctctacgctgtcatcggtgagggcacggtaggccagcttgtcctctgcgtcgctggcgttggagatgatctcccgcagaaagatctccttgtgggtgtagatggagttgatcatcagatccatcagccgcttggactccgccttgaactgtttctttgccatgatggatgcctcctatatcgtaaaatctaagtttttgtaaatttagcactcaatatttatgagtgctaaattactataccgccacttgcggaaaaatgcaagagcgttcataatttttttacaaaatttcgtcattcgggccggggaagtgacaagttttaatcccaatttcaggacaggcgccccggctgtgtgatatcctcacctcatccattatgcacagaggagggagagccgtgccgcagaagaaagctgtcacaccttgggaaaaggaatttgcccggctggagcgccgcaggagagcctatcaggcccgccatgcccgtccgccggagtccaggctggaccgggcgctggaggacaaggtgccgcccaaactccgggaggcccttaactccgcctttgtcaaggcatttgatctggtcttccagcgggggaccgggcttctggaacgcacctttgatgccgaggcggcccggcagcagtttgagatcgaccagtttgccgcccagctgaagggggaccggagctctctgcgggtcttttcccgccgagcgggacggaccggggccctcaatttggctctttccggggccgagggcactctcctggggctgctggggatcggcctgcccgatatcccgctctttaccggcgtcctgctgaaaagcctctaccaaatggctgcccgttacggctacgggtgggataccccggcagagcggtactatctgctccttctggtccagggcgccctgtcctatggggaggagctggccgcatgcaccgcgctgctggacgagtttgccctcaccccctgtccgccggaggactatgaccaggggacacagatccgccggactgcctctctcctagccgaccgcctgctgttgatgaaatttgtccagggcatccccatccttggcatggctgggggcatctctgacgccctctgtctggaaagggtccagcgctatgccgggttaaactatcatcgccgctttctcctggaccaccggcccgatccccggcctttcgcatagagcagggtcatgtccttcccgcatcccaggtgcccgcccccgccaaaacgggagcgggcaaaatcagtggttgacaggaaggaaaaactgtggtagatttttattagttagcactagctaacaaaagggactaaacttttacagccaaacgccgaaaggcgcgatttttcaaaggagggattagcttatgctaacttctgaggtccggccggccgaagcgcgctttgagctgaccctggcctttcactgtgcgccggccctggcaggcatcaagcctgcagatctcattgccctcccgggggaaggagatgagaccgacgccctgctggcgtcctactccgccgccctggccggggcggggatctctctgcggcccctgtgccggtgccgcagccgctgtctggtactggtgtaccggcgggaccgcctggagcgccagctggagcaggaggaggtggcccgtctgctggaacgggacggctatcccctggccggcgggctggaggccatgctggaccatctggcgtcccggatggcggggagcggtgggttcccccatgaggtggggctgttcctgggatatcccgccgaggatgtggagggctttcgccggcatggcggccagggctataaatacagcgggctgtggaaggtctattccgacgtggagagggcccagagatgcttccggcagtacggctgctgccgaagggccctgtgccgccgcctggaggccggctgccggctggtccagctgtttcggacagcttgacggagataggggatagaggcggggagatccgcggcgcccggatgggcccgcccccccgtttgctatacaaaccaaatttttattttcaggaggtcacatacatgagcaggatggcagtgatttactggtccatgacgggcaacacggaggcgatggccaacgccatcgcggagggggccgccggggccggagctgaagtggatgtgaagcaggtgtgcgacaccacggtggacgaggcgctgggctatggactgctggcactgggctgccccgccatgggggcggaggtgttggaggaggcggaatttgaacccttcttcaccgaactggagggccgtctgggcggcaaaaaggtggctctgttcggctcctatgactggggcgacggtcagtggatgcgggactgggcccagcgggcggacagtgccggagccaatgtgtaccaggacgagggcctgatcctccacctgacccccgatgaggaggggctggagcagtgccgcaccttcggggcgggctttgccaagtattaaagggatcggatcaagaaaaagaggacggatgtctccccaagagggcatccgtcctcttttttctctaactctccggtccccgcttctggtactcgctcagcttccggttcagggagcgggtgtcccgccgcagggccacatggaggccgaaccacatggcggacaagccccactccaggaagagcaccaggaagatgcctccccaaagcggcacattggaaaaccagcccagggccagcgcgccgcccacaaaccccaggttgcacagcagcccccaccagacggtccgcacccgcagggcggacggctccagctcccggccctccgggaaaaggaaggactccagaatggccaccgccatggagaccagcagcatctggagcatggtgagcgaggatacggagccctcgccggccagggcgttgaagatggccttgaaaaagaccagcgccagggtatagacagccatatgaaatttcatggacaggccccagctgtagaaacggataaattctcccatgatggacctcctttttatagtcccagccgctcccgcagcaggggcgcgtagtgccgggagaccaccagccgctccccgttctccagggatgcctcgatgcggccgctagtccggctcttcaggctgcggatgcggtgcaggttgataacagcggacttgctgaccctgagatagcccagctctccataccgcccctccagctccgccagggtgagggccgtctgataaaaggcagaggcggtatagagaaaggtatgttcgtccacactctcacagtagagcgtctcatccgggctgagcaggatgatctcccggttttcatcccatacgcacagcttctgaaggccggagcgcaccagagacaggacacggagcatctcctgatccagccgggggcagcgcaggaccacctcgttttccagcacgggtgcgtattccaccctcactttcatagaaaaacctcccttctctgtgagcataccagaaccgggacgccagagcaagccaggagccgccaggatgccattcggggccggcagcctgcctccaggccaaattttgccgggatacagcggaatttgtccggtataagatttgcatttttttaatatctgtgatatactcctgtgctaagcacccggaagaccgggaatttatgacagaaagctgagttgatttgtcccccatggacagtaccagtattggaatgaccgttgctcttgtcatcctcgtggccatgtccgcttacttctccgccacagagaccgcctttacctccctgaaccggatccgcctgaagagccgggcggacaacggggaccagcgggctgccagggccctggctctggcggaggactatgacaagctgctgtccaccatcctcattggaaacaacatcgtcaacaacgtggccaccaccatcggcgcggtgctgttcatccggctgctggatgacgtgcgggggcccacggtgtccgccatcgtgctcactgtggtgatcctgatctttggcgaggtctcgcccaagagcctggccaaggagagcccggaggcctgggccatgctctccgcccccctgctgcgggcctttgtagccgtgctgaccccggccaatttcctgttcacccagtggaagcgcctgctctccctgatcatccacaagcgggaggaggacggcatcaccgaggaggagctggtcactatggtggaccaggcggagaacgagggcggcctggacgagcacgagagcgagctgatccgcaacgccatcgagttccacgacctggaggtgtccgagatcctcactccccgggtggatatcgtggcggcggaggagaacagcaccatggaggaggtgggctccctctttgcggagagcggttactcccgcctgcccatctatcaggacagcatcgacaatatcgtgggcgtgatccatgagaaggacttctacgccgcccgctaccggggggagaccatgatctccgccctgaaggccccggtgctctacaccaccggcaacaccaagatctccgagctgatgcgcatcctccagcggaacaaggcccacatggccgtggtggtggatgagtacgggggcacggagggcattgccaccctggaggacatcgtggaggagctggtgggcgacatctgggacgaacacgacgaggtcatcgaggagttcaaaaagcaggaagacggcagttatctcatcgcctgctccgccgacctggacgatatgttcgacctgttcgccgtcaagggcgcctgcgccgccaccaccgtctccggctgggtgatggagcaggtgggccgggtccccgaggagggggaccacttccaggccgagggcctggatgtcatcgttacccgggtggagcaccgccgggtcatcgagatccaggtgcgggtactgcccgaggaggagcccgaggctaaataaagaacactgcccctgcctgcggctccgcgggcgggggcttttcgtacccgggccgttgcgtctaggggagaagcgtggtatcatagccctgatttgagagacgggaggaatggccgtgaaacgggacaagagctccccttgggaatttctgtggtacgccctgtacgccttcgcgggactgggactggagatggtgctgatgggcggagtggagccggccctcttcggcggtacgccgccctcccgctataccgccgcccatacgcttctccactgggggatgactatggcctgctgggggctgacggccgccctgctggtgagacaggcggagaaaaagctgggcttttccctgctggaggccaggcctgtcccccggaagggggcggggctcgccattgggctggccgccctgtgcatcctgctgaacgcgctggactgggggactctgaaggtgatcggagagtttcagaagaaggggcccctcctgttcgccggccagtatctctactacgcctttgaggtggtcctggtccttctgatcgcagcctttggacagcggttctgggaggtgctgaggaaagggcggagccagttccccttcggcggcgtggtgctgtgctgcacctggggcgccatccacatgctgtccagggggagcctctccactggcctgggggtgatggccttcgggctgatgtacggggcgatatatgtcctgctggggcgggatgcccgcacctcctatctggctatgctggcggcctttgtcatctgaagcggcgcggaccttgggcggtcagtcctccggactggccgcctttttgtgcctgtttcaagcccaccgcccccgatcccggttgacagatccgcccgccgcttttataatagagctatccaccaggagaggagggctcccatgaggctctacggaaaatttgccattgtatccggctccggacgacccgatgtgacagagcgttgtacggagcctgacgggatgggatctggcacgcgcaggcccgcaagaagggcttgagcgcctttttgatcccttctgttccattctcatgactcaggccgcggacagtgttctgtccgcggctttttcgcgcccgtttccggcggagggcctgtatccccgcccttcgcccgcttctatacctgtcttgagaaaggaacgatggatatgaactccgatacgctggatctgacccgggggagcgtccccctctgcctgatccgattctccttccctctcctgctggccaatctgctccagtccttttacagcatggcggatctgctggtggtgggccgcttcgtgggtgagaccggcctggccgctgtgagcagcgcctccaccctgtgcttcctcctcaacgcggtgtgcatgggcttttccgccggtgggacggtcctcaccgcccgggcccggggcgccggggaccgcctggaagaggaggaggccgccgccgcgctgttcctgctggcgctggcgggctccgccctgctgacggcggccgccctgctctgctactgcccgctgttcaccctgatggccctgccttcccgggctatgggggacgcctgcggctatatggccatcctctgctggggcaccccctttgtctttggatacaacgccgtctgcgccatcctgaagggccggggcgactcccgcggtcccctccggttcgtggccgccgccgctgtggtcaatctcctcctggatctgatcctggcaggtccctgcggcctgggaaccgccgggaccgcctgggccactgtggcggcccaaggcgtctcctttctgctctctctggcccacctgcaccgctgtgtccccctctccctccggcgtctccccctccgccccgccgccctcctctcccttctccggctgggcctcccctctgccgtccagatggcggtggtcaacctctcctacctgatcctcaccggcctgctcaaccctttcggcgtctccgtggcggcggcggccggcatcggcctgaaggtcagcaccttcgccgggatgccctgctgggcgctgggctatggggtgaccgccatggtggggcagaacctgggggccggcgatccggaccgggtgcgtcaggccgtcaggagcggccttctcctcagtctgggggccactgcccttctgaccgccctcgtccagctggccgccgcccccatcatcgccctcttcgaaccggagaacgcggccgtgacggcagagggggtgcgctatctccgcatctgctgctccgtcaacggactgatctacgctgccatgtatgtcttcgactccttcgccatcggctctggggcttcctgggtggctatgtgcaatgccatgctggacgcggccctgctccgtctgcccctgtgctggctgctggccttccccctcgccctgggccccgccggcatttacttgggccaggcgttctcccccatcctgcccgccctggcggggctgtgctatttccgtctccggtgccgccggtcttgacggctccccctcccgccgctacaatagagctaaaaggagcgctgaccatggacattcagggactgcaaaaattgacgctgctggactggccgggccgggtggcctgcacgattttcctggggggctgtgacttccgctgccccttctgccacaaccgggacctggtgaccggccccctccccgccgccatggacagcggggagctgctggctttcctcgccaagcggaaggggctgctggacggggtctgcgtcaccggcggagagcccctgctccgccccgggctggaggcacttctggaggagatcaaggccctgggcttccccatcaagctggacaccaacggcagccacccccagctcctggccaggctgtggtccctggggctggtggactacgccgccatggacatcaaaaattccccggagcggtacggagagaccgcaggggtccccggcctggacctggggcccatccgggagagcgtgtcctggctgctggagggccatgtggactatgagttccgcaccaccgtggtgcgccagttccatgacagcgcctccttccgcgccatcggcccctggatctccggcgcccggcggtactttcttcaggccttcatcgaccgggacaccgtgctccggcccggtctgagcgcctggtcccgggaggagatggaggggttcgccgctctggtccgcccctgggtcccggcagtggagctgcggggcatctgacccccccctccgcgtttttggctaatttttatggcagagcactcccgtcccacggggcgcgggagtgttctttttcaaaaaaatcgccggtttttgccccgtttcttcccaaaacatgtgccggcgcttcctgctttttcgcttcaggaaaacaaaatattgtgtttccgccggaattttgcacaagatattgacgagccatttccttcatggtatagtaggagcagtcgcggcgaccaagccgccgcgggactgaagaatgtggagggaccgtgtgatgtatcaggtgaccaagcgggacggcaccgccgcccaatttgagatcggcaagatcagcgccgccattaccaaagcctttgaggcgctggaaaagcagtatcatcccagcgtgatcgacatgctggctctgcgggtcaccgccgacttcgagcccaagatccgggacggccgcatcgcggtggaggacatccaggacagcgtggaaaaggtgctgtccgaggcgggctacgccgatgtggccaaggcctacatcctctaccggaagcagcgggagaaggtgcgcaatgtcaactccaccctgctcaactaccgggagctggtggacaactacctccagatcaacgactggcgggtgaaggagaactccaccgtcacctactcggtgggcgggctcatcctgtccaactccggcgccatcaccgccaactactggctcagcgagatctacgaccaggaggtggccaacgcccaccgcaatgccgagatccatatccacgacctgtccatgctcaccggctactgcgccggctggtctctgaagcagcttatccaggaggggctggggggcatcccggggaagatcacctcctccccggccagtcacctgtctaccctgtgcaaccagatggtcaacttcctgggcatcatgcagaacgagtgggcaggggcccaggcgttctcctcctttgacacctatctggctccctttgtcaaggtggatcacttgactcagaaagaggtcaagcagtgcatccagtccttcgtctacggggtgaacacccccagccgctggggcacccaggctcccttctccaacatcaccctggactggaccgtgcccaaggatctggagaacctgcccgccatcgtggggggcagggagatggacttcacctacggggactgcaaggccgagatggacatggtgaacaaggcgttcatcgagatcatgatcgagggcgacgccaacggacggggcttccagtaccccatccccacctactccatcacccgggacttcgactggtctgagacggagaacaacaagctcctgtttgagatgaccgccaagtacggcaccccttacttctccaactacatcaactccgacatggagccctccgacgtgcgctccatgtgctgccgtctgcgcctggacctgcgggagctgcggaaaaagtccggcggcttcttcggctccggcgagtccaccgggagcgtgggggtggtcaccatcaacctgccccgcatcgcctatctggccaaggacgagtccgacttctaccagcggctggacaagctgatggacatcgccgcccggtccctcaagaccaagcgcaccgtcatcaccaagctgctggaggcggggctctacccctataccaagcgctatctggggacctttgacaaccacttctccaccatcggcctcatcggtatgaacgaggtgggactgaacgccgggtggctccgggccgacctgacccacaaggagacccagcagttcaccaaagacgtgctcaatcacatgcgggagcggctgagcgactatcaggagcagtacggcgacctctacaacctggaggccacccccgccgagtccaccacctaccgctttgccaagcacgacaaggaggagtttcctgacatcatcaccgccaacgagaacggaactccctactacaccaactcctcccacctgcccgtaggctacaccgaggacatcttctccgctctggacgtgcaggacgagcttcagaccctctacacctccggcaccgtgttccacgccttcctgggggagaagctgcctgactggaaggcggcggcggagctggtgcggaagatcgcagagaactataagctgccctactataccatgtcccccacctactccgtgtgcgccgaccacggctatctgtctggggagcagcacacctgccccatctgcggcaagcctgcggaggtgtacagccgcatcaccggttactaccggccggtgcagaactggaatgacggcaagacccaggagttcaaggaccggaaggtatatgacctcaccgcctcccacctgcggaaggcgggccgggccggcagccaggtgaccttctcccaggagggcgccccccaggcgtccggcggggagtccctgctgttcaccacccgtacctgccccaactgccgtcaggcggaggccctgctccagagggcgggagtgccctatcagaaggtggtggcagaggagtctcccgacctgaccacccggtacggggtgcgtcaggcccccaccctggtggtccagggggagagcatcaccggactgggccccatcaagcggttcgcggaggagcaccgggcccgggaagtaggctgaccgcgccttgatcccaagttccctcccccttgcggcggcgggggcactgagacggatcgggacatcaggaaaagagagcggctccgggtctcctggagccgctttttcaaaggagagaggacccttatgactgatatcatcgtggcggggggcggccccgccggcctcactgccgccctgtacgccgtccgggccggccgctccgtgctggtcctggaggaggccgctcccggcggacagatcaacttctcccccctggtggagaactaccccggcctgcccggcgtcagcggcctccagctctctgaggccctcacccgccaggcggaggagcagggggtggagctggactatgcccaggtgctgggcttccgcccggaggaggggggctttgccgtggagaccgacggcggccccctccactgccgcgccctgatcctcgcccctggcacccggcaccgccctctgggcctggagggggaggaggccctcaccggacagggggtatcctactgcgccgtgtgtgacggccccttctatcagggccgggacaccgccatcgtggggggcggggacaccgccctgcaggaggccctgttcctttccggcgtgtgccgccgggtgaccctgatccaccgccggctggagttccggggcagtccaaagctggcggagcgggtacggacccgggacaatatccgcctgctgctgggctatacaccgcaggccctgctccaggcggagggcaggctcaccggtctgagggtccgccaggcctccaccggacagaccctggagctccccctggacggggtgttcgccgccgtggggcgggtccccggcaccgcccccttccgggctcagctggagctggacgaggagggctatttccgctccggtgaggactgccgcacccgcctccccggcgtctttgtggccggggactgccgggccaaggaggtgcgccagcttgccaccgctgtgggcgacggcgcggtggccggcctggccgccgcccggttcgtagaggacggacaaggctgaatcttcaccctccaaaacacagatctccctccccgccggagacaccggcagggagggagatctctttcttattctgtgatgcccagctgggcggcccgcttggccagagcctcgcacagacggtcgatcccgtccaggctcttctgtcggtcagcgaacacaccgtagatgatgcgcaggtggccggctccctggtctccgtaaaattttccgtcgttgaccagcgtcttggcctcctccgccagataggcggtgatctcgctggagtctcccaagcggctgacattgacccagccatagaagcccgactccatcaggggcatggatactccgggcaccgcattgaatttctcataggcatagcggcggcggaagtcctgctccgccacatagtcctgaatgaaggatgtgtcctcataggcggggatcatggccatctggaccatggtattggccgcaccctggatattcaccgcagtggcgtacatggtgtccatgatcacatcatccgcgaagatatagcccacccggtagccgctcagggccatgcccttggagcaggaacagactgtgaccgtgcgctcccacatgccgggcagtgaggccatggtgaccatctcatgtcccggaaacgcggtatcctcaaaggcctgatcgcagacacagatcaggtcatgcttgatgatgaactgggacagctctgtcagctcctcccgggtgaacacccggccggtggggttgttgggggaggagagcagcaccatcttcgtcttgggcgtcagccgcttctcatactcctccacccgcaggcggtagttgtcctcctcataggtgggcaccttcaccaccacgccgttgagcagctgggggtccaggaaattgcttggatagctggggtcgtggaccagcacctcgtctcccggctcaataaagggggtcatagcaaaatacaaacccacgtcagagccgggattgatgatgatgttccgctgggggtttactttgatgtggttgtcccgctcgatttttttcgcaatgacctctttcaggtccgcattgccgatgggcggggtatagtggcaggccaccccctgctggatgacctccacactgcgctccagtaccttctgtgggatcacccggtctggatagaaagggtccgcccagcacatcagggtgccgccctccgcttggagcttggacaccgcatctcccacgtctgcctttcccgctttttcagaaaacaggccgccgtccagggtacggaacaggggccgcatcttgtctcttatgctcataagctcaaatcactcccaaatgggccatgatgatgttgacgatcgtggccagtgtggtggtaacgacagtcaccacaaacaggtgcttgtagccctccttgtgggtcacgccgcagtaggacagggtcaggacaatcgcgctgttgtggggcagggagtcaaaggtgatctgggagatgttggcgatccgggtcaacgcctccggattgccgcccatagctaccagcttgtccgtaaaattgtccaggacaaaggccaggccgccggtggcgctgcccgtaaagccagcgatcaccgcgatgcacacaaacagcatgatgtatgggctgccaaaagaggccttttccagcaggcccagcagcaggttgtagccgggcaccgcgcccaccacagaggccaggccgcagatagcggcagtctggatcacagactgagagttcttcgctccctctgccatcgtattgacgatcttgtggaagccctcgtatcgcttccagaacatcagtgccagcacaacacagccgataaacagggccgcccaggcgggccaatggatcaggttgagcagaaggaccacgatacccatggggatcagcaggaggaaggggttgggcagtccctcagtgttcagatccacgtcgtcggtgtcgccttcacgggggataaagccttcccctttggcgatgtacttctgtcctgcccggtggagataccacaggttgccgccgcccacgatggcaaagccggcgatagccatccagaaaccggccatgggagtggtgccgaaggcattggcggggagcacgatgttgttgataggcatgccgggcagggtctgcattgccaccgcaccgcccaatacgcaggcggggatcaggctacgggagatgccggcagccttaaagaaggcagcggccaggggatacatggtgaaaataatgacgaacacgtcgatgccgcccacagacatggccagggtagccagatagaccgccgccaccgcgctggcgggccccagcttgcggaacacgccgctggccaccgccatgggcaggccggacatctccagcatcttgccgaacatctggccgcccaggaagatggggaacagggccagcaccatgttggccacgccgcccatatagacattggcgtaattttcaaacacattcacgccgccggtggctgccaccagcagagccgccacagtggacagcaggatcagggaatagcctcggacggagccgaggatgatcaggatcagtgccgctacgataccaataaagctgataatttccatggagttcccgcctttctaatttctatgattgggtgggagagctgggccgcagcatcacagcgccgcgaccgcctcgatttcgaccagtgcgcccttgggcagcttggctacctccacagcgctgcgggcaggcaggacctctccctggaagaactgggcatagacctcattcatcaccgcaaagtcatccatatgctgaatgaatacggtggtcttgaccaccttgtccatggaggtgcctgcggcctccaggatctgagacagattggtcagagactgtctcgcctggtcggccacgttgtccgcgtcgatgctgccggtcttggggtcaatcggcagctggccggaaacgaacaggaaatttcccgctgctaccccctgagaataggggccaatagcggcaggggccttttcggtattgatgcgttttgtcatggtttcctctcctttttaccgtgatatggtttgtctcctcactcagatcaggcgccaatcgcagaaggtgccgcccttcatctcatagccgggggccagcacgctgaagcggcggacattcaggttgggcagggtgctccaaatcagcctgcagtgcttggccaccaggcgcagcttccgcagatcagagatattttcatccggcttgccttccaccacaatgaagtcgcccatcagtccgggcttgagggtgccggtcacatcctgcagcccacacagctccgcaccggtggaggtagctgccttgatggcctccatcggagacaggccgcactggaccagcagctcgatctcccggacggtggcgttggtgccgtccaccgggtcagagggcagaagatcggtgcccacgcagatctttacgccgtgcttatgggcccaggtcacgccctgccggtgggtcttggcggcctcgcgccccttttccacctggtgagccgggcatccgtgggccagcagataatcatcgctggaggagacagagatcgttgggacaaaataggtgccgtgctctgccatcagcttggcagtctcttcagacagcgtgtagccgtgctccaccgaatccacccccagcaggacggactgacggatggccttgtcgttggacagatgagcgaagcacttctttccggcccggtgggccacgtccaccactgcctttacctcttcatccgtcatctgcatatcgcacaggccctcattcgcggaagccattcccccggtgtacatcatcttcagctggtctgcccctgccgccagctgctcccgggcagccttcataaatgcgtctacaccgctgcacatgaccacggagttttcctctgagccgtgtccattgtgggccaccagtccctttccgcaggcaatgatgttggggccgcagagcatgttcttgttgatggcctttttcagtccaatgtcgatgtcatcgggaatagcggcactgcggatggtggtaacgccgcagtccagcgcctcggccgcccgccggtagctcagcagtgtgcggtaggggatgccaaactcatcaaagctgttgcccagcccccgataggggagcatgaggtccagatggacatggcagttgatcagtccgggcagaatggtgtgcccggacaggtcgaagaccgcatcctccggccccgccttggccaggacactctggtccatttctcccacatactccaccacgtcctcattgaatttgtcctctatattgtcaaagacatagaggccgttttcaatggccggtgcgccggttccatccacgatgcggacatttttcagataggtgcgtgacatgattgatgctcctttcaaatttctttccgttcttagcagcaaatcacttgctcttcatatactgtaataaattttattatatactgaatttttatcatgtcaatgtctgattcctactatatctcccttttatttttgtttctttttcataaataaactctttttttgcaaaaaaggttgtgcgccattttcgtttgtgatattttgaatttaacaggctttcaggaaaggaagatgttatggaacagacagaaatcgtgttgactcccgcggagcggctgatcctgaactcttaccgggatctggtgtgcggtctggaggattatctgggcataggatatgagatcgtactgcacagcctggagtccatggagcactctgtcattgccatcgccaatgggcactatacaaatcgtcacgagggttctcccattactgatctggccctggatatgcttcgctccatccagcaggaggatgggaaaagccatatttcctatttttcccgcaaccgcagcggcgaaccgctgcgctccactaccatcgttatctatggtgaaaaccgccgggccattggcttgctgtgtatcaacttttatctgaacacccccctctataaactgatcggccatctgaccgaagatgcgatggatgagcgccctatgctgacagaaacttttgtggacaatgcggaggaactgcttacccgggtcgtggaacaaatcagggatgaagtggagcaggacatccatattcttccttctctaaaaaacaaggagatcatcaagcgatgcagcagtcaggggatcttccaaatcaagagcgcagtcaccagcgtggcgaagatcctcaacatctccaaaaatacggtgtatctgcatttgaagtccctggattgatccggaagctttttattcacagaacaacaggcccctgacagcctatcggactgtcaggggcctgctggcacaaaagagggacgccgcttctgcggcgtccctctgggagcacttgtaggaaaaaatcagcgcttgctgaactggggcgcacggcgggcggccttcagaccgtatttcttgcgctccttcatacgaggatcacgggtgaggaatccggcggccttcagggcggcgcggttattctcgtcagccagcaacagggcgcgggccacaccgtggcggatggcaccggcctggccagtgacgccgccgccggagacggtggccacgatgtcgaacttgccctcgctaccggtggtcaccaggggctggcggaccagcagcttcagggtctccaggccgaaatactcatcgatgtcgcggccgttgatggtcacggcgccagtgccgttggggaacagatgaacgcgggccacggaggacttccgacggccagtgccatagaaataaggcttcttgctcttatacatgctcgtctacctccttgcttacagagcccacagctcaggcttctgagcggcgtgctcatgctcaccgccgcgatagatcttcaggcgggacatggaatccttgctgatcacattgcgaggcatcatgccgcggacagccagcttcatggccagctcggggcgctcccgcatcagggtgctgtactgcacttccttcaggccgccgatccagccggagtgggtgcggtaatacttctgctccagtttcttgccggtgaggacggccttctccgcattgatgatgatgacgaagtcgccgcagtcggcgtggggggtgtactcaggcttcagcttgccccgcagcaggttggcggcggcggcagcggtcttgcccagaggcttgccagcagcatcgaggacgtaccacttacgcacgatgttccccttgttggccataaaagtggacataggtgagacctccattttctttccttatctgaaaaatcattttgcagacaaaatcagtcgctcccctgtacaagcggagcgttttgtattatagtatttgggaatcccaatgtcaacgggtttttccatcttttttaatttctatttcataatctcctgttttctctcgtttcctgttattatctctttttatctcattttcaatttgaattttattttttgaaaaaagttgtaaaaatgaggaaaaaacctaaaaaggaggccctatgaaccgaatcctttctctggtccgccgctgtgtggaggactacgacatgatacagcctgacgaccgggtggcggtgggggtctccggcggcaaggactccctcacccttctggtggcgctggccaagctgcgggaattctaccccatccccttcacagtggaggccttcaccctggacatgggggcggcagagggccggcccgggatggacttttctcctattgcccagttgtgccgggagatggaggtcccctacaccatcctcggcagtgagatccagcacatcatttttgatgtgcggaaggagaaaaacccctgctccatgtgtgccaagatgcggaggggggccctccacagtgccctgctggagcggggcatccacaagatcgcactgggccaccactacgatgacgcagtggagacctttttcatgtccctcatctttgagggccgcctgtcctgcttccagcccgtcacctggctggaccggactcagatcacccagatccgccccctgctttactgcggggagaatctggtgcgtcacaccgcccggcgcctctctctcccggtggtggagaacccctgccctgccaacggcaacaccaagcgccaggagatcaaggagctgatctacgagctccagggccgctaccccggactcaagtcccgggtcttcggctccatgcagcgcctccccctgcccgagtggggcccggtggagcaccgccgccgccctctgccggaagagatcggcgaataagcgggaaaacttgcgccaaagcgtggaaaacaggagcccctggtgatataatagaaaaatcaaatcaacgcacaggactggatgccctggaaaactgggcatccttaccttgatacaacgcagcggcaggactgccgcctgagaggagcatctccatgagcgaagaacagagcacctattccgcaaaccccggcaagcagctggtccgcacggtggacggggtggactaccagcgtatcccggtaaagacccacctgatcaccaacactgacgacatggccgacgtggtggtccgctacgccaaggaccggatgcaggagggggacattcttttcatctccgagaaggcggtggcctgcacccagaaccgggccatccccatggaggacatcaagccccggaagctggccgtcaccctcagccgctatgtgaccaagacccccgccggcatcggtctgggcatcccggagactatggagatggccctgcgggagtgcggcaccctgcgcatcctgttcgccgccttctgcagcgtcattggcaagctgttacgccggaagggctggttctacatcgtggccgggcccaaggcccggggcatcgacggtcccaccgagggcactatccctccctatgaccactacgtggtcctcacccccgccgaccccatgggtacctcccgcaggctggcccaggctctgggccacccggtggcgatcgtggacatcaacgacctgggggccaacatcctgggctgctcccagaaggagccctccatggccctgctggccaggatcctgggggacaaccccttgggtcagtccagtgagtgcacccccatgggcatcatccgcaaagtatgacatacgagcccgcgccccggagggaatcctccggggcgccgctttttactccctctttgtcttaaatccatttatatctttcatgaatttatgcaaaaattagagttaaagtttattttatccgtgatataatttatttatatctctccactttttatttaaacagcacaaatccagggatctatctgaaaggagcatcttcatgaggaaatcgatcaaacatctctttggccttaccctcggtgtgtctcttgccctggggctcatctcctccgcctcggcagagggcagtgtttctgtgcaggtagacggcaagacggtacagtccgccgcatacattgatcaaaacgaccgcaccatggtctcgccggatatcgcggacgctctgggactgactcagaagcaggaaggctccagagtacagttcacccggaacggcgtcagcacctatttcaccggcagcgatgccactttttccggctctgagatggacactgtccctgctctgcgggatgggaccttgtacgtccccctcgcttatctggcccaggcctacaacatgccggtctcctgggatgcaggttccaaggcagtctctgtgtctaccacctccacaggccccatctcgctggatggcgtaccggcccccgcctttgattactccgatgccaaccagctgcccatgacgggctatttcagcaagactttgacctatcccgatctccaggggaactcggcccagcgagaggcctacatctatatctccgagcatgcctcctgtcggccctatttttacgtgatcgccctgcccgacaaggtcgatcccacccaatttctgatggaaaatggctggttcgatttggcggaagaaaacggcgaatgtctgtttgtgctggcccccggcagcagcggctgggggtccgtggaggaagagttgcctttcttgactgccgctctctcctggctgaacacgcctgtggccgatgaggccgatcccaacgcgcctgacaaaaacaaaaattactggtccgcctttggcgagtggtattttgtaggctatggtgaagggtgtgcccctctggaggcttggtcagccaaaaatcccatcttcgtcatcgctcaggtgtatctgaacggcgtcagcgccggcgaggcatatctgtccgaagtaggcagccaggtctatgcggtaggcaccaacggctatgacatcacagaggatgtgaagagccgcctggcggcccgcggcgatcagatgatcaccaatcaggacatccctgttcccacttggttcgtcaactatgatgccgcggaccacagccttcagtattggaagactgccaacgactgctccccttccggcacccagaacgccgactacggcaccgtatatgtccaggccggggactctgacgcctggcagacccagtatgcgggccccatctccaaggtggctgtggacagccgacagtccctctccggccgggagattcatgatttcctgacctgctacacccgctatgacaacacttccgcctacggaaatgccctgatgctgcggggggattataccgacgtaatcgtcaacgcccacaagtcccctgaccgctatgctgaacagaaggtcactatgcccgatggcgcgaccgccacaatgatctgcaccatcgtggacattgagggcgagccccgcgagatcctgttctacatccctgacaacgcatccgaactccagcctgacggcgcccctgtcatcaccgcctgggctggcggcagccagaccaatatcatcttttttgactccacctgctggtgggaaactgcaaaccaaaacggcatcgcgctgatttttaccaatgaagcctacaacacctctgtcgctgtcacccccgccgatgtggatgcctgctaccacgccatgctggatctcctggagggttggaatgactccggcaaattccagtttgatctcagccggatctacagcaccggccagtccatgggctctatggaatctcagcagtttgcccaggagaccccggattactacgccgctgtagcctccacctctttctatcaggactatcccgacgcccactctgacaagcccatccccacttacctgatcaatggcgagggcaatggcaaagatgacaccggcaccccctatgacgaccgctggaaccgcacagacgactgggcacagtatttcctgcgagtcaacggctttgtgtacaccccggcggtttacgccgctgacggaacagtcaccaccttcggcgtgcctgtctccgagcctgttttcaccgtcacaggcccctatgaccgtttcgagacctatacctggatcaatggacaggacattcccctggtccagtacaccaacagcttgtaccgcccccacaactgcctgacctccgagatccccatgctgtgggacttcttggagcactaccgctgtgagcgggacgaagacggcgctgtgaccgcccgctactacagtgcctccgccttcgaacgggacgatcaggtcctgatccagtttggcgcctgatcctctggcactgcgtcccgctccgctgatccgccaaagcgtctgatgatcatccgcaaagtatgacacgcgcgccccggaggctttcctccggggcgcgtgatcttatgcagccagaatggatccctcctgtccgtccccctgtcagggctcaccagtcctccaagggctcctgctggtcgtcccccaggcccagagtgcggcggtagaggagctctcccgtccttgtgtcatagcagctcaccacctgccggccggagaccttctcctccagctgcaggatctcacctgtaaggtaagggtaagtataggagggcacatcctccatccacagcgctccgtcctcatccagcaggtcacagctcccgtcagtccgctctcccatcagcaggacgggcccctcctcccccatctcgtcccgcacgagggagatggatgtataggtcccggcctccaccaccggcatgccgtccaggcggtagaccgccccggacggagagctctgccgggagctgctgtcattgaaaaagagcaggccccgcttcagggtgcagtagagctcggtgccgccgtaggggatctcacagatctgtccgccgatctccaggcgggtgcagctgccgtcgaaggtatcctccccgtcaaagtaggtgtagccctccccccggcccacgagccaggtgtcctggatggcacgccactcccccggctcctcctcccgcacccggcccagagacaggtccagcagccgattccggctccggctctcgtcggtccagcccatccacaccaagtcatcccgccaggtcggctcgaacatcagccgctcccagttcatcacctcggccgccatctccggaacggccaccagctcctcccagggccactccccctggacggtcccgtccgtgcccagccagcagcacccctccggcccgtagaggatcaggccctccgccccggcggcataggtccaccaccgggcgggggtgcgccagctgccgtcccgggcggccaccgccaaaagggtgccgtccccatagggccagcctccctctcccaccgactttttcagcaccagcagggggagaaagacatccgtcccctctctgtcgtaataggtagggacctccacccgggtgtacaccgactccgtcaccagctcccccgcccgggtcatcaggccgtaggtcaaactgtcatagcgaaagggacccccctcccactctgccgcattgatgactgtccccgcataggggtagagggggccgtagtcctccccggggatcagatcctccccgatcccgcccggccacggagtctccacgtcggggagggaccccgcccgggtctccagagcctcccagtgggtccgcacccggacctccggctcctccgggggttccgccgccggggcgggggcgcaccccgccagcagcaccagggccaggacccaggccgcgccgcgccctctcatattcacccctcctgttccagaatggacacatagccctcctgggccaccagggactggccctcctctcccagcagccagtcgtagaggatgcgggcggggctgtcctccgcctcgtccttgtccatgacagcgtagtaaggattgaggaaaggatattccccgctgcggatggtgtccgggctgggggcagtcccgtcgatggagagcagcttcagtccctgggccatctccatatcgtgggcatagtagtagacggtgtagccgatggcggcggggctgttgtcatactgccgcaccccctccagcagagaggacatggagcccgccgtgtagtccaccggaggctccatcatctccaggccgtccatcaccagcttcttcatcagggcctggctccctgcctccgggttgcgctggaaggggatgatgtcccggtcctcgccccccacctggctccagttggtgatctccccggtatagatcttttggagctgctccgtggtcaggccgttcaccgggttgtccgcgttgactacaaagaccagtgcgtcggtggcgaagggggtcaggagccaccggtcccccgcctccagccgctccatcaccgcctgctctggctcgccggccagcagcaggtcggcctcccccgccataagtgcctcataggaggcggtggtgcgggagaactggaccagatcggccacctcttcccggctctctcccagcaggacggagcacaccgcctccgccagggggacggcggaggtggacccgttgagccggggcatattctcccgggtaaagacgaactcctctgtcggcggatcgctctcctccggcggagcggcggcgcatcccgccaggatcaccagggccgccagcagggcgggccatacgcgggtcttcttcatcctgattctcctctcttccagcatggctcggggcaaaaggaaagcccctttttccttctgcctccatcataccagagccaggggaaaaaggggttgcgaaaggtttgcaaaccggtggcaaagagagacaaaacggctacgatttcgttacagacctccgccctgctccgacaggcgcgggtccggcaggtccagataggtgggggtatggccggtggcctccacgaagcggatcatctcctcccgctccaggcacagggtggaggtggagatccccgggtgtccgctgagataccggtccttcagcaggtcccggtcgatgaccagccgtacctgtgcctgcgtatcgaacatcagctccagggcgctcaccgagccggggatggtgcgcagcaggcgctccatatgctccgggccggcaaaagagagtcgggagcagcccagcagcggggagaggtccttggtcttgaagggcttgtcccccggcatcatcagcaggtaaaagtcagtctgctgccggttgcacagaaacaggttcttgcagatgcgggcccccagggtccgctcgatgagcaggcagtcctccatggtgtcggcatggtcgtgatccacccgggtgaaggagatgcccagctcttccagtttgtcatagacagccagctcctgggggatacggtcatcggaggggcgtccctggtagacggtggggtcgatgtacatagcggtccttccttttcttcaatggtcttgctgcatcataccacagccggaacaaaaagtacagtccggcggcacagaagggactggatggccgtcgccgcttcccagtgcacggcgcgccccatctgcgatggggcccccaggatctggacgacaggaagagcaaagccgcccgattgggcggctttgcagcaaaatttgaaaacttacttcaggttgaagaacgccttcatgccggggtactccgcgatgccgcccagctcccaatgtgtgcccggcacacattggggaccctaaggatcaatatgctcggcggaagtaaatcccgcctgcgccaaggttttcgcctttggcgaaaacgcttgtgcgcgctgacgcgcgccccatctgcgatggggccccaggagctggacgacaggaagagcaaagccgcccgattgggcggctttgcagcaaaatttgaaaacttacttcaggttgaagaacgccttcatgccagggtactccgcgatgtcgcccagctcctcctcgatgcggagcagctggttgtacttggccacgcggtcggtgcggctgggggctccggtcttgatctgcccggcgttggtagccacggagatgtcggcgatggtggtgtcctcggtctccccggagcggtgggacacgatggcggtgtagccggcccggtttgccatctggatggcatccagggtctcggtcagggtgccgatctggttgaccttgatgaggatggagttgcccaccttcttctcgatgccggtggccaggcgctccacgttggtgacgaacaggtcgtcgcccaccagctggactttgtcgccgatggcacgggtcagcatagcccagccctcccagtcggtctcggccatgccgtcctccagggagacgatggggtaggtgtcggcaaacttcttccacatgttcaccagctgctgctgggtcagcttcttgccggacttgggctggatatagcacttctgctcctcgtcccaccactcggaggaggcggcgtcgatggcgatcttgaagtcctcaccgggcttgtagccggcctcctcgatggccttcacgatgaccttcagggcatcctcgtccttcttcaggttgggggcgtagccgccctcgtcgcccacgccggcggcgggggtgccgttctccttcagggtgttcttcaaagtgtggaacacctcagtgcacatgcgcagagcctcatggaaactgggggcccccacgggcatgatcatgaattcctggatctccacgttgttggtggcatgggcaccgccgtttaggatgttcatcatgggcacaggcagcatcttagcgttggtcccgccgatgtagctgtacagggagacacccaggctctctgctgcggccttggcgcaggccagggaggcgccaaggatagcgttggcgcccaggcggctcttgttgggagtgccatccaggtcgatgagcatcttgtcgatggccacctggtccagcacgttggtgccgatgagggcctcagcgatctcggtattcacgttgttcaccgcggtcaccacgcccttgccctggtaacggcccttgtcgccgtcccgcagctcgcaggcctcatagatgccggtagaggcgccggaagggaccgcggcgcggcccacagtgccgtcctccaggtagacctccacctccacggtggggttgccccggctgtccaggatctcgcggcccaaaacgtctacgatctcaatgatctgcttcatgataatcagtctccttttttcttttatgggcgggtcctcccgcccggagcgtatatgccctgtgcagcagctccgcaccggtgcatcggtccagcgggggcccagtccgtcagttgacgatcagagtctccccgtccatctccttgggcttttccaggcccatcaggtccagcatggtgggggcgatatcggccaggcggccgtcccgcaggcggacgctggcccccacgatatagaacggcaccaggttggtggtgtgggcggtgaagggctccccatcctcgtccgccatccgctcggcattgccgtggtcggcggtaatgagagagacgccgcccatgcgggaggtggcttccaccacccggcccacgcactcgtccacggcagtcaccgccctgcaggcagcctcatacacgccggtgtggcccaccatgtcgcagttggcaaagttcaggatgatgacatcataggctccgctctcgatgcgcttgaccgcctcctccgtcacctgataggcgctcatctccggctggaggtcgtaggtagccaccttgggggaagcgatgagcacccggtcctccccgggaaagaccgtctcaacgccgccgttgaagaagaaggtgacgtgggcatacttctccgtctcagcgatgcgcagctgggtcagccccagcttgctgatatactcgccgaagatgttctccagcttctgccgggggtaggccaccgtcacattgggcatggtagcgtcgtactcggtggtacagacaaaatccaccgggacgaagccctttttccgctccacatcctgaaagtcctcatccacaaagcagcgggtgatctcccgggcccggtcggggcggaagttgtagaagatgatggagtcgttgtcccggacctgagcccctttggcgcagaccaccggctccatgaactcgtcggtgacgccggagtcataggacttctggacagcggcggcggggtcctcctcaaagatcccctcccccagggcgatggcatcataggcccgctgcacccggtcccaccgcttgtcccggtccatggcgtagtagcggcccatgacggtggcgatcctgccggtgcccagctcatccagcttggcctggagctgctccacatagctctttccagagctggggggcacgtcgcggccatccaggaagcagtggacatacaccttctccagcccctgctccttggccatctttaccagggcgaacaggtgggtgatgtggctgtggacgccgccgtcggacagcaggcccatcaggtgcagggcggtcccccattcccggcagtgctccatggcctccaaataggcaggattcttgaagaactccccgctgtcgatgtcccggctgatgtggggcaggtcctggaataccacccggcccgcgccgatgttggtgtggcccacctcgctgttgcccatctgcccctcaggcaggcccacgtccaggccggaggcagacaggcggcacccgggacactccttgaagatattctccagatggggcttcggcgtattttccaccgcattgcccggatatttggggcccaggccaaagccgtccatgatgatcaaagttgttggtgttttcatagaaaccctttcttgagagaatccagagggaaggggcatgaagagcgggctcccgctccgcgttccgtgtcttcctctccgtgtgtttcgatggtgcgggatggggagaggcaaaatgcctgccgctcccccgctccgcctctcccaacaaaacccgctgcgctgggctttcgttggggacccatccggcgtggacggctcgcttactcctggtttgccgcgttgatgatctccacgaagtccgcaggcttcagggaggctccgccaatcaggccgccatccacgtcgggctgggccagcagctcggcggcgttcttggcgttcatggagccgccgtactggatggtgacggagcgggccacatgggcgccgtacagcttgcggatgacagcacggatagcctggcacacctcaccagcctgctcggcggtggcggtcttgccggtgccgatggcccacagaggctcataggcgatgaccacatggcgcatcttgtcggcgggcacgccggccaaggcagccttcacctgataggcgatcagctccatggtcactcccagctcccgctgctccaggctctcgcccacacagacgatggggttcagccccacctccagggcggcgtggaccttcttattgacggtgaagtcggtctcgttgtagtactggcggcgctcagagtggccaatgataacatacttggcccccgcctccttgatcatctccgcagtgatctcaccggtataggcgccgtggtcctcatagtggcaggtctccgcgccaatggcgatgtggcagtccttgaacaggcggacggcggtggtgatattgacggccgggacacacaggaccacgttgcaccactttccccggggcataatgggcttgatctcctcggcgaactgcttggtctgggagagggtgttgttcatcttccagtttccggcaataatggtcttgcgatatcttctgttcatggcggtaaagcccctttctatttttccttctcttcctagtttgttacacacttgagcctagtctgcccggatcttggcttcccagctgtgatttgtcccgcactacgccgcaaaacttaaaagcatcactacaagaaggacccccagaatggtcagaaggatatttctcatttttttgttcatgcacgatccctctttcctgtatctcagcgtcgtcaaagcatgcgccatatttttcactttcgcctgccggtgaaagcccatccccatttcgctgggctcgcgcgggtcctcggagctgcccgggcagttctttatttatccagcaggcaggctacgccgggcagctctttgccctccatgaattccaggctggcgccgccgccggtgctgatgtgggtcatcttgtcggcatagcccagctgctgtactgcggccgcggagtcgccgccgccgatgatggtgatggcgtccgtctttgacagagcctcggccaccgcctcagtccccttggcaaaggcggggaactcgaacacacccatagggccgttccagatcactgtgcccgcgccggctacggcgccgcagtacagcttcacggtctcgggtccgatgtccaggccctgccagccgtcgggaatctccccggccttgaccacctggctgttggcgtcgggtgcaaaggcgtcggcgcacacggtgtccaccggcagaagcagcttcacgcccttagacgccgctttctggaccatctcattggcgtagctctcccaatcggcctccagcagggagtcccccaccttgccgccctgggcggcggagaaggtgtaggccatgccgccgccgatgatgatggtgtcggcgatctccagcaggttgttgatgaccccgatcttgctggataccttggagccgcccaggatggccaccagggggcgcttgggatcggccagggcgccgccgataacttccagctccttctggatgagaaagccggacacagcgggcaggtagtcggccacgccggcggtggaggcatgggcgcggtggaccgcgccgaaggcgtcggacacgtacacgtcggccagagaggccatggccttggccagggcggggtcgttcttggtctcgccgggctcaaatctggtattttccagcagcaggatctcgccgggcttcagggcggcggccttggcctgggcatcggggcccaccacgtcctccgccatgatgaccggcttgcccagcagctcgctcaggcgggcggccaccggcttcagagacagctcgggcttgacctcgcccttgggcttgcccatgtgggagcaggcgaccaccgcagcgttctgctccagcagatactggatggtgggcagggcggcacggatgcgcttgtcgtcggtgatgacgccgctgccgtccttggccatgggcacgttgaagtcgcaccgcagcagcacctttttgcccgccacatcgatgtcgcgcactgtcttcttgttgtagttcattcttctatgagctcctttctttctcgtcaggcgtgggaaagggaaataaacaggtcacagcccctccgccatctcgccctgcccggacagcccgggaaagcccagctggcgcagggcctcgtaggccaccactgccacagagttggccaagttcaggctgcgggcgtcagggcgcatagggatgcggatgcaccgctccctgtgctcctcccgaaagcccagtgggaggcccgcagtctccttgccaaagaacaggtagcagccatcccggaactgggcctggtcatagcttcggggcgccttggtggtggccagccagaggtcgggagcgggatgctcggtaaaaaactgctccagtccgtcgtagacccgcaggtccaccatgggccagtaatccagcccggcccggcgcaccgccttctcactgatgtcgaaccccagagggcggatcaggtggaggcggctgcgggtggcggcgcaggtccgggcaatgttcccgcagttctgggggatctccggctctaccaatacgatgttcagcaatgggtccacctcgcgtttcggctatcattgtattccaattcgcccggaaattcaactgtaatttggtcgaaaaaatgcaaaaaaatcaaaatttcccccaaaatagcttcaagtgcaattttgaagttcttctatgcgcattttcgttctctttttcccgattctctgttttttcctctccttgttttcctttcctttccctcaacctgccgcttctcctgcccatccacccatcagcagctgccttcccgcctttttccgccttcaaagaatggcctcctggattttctgttttcaaacggagaaaagcgtgctataattttattattcctctccatattttgcccatccaaacccatatcaggaggtattttgaaatgaaattgatctggaacggccactcctgcttcaccctggccactgaggcgggcacccttgtcatcgacccctatgaggacggctccgtccccggtctgtcccccctccatctggaggctgacgccgtctattgcagccacgagcaccgggaccacggcaaccgggccgcggtggccctcagcgggaagccctgtgccgtggaggtggaagagctggccacctggcacgacgaggttcagggcgccaagcggggcccgaacaccatgcgcatcttttccgccgaggggcttcgggtggcccatctaggagacttgggctgcggcctgacaccggagcaggcagaggccctgtccggtctggacgctctgctcatcccggtgggcggcttctacaccatcgatgccggccaggccaaggcggtagtggaccagctcaagccccgggtggtcgttcccatgcactaccgcggcaaggacttcggctacgaggtcatcggtccggtggaggatttccttgcccttcagagcggcgtggtgcgctatgagggcaacgtcctggagctgacccaagacacccccgcccagacggcggtgctcacctatctgggctgagcctgcctggacagccccttcccgctctcagcgcgtcctgggacactttcgttccgggacgcgccctttttgttcccaaaatgtttacaaaatttcggccagcctttcaggtttctttcagctttgggtgttatcctgtttctgatctttgatttggaacgggaggttagaccgtgatcgaagtagaaaatctggtgaagcggtacggcggccatctggcggtggatcacctgagcttcacagtggagaagggctgcgtctgcggcttcctgggcccaaacggcgccgggaaatccaccaccatgaatattatgaccggctatctcgcccccactgaaggggaggtccgggtggacggccacagcgtgactcaggacccggcgggggccaaggcctgcatcggctatctgccggagcagccgcccctctatgtggacatgacggtgcgggagtatctggagttcgccgccgggctcaagcggatccccgggggggagcgggccgctcagctggaccgcatcctggagatgacccggaccgccgacgtgtccggccggctgatccgcaacctgtccaagggctaccgccagcgggtggggctggcccaggcgctgatcggcttcccacacatcctgatcctggatgagcccactgtaggcctggaccccaagcagatcctggagatccgcgccctgatccgggagctggcccaggagcacactgtgatcctcagctcccacatcctctccgaggtccaggaggtctgcgaccacatctttatcatccaccacggccggctggtggcccaaggcactccggcccaactagagcgggagctgacaggcacccctgccatcaccctgctgctcaaggccgccccggaggaaggccgggtcctgctctccggcgtccccggcgtagcggaggtggcgccgctgccctgcggggaggcgggcgccgccctgctgcgcctgactcccgcggagggggccgatcccagggaggccgtcttccgcgcctgtgcgggggcggacctgccgatcctggagatgaggcgggagtccctgtccctggagcagatcttcctggagctgacctccgacgcctccgccgccggacaggctggcggccgcaggcgccccttcgggcgcagagattcggcggagccggagcccgctccggagacagccatcacggaacacggagaggaggcggagccatgactgcggtctacaagcgggagctgcgctcctatttcacctccatggtggggtatgtgttcatcgccatcctcatcttttttgtaggcatctacttcatggcctacaacctgttcggcggctacccctccttcggctatgtcctgctcagctgcaccatcatcttcatggtggccgttcccatcctcaccatgcgctctatggcggaggaccggcggggcaagaccgaccagctgctgctcacctcccccgtctccctcaccggcatcgtcctgggcaaatatctggccatggtcaccgtgctgctggtccccatcctgctgatctgcttctgcccgctcatcatcgccatgaacggctccgccactctgacggcggactacgccgctatcctggccttcttctgcatgggctgcgtgtacatcgccgtaggcatgttcgtctccgccctcaccgagagccagatcatcgccgccgtgggcacctttgccgcgctgctggtcctctacctgtggaccgatctggtgtcctttctccccgactccctggcccagctcctctccagcttcgacttccagggcgtgctggacaacttcgcctattacagcgtgttcgatctggggggactgctgctctatctgtccatggcggccgtcttcgtcttcctcaccgtgcaggtcctccagcgccggaaggggatcacctccgccgctaccactgcggtggtgctggccatcgccgtggtggtcaacctggtggtggggcagctgccctctgacctggtggagcgggacatctcggacaacagtctctacaccgtcagcgacacttctgtggactacctctccgccctggagcgggacgtggagctggtcgtcctggccagcgaggacaccacggaccagcgcatcaccaaatttctgcacaactatgccgccctgtccggccatctctccctctccttcgtggaccccgtggagcacccctccgccctgacggagtatgaggcagaccagaacactgtcgtggtccgctgtgccgacaccggcaggcagcgggtggtccccttctccgacattttggtggccgatctcatgtcctactacacctatggcacctatacctattccgagttcgacgccgaggggcagctcacttccgcggtggactacgtcacctcagacaacagccacatcctctatctcgccgaaaaccacggggagagcgccttgggcggctcggtcaccgacgccatcagcaaggccaacctgtctacctccaccgtcagcctcctgctggacaacggggtgcctgacgactgctccctgctggtcttcaaccagccccagaccgacctgtccgccggcgaggcccagatggtccgggactacctggaggggggcggccaggtgatgatcctgctgacccgcacggacctggccaacttcaatgccatcctcgccgactacggcctcgccatggcccagggctatatcggggacaccgcccggtactatgcccaatacggccgcttctacttcagcgccaccctgtccgcctccagccccatcactgctcagttcggggacgacgacctgactctgatctacggcgcccacggcatgacccagtgcgatccggtccgtgacaccatcaccgtgacccccttcatgaccaccacggagagcggctactccgacgccggcgggcagaccggcacctatatcctgggcgcccaggcggaggaggagaccgacggcggcaccgcccgcctcaccgtcttcaccaccgagagcgtggtggaccagagcatcctcaccttcaaccccagcatggtgaacctggacatcttcctcaacgcggccacctccggcatggaggacatctccgccatctccatccccgccaagagcctggagatcacctataacaccgttctcaacccgggcatgtggagcaccctctatctggccgtcatccccctgggggtcctgatcggcggcctggcctactggatcaagcggaggaaactgtgatgaaccgacagacaaaacagcttttggctctcgccggtgtcctcgccgtcgggctgggcgcctacgccgccctgcgggtctggaacgcgggggaggaggagcgggaggccgcccaggccgactatgtgctccagctcagcgatgtcaccgccctctcctttgattccggggacggccccctctccttcaccctggaggagacgggctggacctgggacggggacagcgagttcccggtgaacggcacggagctggacgccctccgagaggacctggccgccctgaaggcggagcggatcattccggaacccgacgcactggctgactacggcctggaggagcccgcctacaccctcaccgcccgcactgattccggggagtccaccaccctgcttctgggcagcctggaccctgggggcagccaccggtacgccatgctcgacggggggacggaggtctacacggtggacggctccatcacctcctccctggacagcgaactgctggacctgatggagctgccccagctgcctgacctggacgagaagaacatcacctccgcccagctggagctgaccgacggcactgtccgccagctgacttccgctgtggagacccgggagacggaggtggagaccgaaaccggcgagaccgacgagaacagggagcccatctatgagaccaccacggagacggaggagatcaccctatggtcgctggacgggcagccgctgcccgagggggccgtcgggctggaggactggctgtacgacctgtccaccctatacctggacagctgctccgcttttaaggcggaccaggaggagctgtccgcctgcggcatggacggcgcctcccttctcaccgtctccctgacctccggcgagaccttcaccctggccatcggcggccagaccgaggatggcagctacgtctacgccgccctggaggcacccgcccccggctgcgacctcttcctcatctcagccgataaggcccggaccctgtcggatctgaactatgagtccctgtccgccgatgaagaggcggaataagaaagtgccctcttcccgccatgggaagaggacacttttttcgtttagagctgaagtaaaatgccggctgccgctcctgccgcaataaaggcgatagggtgaagttttttcaggggcgtccacttcattgccgcgaacatcgccagcgtcagcaccaccgctgtccactgaatggccggaaagctgttcggtgagagggcgtctgatgccgtaaaaactgaatacgccacactcaggcccgctgccgcgatcagcgcagtggaggcgggacgcagcccggcaaacaccgcctccacgctccggttgctccgaaacttctgcaaaaatcccgcaattatcaggatcagtatggcccccggcgtgatcacccccagcgttgccacaagcgctccggggactccagcggtctggtagccaacataggtggccatgttcacccccagcgggcccggtgtggactcggaaaccgcgatcatagtagtcagatcctgattggtgaaccagccggtggtctcccccatatgctgcagaaagggaatcgtagccatacccccgcccacagagaacagaccagtcttaaaaaactcataaaagaggcgcagcaggatcatgtatcctcacctccttgggatgggagcttcacccggcccagcagccagcctgtcgctccggctgccaccacaaggaatgcaggattggagaggagatccagcaccgctcccagcggggtggccgggtccacagccagcagcccggacagctctcccagcaccagaactcccaaaaagatgcatactgcgggtctccccctcaaatttgtctttcccagcttgagcacgctgactgcaatcagtgccaccactgcggcattgatgcccgccagggcgtgctgaaccaccggataggtcgcaaattttgtgaggaatgcggctatgatggtgatgaccacaaagctgggaaacaccactcccagggcggcggcaattcctcctgggaccccccgctgacggtggccgataaaaaccgatgtgttgacggcgatgatgcccggagtgcactgtccgatggcaaagtagtcagtgacttcctcctctgtgacccagccctttttctccaccacctcccgctggaggatgggcagcatggcgtagccaccgccgaaggtacatactcccaccttggcaaaggtcagaaacaggtccaaataaaggttcaacagatcaacgtcctctccataaatttttcagcaaagtgcggcccgcccggcccgacccccgcggtgccccggccgcggcggccggcggatcgggagagctcttactccaggccctccaattcctccagccacagcgccgccaccgcatcgctgggcatccgccagtcgccccggggggacagggtgacagagcccaccttggggccgtctggcaggcaggaacgtttaaactgctgagtgaagaaccggcggtagaagctgttcagccacttcaggatggtggcccggtcgtaggtccggcccaaggcgtgctccgccagacggaacaccttcctgggagggaagccccagcggatggcgtagtacaggaagaagtcgtggagctcataggggcccaccaggtcctccgtcttttgactgatcttcccctcgatggcgggtagcagctctggggagactggggtgtccaggatgtcgtccagtacggcggacaggcgtgggtcctcgctgcccttgtcgtcggagacgaaggccaccagatggcgcaccagagtctttgggatgcctgcgttgaccccatacatggacatgtgatccccgttgtaggtggcccagcccaaggccagctcggacaggtcgccggtgccgatgaccagtccgccgttctgattggcgatgtccatgagcacctgggtccgctcccgggcctggccgttctcgaaggtcaccgagtggtcctccatggactggccgatgtccttgaagtggacctttaccgcgctgccgatgtcgatgcgcttcagggtggcccccaggcgctcggccagctccacggcgttatcccgggtacggtcggtggttccgaagcagggcatggtcaccgcgatgatatcgctggccgggcggtccagcagcttcatagccactgcggtgatcagaatggccagggtggagtccagcccgccggacaggcccaccaccgccgtcctggccccggtatgctccaaacgctttttcaggcccagggccgcaattttcaaaatttcattgcaccgctccgcccggtcctccgcatcagcggggacgaagggggcgggagagaccgcccgggtgagccgtgtctcctccaggggcagggagaaggaggcccgccagagatccgcctgtctctggccgttgaaggtggtcatccggcggcgttcataggccagccggtccacatcgatctcgctgatggtgagccccgtggcaaagcgccgctccgccagcagggcaccgttctcggcaatcatgttgtggccggtgaacaccaggtcggtggtggactctccttccccagcatcggcgtacacatatccgcacaccaggcgccctgactgccccaccaccagattgcggcggtatccagacttgcccaccagctcgttggaggccgacaggttcaggatcaccgtagccccgccccgggccagccgggcggaggggggctcggtggcccacaggtcctcacagatctccacgcccaggaccaggttgggcactgtctcacaggcaaagagccccgcggcatccatgtccacggtctccccgcacaggtccacactggtctccacacccgctccggaggcaaaccaccgctcttcataaaactccccgtaattgggcagataggtcttgggcaccagtcccaggatctcgccgctctggatgactgcggcgcagttatacagcttgttgtcccatttgcaccgcaccggcaggcccagcacggtcaccatatccaagtttcgagtggcctccaggatggtctgaagcccctcctccgccccacacagcagggtgtcctgcaaaaacaggtccccacaggtatagccggtgaggcacagctccggcaggcagaggaccttgacgccctgcttgtccgcctcccgcatcatggtaaagatctgttccgcgttatagcggcagtccgccacccggatcttcggggtgcccgctgccactttgataaatccgtcccgcataaaaaaccctcctttgtggtctttgcatcaagggatatcataccgtaatttgggggcaaatacaaggggagggcccccgtccagggccctccccttaaaaattttgtgttattccagggggtagagcaccatcccccagggcggtgccgctgtgaacgcccgcagggagggggagaactccagcaccgccgtcagctcacccaggctgttcccgtacaggaccggcgggccctccagcgtcagggaggcggtccactccagcgcatcccccgtttcgttcatccggatcaggctgatctgccccagggctggtcccccttccggctcctggtcagactcggggcaccacagggctgcttcccccgactgaccgccggggccggtgacctgataaatgagatgatcttcccgccgttccagccgctccgcccgcacctgggagagcatcagctccgggtccaggatgatggggtactcctccccggtagacaggtcgaatacccggcagttgtcctcccaggcgccggtcccgccgccgccccagatgtacaccagctccgggacgccgtctcccgtcaggtcggccagggacaaagaggcactcccctctgcgccgccctgggccagcggaaggactggcatgtcgaagtcaaagctccgcctctggaacaggacctccgcaggaaaggggtcccccttccccgggctgagtccgaccagcacctccaccccctgctcctggtcggcaaagcggtagcggacctctccagcccactccccccgggaaacagggagggagcgtcctctttcccggttgtaggactcaaaccgctcttccaagggcagcatctccccgggtcccgcgtccgctcccgacagttccaacgcgcctccgctgctctctgccgcggcaggcgcacagcttaccagtcccccggtcaggaggatcaggatggaggcagaggccagcagcaggcgtcccctcctctttggcgtggtgtccatgatggcccgaaaccggagaaagatccctccccggtccccagtaaagccggtagtcagaccggtcctccccccttttccggcggtcatctggtccaggatcgcccggccgtaggcccggcgggcctcctggtcccggcccgccagcagatcatcgtcacagcacagctccatgtcccgccgggccgtccggaccatgttccacaccagtgggttaaaccaatggatgcaccggacacaggtcagcaggagcagatagcctgtatccctccgcttcaggtgggtcagctcgtgggccagggcggcctcccgtcccccctcctgcagagtctcaggcagaaggatcaccgggtgggcaaagcccagcagcaggggggagcctgccttggggcagcggtacagggacgcctttttccggcagcccgtctcctgcctggcctgctccagcgcggccagatcctcctcccccgccggggtgctccaccgcagcagtcgccggcggcccagtccatagcccgcagccatccacaggagaaagaggacggtcaccccccgatatgctccatagatcacccccgtccagtggacggtgtaagaggtcaccccctccacagtgacggtgcggaggtagtcgttgtcccggatgctcacctccctgccctgccggtctgtatagtggacgtgatgactgtaccacattggttctccgtccacgtaggtatttgtccctcctgctccccctgctccggcctccacgatccgctggttatccaaatgataggcgttgtaccggtcataggcgccatgagccaccatctgggggacatccagctgaatgggagcgggaaagagggcccccaatacggggccgagaatgggataggccatcaggctgacagccaccacggcccaggcccaataccgccagtgcggtgagaccttccgcgtcagcagggggcccagggtcagcagcaccaggatggctgccccaccccccaggctggccgctagcagggccgtcagttgctccagcacctcattttccccctttctccaggatgcgttccagctcggcgatgtcctcccggctcagctccttctctgggtacagggcagccatcaggctggacagggaaccgccgtggacccgctccaggaaggatcggctctccgcagccagatagtccggccggttcaccagaggggtgtagccgttggaccgcccctccttctctccccggacaaagccccgctcctccagccgggacaggagcttgagcagggtgggcgctttccagtcccggtccagccgagccgcaagatcgctggtgcgggccggatactctgggacggcccacagggcctgcatcacctccagctccgcgtcgggcagacgtgagatctgcttcatgtcatctccccctttattagacgtttgtctttttgaattttacaactgtctaattattttgtcaagccgaaaactgcaaaaattccgggccgtcccctgggggacggcccggaacacagcagttcaggagaccttgatataatctttggacacatagccctctgtggctctgccgccgcttccgataaagctgatccggtaccagccgttgcccatgtcctccagaatggtaacggtgtttccctccagaatggtggcgatggcctcattgccgctgcccggtccggagcggacgaacaggccgctgcctgcgccggtcactgttccggtggtaccggaggaggacgacccggccccgccgccggcgcggcagaagacgacacattccgccgtcttgtccccggcggtggcggtgatagtcaccttcacctgggaggagccggtgttcacgttggacaccacgccctccgggctgacggtggccgcagactcgtcgctgctgctccaggtgatctctgcgtcggcggggaccacggcggcctggatggtggcggactccccggcctgaagggtgaagtcgctcttatccagcgtcagggaggtcacatccaccgtcaccgggggctcgggctcaggctgggagatgtctccctgggagccgctgggggtgctggaggcatcaggaccggtctggctggtggaggcgccggggtctgcctggctcccgccgggatcatcctctcccttgctgaacaggggagccagggaggtgaagacaatatacatggccacgatgatgagcaccagggagcccaccagcgccgccacctgaagggggttggccggccggccgctccggcctccaccggccactctgcggccacccgccgttctggggcgcccgtttttggccggccgctcgtcgcagaacgggcaccgcttatatgtgacggagtagtcctcgccacagttttcacagtggatcacgtcgttgcgccgaatgggcttcgtcttctgctgcttgggatctttggggctgctggccatggcacgcacctccgccttaatcttggatcaggatggcccggcctgcggcctggcagccgggtacttgtctctattttagcgtgaatttacaggtgcgtcaacggaaaaccatgaaataattgtttttctccgtttttatgtctacttctttcttccctcacccttgaccgccggggcccggcctcttataatgaaatctgtcagcccgctggggccccggccccgcaccactaaccctgaagaggtgaccgctatgaaaggaaccatgtccgcagctaccgtccacaagcagtacaatgaggtggtctccgcattccgcaggctcatcgcggacccggccctgcgtgcgcggttcgatggggaggcggacggctatttccgccgctgcgccctgggggtgtggcaggcggacaacgccagctccatcaccccccgtcatgtggagttctacaacgccatctataccaacggctcctccgccccctccgccctgtactgggaggtggccaccggggtggccggctttgaccagtttcagccccccgccttttttgaccgtctccgggagtatgaccgcctcacccacagccgtctgtcccgcaccttcattgaccagctgacactgctcctgctgctctttgctgcggtggatgacgtggtcagcgagccggaggccggctttgtcaatgcctgctccgacctcctgctggccctgtgcggaggcctggagggggaccggcccgccctgaaagcggacgagtttgtcacccggccccggaccagcgctccaccggaagaggagcccgccccggcggaggacaagcctctccctcccccggacctggaccaggtgctggccgagctggacgccctgtgcggcctggagcgggtgaagaaggatgtcaagagtctcatcaacctggtgaaggtgcagaagctgcgccaggagcagggcctgcccgtctcgcccatgtctctccatctggtctttctgggcaacccgggcaccggcaagaccaccgtagcccgtctgctggccaggatctaccacgccatcggcatcctctccaagggccagctggtggaggtggaccgctccggcctggtagccggcttcgtgggccagaccgccatcaagacccaggaggccgtccagaaggctctggggggtgtgctgttcatcgacgaggcctacgctctggtcaaccaggagaacggcaacgacttcggccgtgaggccatcgaggtcctgctgaaaaacatggaggaccaccgggatgacctgatcgtcattgcggcgggctactccggtctgatggagaagttcatccactccaaccccggcctggagtcccgcttcaacaaatatttttatttcgaggattacaccggtccccagctcatggagatctttcagtccatgtgccaaaaaaacgggtatgtcctctccccggaggccgcccaatgggcggagcaggactttctctccctctatgaaggccgggacgagaacttcggcaatgcccgggacgtacgcaacctgttcgagaaggcggtgtcccgccagtccgaccgggtggcccagctggagtcccccacccgggagcagctgatggagttgcgggtggaggacctgaacgagacagagacggcgtgatgggcgcggccgccccgctccgccggaacatgaggtgccctgaccatgaagatcgcgttttatacccttggatgcaaggtgaatcaatatgagacccaggccctggaacaggtgctcaccggccggggccacaccctggtccccttcgacggggaggccgacgcctatattatcaatacctgcactgtcaccgccgtcagtgacaagaaatcccggcagatgatccgccgggcccgcaaggccgcccccgacgctgtcatcgctgtgtgcggctgctatccccagacccacccggacgccatggacggcctgggggtggatctggtgtccggcaccggggaccggctgggcttcgccggtctgctggagcgcacctggcaggagcgccagcccgtcaccgccctggacaacgccttcgaccgccgctcctttgagatcctgcccgccggcggcctggagggccgcactcgggccatgctgaagatcgaggacggctgcgtcaacttctgctcctactgcatcatcccttacgcccgggggcgggtgcgctccctctccccccaggacacccggcgggagctggagcggctgctggaggcggggtatcgggagatcgtcctcaccggcattgagatctcctcctggggacaggacctgccaggggagcagacccttatcgacctgctggaaaccgtctgccgggacctgcccggagaggtccgcatccgcctgggcagcctggagccccgcaccatcacccctgacttctgccgccgggcggccgccctgcccaatctgtgcccccacttccatctgtccatgcagtccggctgtgacgccgttctggcccggatgaatcggaaatatgattccgcgcggtattatgagagcgtccaattgctccatggatactttgaccgccccgccattaccacagacctgatcgtgggctttcccggtgagacggaggaggagttccaacagaccctgacattcctccataggtgcgccttcgccgccatgcatatctttccctactccaagcgccccgacactccggcggccaaaatgcccggccaggtcctcaacgccgtgaaggaagagcgggcccgccgggccgctgagacagccggagagatggagcacacctatctgtcccagtgggtggggcagaccgttccggtgcttttcgaggaggagcagggcggtctctggcggggccataccgcccactactgcgctgtggccgctcccagtccccgggatcttcacaactgcctggtgcaggtacagctggaggggctggaggggaacaccctcaagggggtggtcctgtgaggggcatccgccgcatcccctgcggcaatgtgaactgctatctggtgcagggggaggagggcgccgtcctggtggacaccggctacaccggctacgtggagcgcctgctggatacctgcttgggggccggggtgcggctgatcgtgctgacccacggccacttggaccacattcagaacaccgccctgctcatggagcggctgggcgttcccgccgccctccatccggcggatctgggcctgctcaccgatcagcaatctcagcccctgtccgcccagggaccggcgggccggctcctgctgtctctctcccgtcacagcttccagacccaggcgttcctcccttttacacccacagtggagctgcgggaaggggacagcctggccccctggggtgtggacgcccgggttctggagctgcccggccatacggcgggctccatcggcttggaggtggaggggcactccctcattgtaggggacgccatgatgaacctgttccgcccgggcccctcctgcctctgctccgaccccgccgcccagcgggacagcatcgcccgcatccgctctctcggtcccagatccctctatttcggccatggccgtccagctcacctccctggataaggaaaccgccttttcgagaatatcgcagtctgccgcgcgcgggcgcgaactctgtgaggctttttctacaagctgaaaagtcccggtgcagaaaatgcaccgggacttttcccatcttacatccgccgctcaaagtagcggttggccgccatcgtcacaaaaaacagtgtaaggatcacggcacacagcgtgatgcccactgtctggaacagggccctgcgggtgatggcgtagcagagcagcgcggtcattgcgccgccgaacagcaggccgttcatcacctgcagggtgatctggcagctccgcatggctaccagccggtcccgctcgtctgtccagcgcagcagctcctgctccgccccgcccttcagcgcgccgtgaaagttcacagcgcccagagccagcagcaggacggcgctgatgagatatttgggcgcagatccgcctgccgcccccaccgcgagacagatcaccgccagcaccaggcagatgatccccagcatcaggtgccggatgtttttgaccttcaattcgatcccttcctttcccgcttaacagatcgggccagagcgccccacaggccccatacggccctcttttccgtccggaggggcactcactgctccgtgacgcccttccgccccccggggagcttcagccggagcagcttccgcaccagctcgtcccgctcctggctcagcttgcggaacaggtccgcgcccccgatcaaaaagaacagcagggccagccgctccggcatggggaagcccagcagggcgaacagcggccagctcagcagggcggtcagccccagggccaacagcagcagcacgccgccccgcagcaggagccccaccgtggacacggactggaaatagtgctcccacgcctccccatccatatggcccaccttatacttgagccatacggcccccagcagaagggggacaaatatcaggccggacaggctggtcagcaggctgatcagcagggcaaaggccgccagccgccccagggacggccctgtccccgggtcctggagcagataccagcatcccagcgccgcgccgcaggccgacgcggccaagccgcagatcaggaaaaacctctccctatcctcccagaaccgatgaaggcactgcgccccgccccccacgaaggtgagggacaggaaggcggcccaggccgggtcccccctcaggagacaggccgccgcaaacagctgggaggcagccagcaccgcatcccccgcccggcctttggccgcggcccccacctcccggtcccgctcgtcccggaccaggtggagcgcccggacctgcttccactcctcttcacgggtatggctcatatggaattcctcgctttccttttcatccggatcttccgtgatccgatccctatatcctgccttcataatagaagctgcatgccagctcaatgaacagggagagggtgtacagcacgccggatacgaccatcatcccgccgtacaccagctcgccctccgggttggccagggcgccgatcaggctgaggatcagcaccgccatcagggtgccccgcagcagggagagcgtccggctcctggcccgcagctccacctggatgttgcgctcgtccagtgcctccaccttgtcctggtaagacaggcgtctggagaggctgcggaccaatgcgtctgccccgatgaccagggctatgagggcaagcaccacactctttccatctatctcccgcttccagatcatggccccagccagggccgctccaaggaccaggaaaaaacatccgtccgcaaactttttcttattgtagatcttcatactgccggtcctccaattccctattttctttcaggcagtacaggtcctccaccgtcacgccgaagagctccgcgatgcgataggccagcagcagcgaggggttgtacagctccttttccagggaaataatggtgcgggaagagacgtggacccggtcggccagctgctgctgcgtcatccccgcggcggtgcgcagctccttcacccggttcttcatgtccctctccccctttcacttcactccaaaacatgaagttagcttcacgtgaagtgtacttcatattatacacaggtccgcccgtctgtcaagccccgcctgaaagaatattttttcttgtacaaaaaggcggcggagaggacacgcgtcctctccgccgcaatttacctgttttcaatattttcttccgcagctgcggaccttttggccgaatggccgttgtcccatcaaaaggctccggcctttccacccggctcagagagtctcgtcccccagggactggataaggaggttgcgcagagaaatggcactctgccggttcataacgatggaggccacgtgagccgcattgggcgtagagacgttctccagcccgttggaggtgacggtgagggcattctccatatacttataggagatatccagggtgacctccaggatctggccctgggggtcagcgaccttgcgcaggccgaaggtgttggcgtattccggtttcatgggatcttctccttccgattcactgaaatgtggtggtataggtcaggacatggacgccccccggctccagccggcggatgcccgccttgtcctccaggccccggcccacaaagaccgcgtcggggagggcagaccagggctcaatacagaagtagccggtatcaaagggcttgtccgccgtccacagtcccagatagggaaaatcggggcactccaccaccacccgctcccggccggagcggtccaccagggcagcccggcgctccccctccaggtccaggacaatggtgtccagcccgaagaccctggggcacagggggatgcgccctccctccaggggaaagcgggcctctccgatggtcagcatacacctgctgtccatgccgtagggacggagctcctccaccccggagatggtaacggcgtagtccgccatagtctctccgggctccaggggggtccggaagccgtcgtgtccgcccagctcatagagcatgggaacggcggagcggttctctacccggtgcgccttggtcaggcggctgccctccagtgtgtaggtgacggtgaggacaaaggagaacgggtacacccgccgggtctcctcgctgtcctccagctggaaggagagggcggtggggccctgctctgacacctggaactgagcgtcccgggcaaacccatgggtggagatggaccaggcccggccgtccagggtgtactggctgtcctggagccggccgatcagggggaatagcagcggggcatgcctgccccagacggcggggtcggcctgccacaggtactcagtgcccccagcgctccggacggagcagagctgggcaccggcgtcctggatggagacggtgagcaggtcgttggagagcgtatatgtcataactggggccctcccttcacatgccggccgttgaggacagcctcttccagtatgtccccccggtaacgcagcttcagagagaagaaggggacatcctcctcaatgagcctcagaaagatctcgtccccctcccagtgggggatggtgcacagctgtgtccagggcagccactccaggtcgccctccgggcagtcggccctcagggttccggtaaagcggtcgatggtgaacagatgcatgtactccgtgggccagcggtcggagacaaaagtgaccagcccccgatagcggtattccgctggggtgagtccggtctcctcattcacttcccggaacatgcagtcctcggggctctccccgtcctcgaacttgccgccgatgccgatccacttgccctgattcagatcattctccttcttgacccggtggagcatcagacactgaccgccctgacggatgtagcagagggtggtgttgatcatggcaggataccgcctttccataatagtgctgccctcagtatagcacggcgggaagaagggcgcaagggaggcgcctatcccggcagggacatgcagaggagagggaagggattgccctgctcgtctgtctccgtgcggctgcggacctgaaaacccatgtggagatagaaatcgagggcttgagggttctgctcattgacgcacaaagaggtgacaccgtaccgccggatgccccgctggagcagctgccggcccagaccggtcccccgcacgtctggggagaggaagagcatctccagcctggtgccgtcgatgcccataaatcccacggggatgccctgatcggagaaggctaccaccagcaccgggacctgggccagagcctgggggacgtagacagccagggaacggatgttctcttcggacaggaagtggtgggtggcccggacggaggactcccacacctggcacaggcaggtgagcagctcctgagagcgggcattgatttccaaaagtttcaaggcaaaaggctcctttcgggaaaaacggtccgggccccttcggggcccggaccgagcttaaatgggtgcagatcagaatatagcgggatgctggtcatacattgaaccggaacaggatgatatcgccatcctggacgatgtattccttgccctcggagcggatcaggcccttctcccgggcggcggccatggagccgcaggccatcaggtcgtcgtaggagaccacctcagcccggataaagccccgttcgaagtcggagtggatcttgccggcggcctgaggggccttggtccccctgcggatggtccaggcccggcactcgtcctcgccgctggtgaggtaggagatcaggcccagcagggtgtagctggccttcaccaggcggtccaggccggactcggccacccccagatcgtccaggaacatcttcttctcctccgcatccagctcggcgatctccgcctccagcttggcgcagaccgggatgacctgggcgccctgggcggcggcccgctcctccaccagccggtagtaggggacggcctccgggtcggagaagccatcctcatccagattggcggcgtagatcaccggcttgagggagagcagctcgctggtggcaatgagggcggcatcatcctccggcacctggggcagatagccccgggcagacttgccctggtcgagccactcccgcaggccctggaacacctccgcctcatggagaaacttcttgtcccccttggcggccttctgtgccttgtcaatgcgcctgtccaccatctccatatcggacatgaccagctccaggtcaatagtgtccatgtcccggatggggtcggtggagccctccacgtggatgacgttctcgtcgtcgaagcagcggaccacatggacgatggcatcggtcatacggatgttggacaggaacttgttgcccagtccctcgcccttggaggcgccctttaccagaccggcgatgtccacaaactcaatgactgcgggggtggtctttttggggtggtacatctcggaaagcttgtccagccggtggtcagggacagccaccatgcccacattggggtcgatggtgcagaaggggtaattggcactctcggcgccggcgttggtgatcgcgttgaacagggtgctcttgcccacgttgggcagacccacgatacctaatttcacggcagaagccctcttttctcttaaaattcagtgcctgttattatatcggatttttctctgtcttgcaagggcttccggcccaactcccgctgtctttcccctcggcgggctggggcccccattatgcggggcagcctgtcttgtccccgtcggcaaagcaggcggcccgccgccggggagatgtgtccggcggggccacagaggcccctgtctctggacgcgcaaagcgcccggggctggacaagccggcctcccgagcgctttttctgtgcattccgtccccttacagcagggccacggcctcgatctccaccaatacatccttgggcagacgggccacctccaccgcggagcgggcaggataggcgggtccctcaaagaactgggcgtacacctcgttcatggcggcgaaatcgttcatgtccttgagaaacacagtggtcttcaccacggcggaccggtccagcccggcctgggccaggatggcggcgatgttattcagagactgttgggcctgggccttgatgcccgccgggatatccccggcagcggggtccaccggaatctgcccagaggtgaacaggaaccctccggcccggacggcctgggaatagggcccgatggcggcgggggcccggtcagtatgaatggcttccttcatggaatcaagctcctctcgatcgatccgatttgcgccggggcggcggtgcccggcggctgccgtcattgtagcacgtttcccccacgggcgcaacctcacagtttgtccagcacccagaaggtgaaagtcagggtcatcagaatcacgctcatgctggcaaagctgtccatcagcagggcaaaggcgttctggtggggatggcggcggcgtgtgcgctctgtccgggctgcgggagcggcggaaaccggctcctcctggacgtcctgcatccggctgcggtattcgcacagatcgatcacattgccggagcggcggacgaaattatgggtggtatagtacagggtctgcatcatgttccctccgttcctgaatcttatctgcagtataacagtgtgccggtcccaaaaaccggactttttctctgctccataagaaaacatatgttctacttttaaaatacaacatatgttctattttgtcaagaggaatggaacatattttcgattcactgggacaaaaatgccagtacccgcgctgggaggtctgcggcctcctcgtagagtccatgtcccagctcgggatagatccacagccggctttggctcaagtgctctgccagcaccccggccgcctctgcccccaccacttgatcccggccgccgcccaccaccagtgcaggacagccgatccgtcccagcgcgccgcgggcgtcatgcccgaggcaggctctggcctgaatgaggaagcgctggtagctcctgggccgcccgatggtgcccagcaggggcagcagcagccggtatcgccgcaaataccgctgggagtaagagcgctccgctgtgtcccgcatcagccttcggtaatccccgcgttccgccagcagcagccagcgccccacggtctcctgcaccgtctcgttggcccagccggctgtcaccaccaggacgaggcgcctcaccaactccggtgcctccgccgccaggtgctgcgccaccattccgccctgggagatgccgagcacatccgcaccccagagccccagctttttcatggcctccgcctggtcctccgccatcccgcggatggtggccccgggctccagcccccgcctcctgctgaacagatagaccttccgctccctgccgtactcccggcaggctgccgccaggggcagggccgtctcccggacggtcctcaggccgtcccccagtccagggaggatgaccaggacccgtccccccgctccaaatcggatgtgatccttctcccagccgaccccccgcacggttccgcgctccacgccaagcaccgctacccctccttcattttttccatgataccactttccctgccgcctcacaagcggggaaaaggcccgtcggcccttgacgccgtgttttttttatagtagaatgatgctgtatctaaaaacagccgcatggctttgaaagggaagagtaacccccgccggggtgcagcgagaggacggacagtgcgagtcctccgatggcgcgggtgaaggccccctggagccgcgggcaggaaatggcccgccggtcccccgccgttatcgggtcagagtgcgtgccagccaggcacgaattcaggtggaaccacggacaagtttttgttcgccctgagccgacaccggctcagggcgtttttttgccccgccggaatgaccgtgtacaactaaaatcacgacaaaaaggagcttgacacatgaaaaacagtgaaaagaccatggaaaagatcgtcgctctgtgcaagggacggggatttatcttctccggctctgagatctatggcggcctggccaacacctgggactacggtcctctgggtgtggaactgaaaaacaatgtgaagaaggcatggtggaagaagtttgtccaggagaacccctataacgtgggtctggacgccgccatcctgatgaatccccaggtgtgggtggcctccggccatgtgggcggcttctctgaccccctgatggactgtaaggagtgcaaggagcgcttccgcgccgacaaggtcatcgaggactggtgtcaggagaacagcttcgagctgggccacagcgtggacgccatgagccaggcggagatgaaggcctttgtggaggagcacaacatctgctgccccacctgcggcaagttcaactggacggacatccgccagttcaacctgatgttcaagaccttccagggggtcaccgaggacgccaagaacaccgtctacctccgccccgagaccgcccagggcatttttgtcaacttccagaacgtccagcgcaccacccgccggaagctgcccttcggcgtgtgtcagatcggcaagtccttccgcaatgagatcaccccgggcaacttcaccttccgcacccgtgagtttgagcagatggaactggaattcttctgcaagccggggactgagctggagtggttcgcctactggaagcagttctgccacgactggctgctgggcctgggcatccgggacgagaacctgcgtctgcgggaccacgaccccgaggagctgagccactactccaacgccaccaccgactttgagttcgtcttccccttcggctggggcgagctgtggggcgtggcctcccgcaccaacttcgacctgaccgcccaccagaacacctccggcaaggatcagacctactttgaccaggagagcggcgagcactacatcccctatgtagtcgagccctccctgggcgccgaccgggtcaccctggccttcctggtggacgcctatgacgaggaggtggtggatgccgagaagaacgatgtccgcaccgtcctgcgcctccaccccgccctggcccccttcaagtgtgctgtgctgcctctgtccaagaagctgggcgacaagggccgggagatccaggccgagttgtctaagtacttcatggtggactatgacgacgccggctccatcggcaagcgctaccgccgtgaggacgagatcggcactccctactgcatcaccgtggacttccagaccgtgggcgacgacaagacccccgcggacaacgcagtcaccatccgggaccgtgacacgatggagcaggtgcgtgttcccatcagtgagctgaagagctggctggaggagaagctgacctactgatctttcctatcaaaagaggccccctggagctccagggggcctctttttcatccctccgtcagggaggccgtaaaccgaatgaccagatctcccgcgccggggtcctcctgatccagcttggtcatcccatcgctgtacgaggtgcggctatatccccgggcggtgagcacctccagttccagggtgacgccccccatcccctggactttcccctgagtccccgccccttggaggcgggtgtcctcaaggatgctcaacaccatgtgcagcgatgcccgccgggcctgggtaaagcgctcttggcagaggaagctcccctccccagcctctggggccagggcgaagaggaggggggacaaaatgttcatggccggctccagcacttccagttccgtttggtaggggttgcccgccgcgtcccatgtcacgctccatccggtcacgcggccatcctggtccaccgtccagacgaccgggctccactccccagcccccttctccagttcgatccactgactccagctgacataggcggagggctggaccgcccagctcccgtctctgttcagagaggtcctggatgtagtccccagaagctctgtccggcgtctctcataccagttgtagttctccactgcctgctctgcggtcagcggctccgtgggataagggggaagatagctccggtcggtcaccagaaattctgcggccgtgaccagaaggcagagcgccgccaggactgccccccgcccccacttcatgggccgggcggtatagctcagcccctggtcccaagacattacctggtccttggaacacttctcatagcagtcccaaaggcgggcaatgttgtagatagggatgcccagccccgtcccgcggaagaaaacgcccaccagccggtcgcccgcctcctcccatgtcagcttccggccgtcctcccgccgtacccgcagccccatgatccacttgccgggggtgtaaccccaggcggccagcaggatcggctccaggaggaacaggaacagccagcccccgtacatatcagccaggcttctcagcgccccatccaggacctggtcgggggcataccattccagcaccagatagcgcacggccatccacagacaggtgcacagccctacatccagcccccgggcaaagtatcttctccaggggtagggggcggcggcaatggagtcccgagacaggtccacctgccgggagggcggcaggggccggctctccagctccttgagccagggctccgggtccagcgtcccgaagtccacctctgtccggctcatctccaggcacacctgggcgtagcgctccagatccccccggtctgcctccagcacggcggcctgctcccgcagggcctgagacagggtcagctctcccgccttcagccggctgatggtccccacctccaggctcagcttccgcagcagcttgatcttctccagagtcgccgcatcctcctccgagtagtcacgatagttgttctcccggcgctccggagcgatcaggccctcctgttcatagaagcgaatagtggtccggggcaggccggtctgccgctccagctccttaatggtcatggtcctccctcctttgtccccagtataaagtatgcaccaggttgacagtcaagaggaaatttcctttctcctccttttttgcccttccagcaccgcccccctctccctgccctaaaagaaaagagccccgcctgctcggaaagcaggcggggactcactttgggaaatcttgctgttacaccagctggatgatggccatctcagcggcgtcgccgcggcggggaccgatgcggacaacgcgggtgtagccgccgttgcggccggcatacttggggcccagctcctggaacagcttcttggccacatcctctttggtgatgaagcccagagcctggcggtaagcggccaggtcgttctgcttggccagggtgatcatcttctcggccagaggagcgacctccttggcgcgggtgatggtggtcttgatctggccgttctccagcagataggtcaccatagcgcggagcatggcccggcgctggtcactggtgcggcccagtttacggtgtttcagagacatatcagacactcctatatttcgcgcggcgaaatttctgaattcgttcaggggccggacggccccggaggacacccttgcggggacagggaggaccctgccaggcgaagcggaacgttacatacctccgccctgtcccgggaggcgggacgcctctcagccgttgctgtcgtcgctggccagggacaggcccatcatggccagcttgttgatgacctcttccagggacttgcggcccaggttgcgcaccttcatcatctcttcctcggtcttggagatcaggtcctccaccgtgttgatattggcgcgcttgaggcagttgaaggaacggacggacaggtccagctcctcgatggtcagctccagcactttgtcccgctgggtctccgccttctccaccacggtggagcggttgcccatggtctcactgaggtcggtgaacagggcgaaatgatcgcacaggatgcgggcacccagggaaacggcgtcccgggcatcgatggtgccgttggtccagacctccagggtcagcttgtcatagtcggtggcgtcgcccacacgggtgttctccacggtgtagttgaccttgcgcaccggggtataaatggagtctaccgggatcacaccgatgacagtctggggcgtcttgttcttgtcggcggggacatagccgcggccgtgggacagggtcagctccatgttcaggctggcgtcggggcccagagtggcgatgtgcaggtccgggttgaggatctccacctcgccgtcagacttgatatcgccggccgtgacctcacactcgccgtttgcctcaatgtagaccgtcttgacgccttcgctgtacagcttggcaatgatgctcttcacgttgaggacgatctcggtcacatcctccttcacacctggaatggtggtgaactcatgctggacgccggcgatcttgatggaagtcaccgccgtgcctggcagagaggagagaaggatgcggcgcagagagttgcccagcgtggtgccatagcctcgctccagcggctccactacatatttgccataggaattatcgccggggttctcaatacattcgatgcggggcttttcgatttctaccatatgctatataccctccttttcgcgacagcttgcaagcactgtctcattcagctcaccaattctgagggttttctaagcgaattacttagagtacagctcgacgatgaggtgctcttccacggggaagtcgatgtcgtcccgtgcgggcatagcaacgactttgccctggagggtatttttcgcgtggtccagccacttgggcacattgacctggatggcgtcctcgcccagcaggcgcttgaacttgacagaggaacggctcttctcccggacctcgatgacgtcgcccaccttcaccaggaaggagggaatgtccacccgctggccgttcacggtgaagtggccatgggtcaccagctgacgggcctcacggcgggtcatggcgaagcccaggcggtacaccacgttgtccaggcggcgctcgatcagggtcagcaggttctcaccggtcttgccgggcatccgggaagccttctcatagtacatgtggaactgcttctccatgatgccgtagacaaacttgaccttctgcttctcggtcagctgaagggcatactcggactgcttcttccgcatctgacccttggggttgcggttggtgttcttcttggcatagcccatggcagcgggggacaggttcagggccttgcaccgcttggcaataggctgcatatttctagccatgtgtcaaaaacctccttcttccagatcagacgcggcggcgcttcggggggcggcagccgttgtgggggaccggggtcacgtccttgatcagggtgacctccaggcccacggcctgcagcgcacggatggcggcctcacggccggcgccggggcccttgacaaagacctccacgctcttcaggccaaactccatcgcggccttggcagccgtctcggcggcggtctgagcggcgaagggggtggacttccgggaaccgcggaatcccaggccgccggaggaggcccaggacagggcgttgccctgcatatcggtcacggtgaccatagtgttgttgaaggaggagcggatatgcacctggcccttctcaacattcttgcgctcgcggcgcttgcggataactttcttacccttagtagcagtagccatgcttatccctccttacttcttcttattggcgacggtacgcttgggacccttacgggtacgggcgttggtcttggatctctggccgcggacaggcaggcccttgcggtggcggatgccacgatagcagccgatctcagtcagccgcttgatgtccatcgccacattgcggcgcaggtcgccctccaccacgtagctgtggccgatgacctcacgcagcttggcctcgtcctcctcggtcaagtccttcacgcgggtatcagggttgatcccggcctcggccaggatcttgttggcgctggtgcgcccaatgccgtagatataagtgaggccgatctcgattctcttctctctcggcaggtcaataccggcaatacgagccatttattacagcacctccaatttaaccttgtctctgcttatgcttggggttttcgcaaattaccatgactttgcccttgcgcttaatgactttgcacttctcgcacatgggcttcacggacggtcttactttcattgtgataacctcctgatgaatgcctgaatggccccgtcgttgtcacaagcttcgcatcgctcacatccagccagagctgaatgttcgttcgcttcactgcccctcctctccaaagcggacccgcttcgctgggcttcgctttaaggcggcctgcggccgctgagggaacggattccccggaggcaaggctccagaggaaccagcctgtgacagcgcggtcgttaatagttacttagaacgccaggtgatacggccccgggtgaggtcgtagggtgacatctgcacggtcaccttgtccccgggcaggatacggatgaagttcatgcgaagtttcccagagatgtgggccagaatgatgtggccattgccaatatccacatggaaggtggtattgggaagggattcggtgacgattccctccagctcaatcatatcatctttcgccaagcgtgattccctccttgaaggcggccagcgcccttctcagttctcggtctgataccggttccccttgtctcagcttgtggatggccgggtggtcatactcctgccggacctcggtcagctgccgtacatggcccagcttctttgcctttggccgggagacctttcttcgtttcccgtctgccagcagcagtcgctcctgccgctggtccatagcaacgacgcagaacacgccgcccttatcccgtccggcggtcgcctggacgatttggcctgtgtaatcaaacataggctccatcctcggtgactgtgaggacctcggcgtcaccttcggtgatgaggatcgtattttcatagtgggcggccagagagccgtccagcgttttgacggtccagccgtcgggcagcacccggatctgccagtcgcccacattgaccatgggctccaccgccagagtcatgccgggcagcagacgggggccgtggcctgcggggccgaaattacgtacctctggggcctcgtggagctttgcgcccacaccgtgacccacatagtcccggaccacagagaagccgttggcctccacataggcctggaccgcatggccgatatcggacacccggcagcccttccgagccattttgatgccctcccaaaagctctgctgggtcacttcgatcagcttttttgcctgatcgctgatctgaccgcaggcataggtggcggcacagtcgccgtggaagccgccgatgaaagcacctacgtctacgctgacgatgtcgccctccttcagcttccggggaccggggatgccgtggatcacctcgtcgttcaccgagatgcaggccgaaccgggaaaaccgccgtagcccaaaaaagagggcttggccccgtggctctcgataaagcggcggaccgctgtatcgatctcatgggtagtgacgccgggtgccaccatggaaccagccagggcccgggcctgggcggtgatccgcccggcccggcgcatggcctcgatctccctgggagatttaatggaaatcagttctacgcctttcacgccttcagcgcctccatgatgacctcagtggtcccctctatagtgggctgattcgggatggggttcaggatccctttggactcatagtaccccttcagcggctcggtctcgctgtggtagacctccaggcggtgacgcaccgtctccggcctgtcatcatcgcgctgcatcagtacgccgccgcagctgtcgcatatcccctcctgtttggggggcttggcgtgaatgtggtagggtgcgccgcaggtggagcagactctgcgtccctccatgcgctcctcaatctccgcatcggagatctcgatggagagcacgtgatcaaaggtgacgccggcctgatccagggcctcggcctggccgatggtgcggggcaccccgtccaggatgaagccgcttgcgcagtcgggctgagccaggcgctcggccacgatgccgatgatgacctcgtcggggaccagcttgcccgcgtccatataggacttggcctggagcccgatgggcgtgccgtccttgatggcggcgcggaggatattgccggtggatatggtcggaatgcccagcttggcactgaggatctcagcctgtgtgcccttgcccgcaccgggggcgcccagcatgatcagcttcatacccatgatcaaagccccttactccaggaagcccttgtagtggcgcatcagcatctgggcctccagctgcttgacggtctccagggccacgcccaccacgatgatgacggaagtaccgccgatggccagggagctgtaacccaccaggttcccggtgatgatgggcgcgatggcgatcacagacaggtacagcgcaccgaacatggtgattttgttgagcaccttggtaatgaagtcagcggtaggcttgccaggacggaagccggggatgaagccgccgttcttcttcaggttattggccacctcaatggggttgaactgcatggtggcatagaaatagctgaagccgatgatcagcaggaaatacaggatgctgtagaacggcttgctggtgtcgaacagcttcaggaagccgccccagaagcccggagaatccatggtgtggccggtaaaggccccgatggtggcgggcagagaggcaatggactgggcaaagatgatgggcatgacaccgctcatgttcaccttcatagggatgtgagtggactggccgccgtacatcttccgtcccacaacccgcttggcgtactgcacaggcaggcggcgctcagcgttggagatgaacacgatgaagatcaccagggccagcatgcccactacgatcagggccaccacccaggggggcagcaggctcttctggtaggcagtgatagcggtctcgctcatccccatctgggtcagctcttccgcgctcaggccggcggcccatctggtcacgccggtgtagatgtcgcccaccatctggggaccgcgggagacgatgcccgcgaacaggatgatggagatgccgttgccgataccgaactcagtgatctgctcacccagccacatcaggaaggcagaaccggcggtgaaggacaggacgatgacgatgcccgcccagatgccgttgacgctgccgctctccaccaggccgtagctcttgatcagggtgtagtagccgaagccctgcagaagtccgatggccacagtggtgtaccgggtaatggaggcgatcttcttgcggccctcctcgccgccctccttggccagccgctccagagcgggaatggccacggtcagcagctggatgataatggatgcgttgatatagggctggatgctcagggcgaagacggtggccatggagaaggcggagccgctcatggcgttcatcaagcccaggatggtgccgctctgagccgccagataagtctccagggtggtggagtcaatatagggcaccggcacggcggaacccaggcggaagatcagcagcgcaaagatggtgaacatgatcttcttgcgcaactcagggaccttccacgcgttgcgtactgtttcgatcacttagatcacctcatactttccgccagccgcgacgatcttctccttcgcggaagcggagaaggcggaagcctggacatgcagcttcttggtcagattgccgttgcccaggatcttgacgccgtactggcacttggagaggatacccttctccagcagagcctgggcgttgaccacagccccgtcctcgaacttctccagagcggagacgttgatggactccaggggcttggcgaaaatgttgtggaaaccgcgcttgggcaggcggcgggccagaggcatctggccgccctcgaacccgacgcggacgccgccgccggaacgggccttctggcccttgtgtccacggccgccggtcttgccgttgccggaaccggcgccgcggcccttgcggtagggctgcttgttcgcgccggctgcgggagagagttcatgcagattcatttctcgagcgcctccttcgtcagttttcctcggtgacctgaagcaggtagccgatgtgggcgatcttgccccgggtagccgcgttgtcgggctgcacggtggtgtcgccgatcttacggaggcccagggcctcggcagtcgcctgatgcttggcgatgcggccgttcaggctcttgaccagcttaatgttcagattagccattggaacgtcctccttaacccacgatctcttccacgctcttaccgcggatgcgggccacttcctcggggctcctcagggacttgaggccctcaaaggtcgcggagaccacgttctgcgggttgttggagcgcaggcacttggtgcggatgtccttgattcccacggcctccatgaccgcacggacgggaccgccggcgatgacgccggtaccgggggcggcgggcttcatcagcacgcggccggcgccgaactcgccgatcacctcgtgggggatgctggtgcccgccagggacacagtgatcatgttcttcttggcatcctcgatgcccttgcggatggcctcgggcacttcggcggccttgccggtgccgaagcctacacggcccttctcgtcacccaccaccatcagggcggcaaacttcatcacgcggccgcccttgacggtcttggatacgcggttcagggaaacgagcttctccacgaactcgctgggttctctctcaaatctagccattgtcgtttcctcctcccttagaactgcaggccgccctcacgggcgccttcggccagagccttgacacggccatggtacacatagccgccgcggtcgaacaccacgttctcaatgcccttcgccttggcacgttcggccacgttgacgcccacctgcttggcggcgtcggtcttggtgccctcacaggagaaatccttctccagggaagaagcggagaccagggtcttgccgttcacatcgtcgatgatctgggcgtagatgttggtctcactgcggaagacgttcaggcggggacgctcgggcgtgccggaaatcttcgcacgcacacgcttgtggcgcttgatgcgctgggaacgagtatcaggtctgttgatcatagtggcacacctccttacttcttggcgccggtcttaccagccttgcggcggatgacctcgtcggtgtatttgatgcccttgcccttataaggctcggggggacgtttctctctcacttcggcggcaaactggcccacctgctgcttgtcgcagccgctgatgatgatcttgttgggggtgggggcctcgatcttgatgccctcgacttcctccacgatcacctgatgggagaagcccaggttcatgaccagcttgctgccctccatggccacgcggtagcccacgccgttcacgtccagctccttcttgaagccctcggtcacacccaccaccatgttgtggagcagagtgcgggtcaggccgtggagcgcgcggttctccttggcgtcgttgggacgggtcaccttcagctcggcgccctcctgggcgatggtcatgttggggtggaactgacgggtcagggtgcccttggggcccttgacggtcaccacgttgttctcttcgattttgatctccacgccggcagggatggcgataggagctcttccgattctcgacattcctataccctccttaccaaatgaatgccaggacttcgccgccgacatgggcctcgcgggccttcttgtcggtcatgacgcccttggacgtggacacgatggcagtacccaggccgcgcaggacgcggggcagctcatcggcaccggcatagacgcgcagaccgggcttggacacccggcgcaggccgctgaggaccttctccttgccggcattgtacttcagggtgatgcggatcacgccctgcgtgccgtcgtcgatcagctggaagttcttgatatagccctcttccagcaggatctgcgcgatggcctttttcatgttggacgcggggacatccacggtgtcatgcttggcgttgttcgcgttgcggatccgggtcagcatatccgcaatgggatcggtgatgtgcatgagtcttacctcctattcagattaccggcaagccggtacagacggcaaggtatcgggaattaggctcgtccccgacctgttgaccgcctctgcgccctttgggcgcatctatcaaaaccgcccgcaggcggagttgaccaccactggcggccgcctcgggcggccgcgcgctcacagcagcgcaaagccccgtagccgcggactgcgtccagcggattacgggtttcgcacacctgaaagcgtgggaaattcttttctgcgcccttgagacgcaatcggtttattatacccctgtttttcccggttggcaagggcttttaatcacgcactcgtgagtgcgtggaaagattctttgggaaggggccaggatttggccccttccctgaagatcttatagggaacaaactgccagacagtcagagtgccccttaccaggaggccttcttcacgccggggatctggcccttgtaagccagctcgcggaagcagatacggcagatgccgtagtcacgcaggtaggcgtgggggcggccgcacagcttgcagcggttgtactgccgggtggagaacttgggctctctctgctgcttcaggatcatggatttcttagccataacttctcctcctccttagcgggtggcaaagggggcgccgacgagcttgagcagctcccgggcctcttcgtccgtctgagcggtggtgcacaccacgatgtccatgccgcggatcttgtcgatcttgtcgtactcgatctcggggaagatcagttgctccttgacacccagggcgtagttgccgcggccgtcgaaggaatcggcggagatgccgcggaagtcacggacgcggggcagggccacgttgaacaggcggtccaggaactcccacatcttgttgccccgcagggtgaccttggcgccgatgggcatgccctcacgcagcttgaagttggccacggacttcttggccttggtgaccacggccttctggccggtgatggcggtcaggtcggacaccacggcatccagcaccttggcgttctcccgggcttcgctgcagcccacgttgaggacgatcttctccaggcgggggatctgcatggtggacttatagccgaacttctgcatcagagcaggagcgacttcgtcctgatacagcttcttcaggttgggcgtgttagccatttcgattcactcctcctctctcaaatctcggcgccgcacttcttgcagacgcagaccttcttgccgtccgccagcagcttgtgggcggggcgggtgggcttattgcacttggggcagacgcgctgcaccttgcaggcatagatgggggcttccttcttcaggatgccgccctggtcgccctgcttgcggggcttggtgtggcgggagaccacgttgaccttctcgacgatgaccttgccggccttgggctggacctccagcaccttgccctgcttgcccttgtccttgccggacaggaccacgaccacgtcgtccttcttgatgctcattttattcatcgttcaaaccctcccttacagcacttcgggagccagggacaggatcttcatgtaatccttgtcgcgcagctcgcgggccactgggccaaagatacgggtgccgcgggggttcttgtcctccttgatgaggacggcggcgttgtcgtcgaaccggacataagagccgtccgcgcggcgcacgcccttggcggagcggacgatgacggccttgaccacctcgcccttcttgacctgaccgccgggagcagccttgcgcacggaagccacgaccacatcaccgatgttgccgaacttgcgcttggaaccgcccagaacgcggatggtcttgatctccttggcgccggtattgtcggcgaccttcagatagctttcttcctggatcatgccggcacctccttatttcgccttctcgatgatctcaaccacgcgccagcgcttatccttggacagggggcgggtctccatgacgcggacgcggtcacccacgccgcactggttgttctcatcgtgagccttcagcttataggttctctttacgatcttcttgtacagaggatgggccacgcggtcggcgatggcgaccaccacggtcttgtccatcttgtccgaaaccaccaggccgactctggtcttgcgggaagaagttctgttttccatgtcttagttcctcctcttagcggccggcgagctgctgctcgcggatgatggtcttgacccgggcgatatccttcttgacctgagcgatccggattgggttatccagctggttggtggcgtgctggaggcgcaggttgaacaggtccttcttcaggtccaccagcttgctctccagctcggcggcggacatcttacgaacttcattggccttcattacgcttcaccacccttctcggtctcttcacgcttgacgatcttgcacttgacgggcagcttgtggctggccagacgcagagcctcgcgggcgacctcctcggagacgccggcgatctcgaacatgacgcggccgggcttgaccacggccacccagtactcaggggagcccttaccggagcccatgcgggtctcggcaggcttctcagtgaccggcttgtcggggaagatcttgatccagaccttaccgccgcgcttggtgtagcgggtcatggcgatacgggcggcctcgatctggttgctggtgatccagctgggctcgatggcctgcaggccccactcgccgtaagtgacggtgttgccgcggctggccttgcccttcatgcggccgcggtggacacggcggtactttacgcgcttaggcagcagcattactgagcgcctccttccttcggagcattggcctgaccggcgggacgggggccacgattgttattgaaaccaccctgaccggcgggacgggggccgcggttgaagccgccgccctggcggtcccggttgaagccgccctgacggcggtcaccgtcgcggcggtcccggcggggacgctcccggcgctcctgatagggcttgctggtatccagggtgcggggggtggtgcgcagggtctgagtcaggacctcgcccttgtagatccacaccttcacgccgatgcggccgtaggtggtggcggcctccgcgaagccgtagtcgatgtcggcgcggagggtctgcagggggatggtgccgtcgtgatagtgctcggtgcgggcgatctcagcgccgcccaggcggccggagcaacaggtcttgatgccgcgggcgccggcgcgcatagcgcggcccatggcgttcttcatggcgcggcggaagccgatgcgcttctccagctgctgagcgatgttttccgccaccagctgggcgtccatgtcggcgttgcgcacctcgatgatcttcaggtcaacgggcttgcccaccatggcggtcaggccggcctggatcttgttgatctcctcgccgcccttgccgatgaccacgccgggccgggcgcagtgcagatacacgcggaccttggcgttgtcgcgctcgatctcgatcttggggataccggcggagtacagggtcttcttcaggtagtcccggatcttcttgtcctccaccagcaggtcgcccaccttttcgttgcgggcataccagcgggagtcccaatccttgatgacacccacgcgcaggccgtggggattaactttctgtcccatagttctcctcctcccttagcgctcgctcaccgcgatggtaacgtgagaagtgcgcttgttgatccggtacgcacggccctgggcgcggggcatgatgcgcttgatgatggggccgggattggcgtagcaggcggacacatacagcttctcagggtccatctggtggttgttctccgcattggcggcggcgctcttcagcagcttgagcacgggctcagaggcagccttgggcgtattcagcaggatggcggtggcggtggccacgtccttgccccggatgaggtccaggacgatcttcaccttacggggagagatccgcagatatttcaggttggcttttgcttccatcttttctctcctccttacttaccggtcttgctgcccgcgtggcccttaaaggtgcgggtgggcacgaactcgcccagcttgtggcccaccatgtcctcggtcacatagacggggacatgcttgcggccgtcgtggacagcaaaggtgtggcccacgaaagcggggaagatagtggaggcgcggctccaggtcttcaggaccttcttctcgccggtctgattcatctcatcgacccgcttcagcagctcaggggcgcaaaaggggcctttcttgatacttctgctcatcttttactgcctccttacttcgcgttgcggtgcttgacgatgaacttctcagtgcggttcttcgtcttgcgggtcttgtagcccagggcgggcttgccccagggggtgacagggccgggacggcccaccgggctcttgccctcgccgccgccgtgggggtggtcgcaggggttcatgacggagccgcggacagtgggccgccagcccatgtggcgcttgcggccggccttgccgatctggatgttggcccagtcggtgttgcccacctggccgatggtggccttgcagttctcccggatatagcgcacctcaccggaggggaggcggacctgggccatgccattctccttggccatcagctgggcggccacgccggcggcgcggaccagctgggcacccttgccggggtagagctcgatgttgtggatcatctcacccacggggatgttggcgatgggcaggcagttgcccggcaggatgtcggcgtcggggccggtcatgatgatgtggccggccttcaggccgttgggggccaggatatagcggcgctcgccgtcctcatactcgatcagggcgatgttggcggagcggttggggtcatactgcaggttcaccacagtggccttcccttccttatcgcgcttgaagtcgatgatgcggtacttctgcttgttgccgccgccgcggtggcggaccgtgatgcggccatagctgttgcggccggcgtgcttgctgaggacctcagtcaggctgcgctcgggcttggccttcttatcgatgccctcgaaggcggacacagtcatgtgacggcgggagggcgttgtgggcttataagtcttaatagccattgttcaatttcctccttacaccatgccctcgaagaactcgatggccttggaatcggcggtcagggtgaccatggccttcttccagctggggcggcggccggcgggccgggcacccatgcgcttcagctttccctgcatgttcagggtgttgaccttggcgaccttgacgccgaagatctgttccaccgccttggcgatctcgatcttgttggcggacttggccacctcgaaggtgtagcgcttcatctcggtatccgccatggactgctcggtgatgatggggcgcttgatgatatcataagcggtcattacgcaaacacctcctcgatgatggccagcgcggccttatcgatgaccagctggttggcgttgacgatgtcatagacgctcaggaccttggcggtggtggtgaccacgccggggatgttccgggcagacttgaccacgatctcgtccacctcaggggtgatgaccacggacttgccggcgccgataccggcgaggaagccgcgcatggtcttggtcttgatctcgtccagcttcaggccgtccaccaccttgatgtcgccggaggcggccttggcggacagggcggacttcagagccaggcgcttcaccttcttgttcagcgcatagctgtaagagcggggcttgggggcgaacacgatgccgccgtgggtccactggggagcccgggtggaaccctgacgagcgtggccggtgcccttctggcgccagggcttcttgccgccgccggagacctcagcgcgggtcagagcagactgagtgccctgacggcagttggccaggtggttcttgaccacctcatggaccacagcctggttgggctcgatgccgaagaccgcctcggagagctcgatctcaccgacctgctggccggccatgttgtacacgtttgctttcgccatgatttacactctcctttccttacttgttgcgggcggaggccttctgcgggttgacacgtgcggaagccttctgcgggttgttgctgatgccagcggcggggcccttcttttccacgtgagtcttgacagtgctcttcacgaacacgatgccgcccttggggccgggaatggcgccgcggaccgcgatcaggttgtactcggggtccaccttgaccacgtccaggttctggacggtgacctgctcgtcgcccatctggccagcgccgatcttgcccttgaagattttggacgggctgctgttggcgcccatggagccggcgtggcggaccacagggccggagccgtgggtctccttcaggcggtgggcgccgtggcgcttgatgacgccctggtagccgtggcccttgctgatgccggtcacgtccacaaagtcgccggcggcgaaggtgtcagcggtgactttgtcgcccacgttgtacttctcgctgtccttcagggcgaactccttcagcaccttctggaactcggtgatgccagccttcttctggtggccggcctcgggcttggtgagcttgcgctcggggatggtctggaatcccagctgaacggcctcatagccgtccttctcggcagtcttcttctgcaccacggtgcaggggccggcctcgatcacggtcacggggaccgcgtgtccggcttcatcgaagatctgggtcatgccgatctttttgccgatgatcgctttctccatattggatttcctcctatataaaggttattggtcggcgtagttggtcaccccattgggctgggggccattgctccgacgacttgacccgtccgcctccatgacgcggcggactgcgggttcaacagggttaggggagatctcagcgcttacagcttgatctcgatctccacgccggcgggaagctccaggctcatcagggcctccacagtcttgggggagggcttgatgacgtcgatcaggcgcttgtgagtgcggcgctcgaactgctcacggctgtccttgtacttgtggacggcccgcaggatggtgacgacttccttcttggtgggcagggggatggggccggagacagtggcgccggtgcgcttggcggtctccacgatcttctcagcgctctggtcgatgagctgatgatcataggccttgagacggatgcggatcatttctttctgagctgccatgggtgttcctccttaacatacatacgaagttgactctgtcgcgcttcgtacggtgagagatctccgtccacgctatcgtgcgtatcactccgggtcatgaagaaaaccggcgcatagacaggccggttttatccctgccaggcgatatacgccgtgacacggatcctctcagccgcccgattctcggacatactccgcggaagttacctcgtttccgagcaatctcccgcatcatcgcagactgcgccctcacaggcgctttgctatcatacaacaacacccccgtgtgtgtcaagggtgttttgaaaatttttcggcggtgttccgccaatttccccggctttttcctccggcctctttgggcatcctgccagggcggcccgccgcctgcgctcaggactcccgcaccgtgccgctctgccccaggagcagcgccccgtcctcccggtacaggcggagggtgtacgccgccccctcgtaccagtccccggaccaccctccctccggtgattccagcggaaacagccacacgccgtcctccagacagaagccctcctgggcgcggcggaggaagcgctcaccccccggaagcgcggtgtccacatccagctccgcccgggccgtctcccctgggatctggagaaacaggaggttgcagccgctcatccgcgtccttccgggctccgggacccaggcaatcacaccgttgatcgggaccggagccggcccctcccccaggggaaagacccccaggacctgccgcccgggccggtccaaggtgacagaatagacccgattctgggcaacacccaccacaaacggatcgaacacactcagataggtcccatcccggctctccacactccctatatctccggtattccaaaagccgctctgatatacgatctcgctccggggcagcagatactgcccctccagctgccggaacgccatctccgctgtgggcatgggacagccgtactgcccccacaccagggcggccagcgccaggaccagcagcaggttccgggcagcccttcccttgtgccccagccgggggcggcgctcccacagcgccctccatgctcccttcacgccctctcctcctccaagtccacagtaaaagtgaatatcgggctccctgggccgtagtccaggcggacccactccgccgccgggtcccagtcctccagatacagttcatagccgctgtggaagggcccgaagcccatttggctcatcccgttcagcagtccgcccgtttccgggtcctccggggaatccggccccaggccgcagactgcgccggtgctgtcggtcacagtcatccattcctcccgcagccggccccgctcccagaagcgccaggtatccacccggagatagcagtacagcccccgccgcccgtcctcccgctgccacagggcggcccggagcagtgagatcttctgtccattcactgatgctgtcaggcagggctccagggtgaggatctggtccgggtccccaccgggcagatagcggatatcgtcgcagtcccccatgaccgccgtccctggcaggccgtccatgtcccaccactcggagcggtggtcgtcccccagataggcgtcatccccccggaacataccgatggccagcagccacaggaggcccgccgtgagcagcacccggctggcctgccacaagtacctcggccagggccggtggagccgggccagctcctttccgatctcctccgcgtcccccatctgctccaccgactgccgctccgcctcctgccgccccaggtccgggaagatgcggaccaggtccgccgtcttgtcctccaggtgggcctccagctcagcccgcaccgcctcccggtcaggccgggagcggatacctgccgccgcccggtccagccagcgccttccctctgatgtctgtaccatctcgttcctccccgctcactgtctccgcgccagttcctcttcactcagcgccgtgctgacctggatctcctccacctccagcaggtccagcccagggccgtacacccgcagggtgcaggggacgccccagctcgttcttctgctttttccgcccctgcatctcttcaccgccttttccgtctccctggcccgctctgtcaggcaaatttccagagcagccacaggcactccactgccagcaccaccagcaccgcccggatcaggaagcgggtcagctgccacagctctcccaccagcgggctgtggacgcgggccagctcctcccccagctcttccgccgcccccatctcctccagggcccgctgctctgcctcctcccgagtcaggccgggaaaaatacgcatcaggtcggtggccttatcctccagatggtccagcagctcccgttccaccgcgccgcagtccgggtgacgaaagatctgctccgtagcccggtccagccatgcacgccaagccggtgcgcactccgttccccacgatcgtttcacgccgccctcacctccagatgctccccatggtccctttggtctcagaaatcaggaccccgttccggtcccaaagagtcagcgtataaggcgcactcgccagggccgccttccaggaggtctcggcccgctggtaggccagctcctgccgccagttcagctccgcctcccggaagcggaacaccatgacttccccctcccggacgctgtccgctgttctcacatcccccccaaggagctctgcggtcagccgcccggatacagccccctccggcagctccagggccatatactccaaaggcggcccgctacccccggggaccgctgtcaccgtaagcccctccggaatcggcccccgccagatgaaaaaactaggggagccctcataccaggtcagcacgctcagtcccgcggctgcgccgctacgcaccatgacggcctgatcccccgctccgctcccggacaccctgccgcgccagacccgctccgccctgccggggtgctcttcctccacagcgcagcgggcctcccactccaggcgcaacacaggatactgagccgccagcacacacagggcagccagcgccgccaggatcagcagctccagcgctagccgcttttcgccggtcataccggcgcgcctccggcctctcatccccttcacgccagagcgttggctccgccggagagcacgtcggccacgccacggtggaagctggcccactccgccttcttctccgccagcagctcccgccccttccgggtgagccggtagtacttccgcatccggccggagggggcctgctgctgatagccgctcagatacttccccttctccagcccgtggaggatggggtacagggtcccctcctgaaactgaaaggcgtcgttggagcggcgggagagctcctcgatcatctgatagccatacatgtccccgctctccagcagagtcagcaccagcagcgtagagctgcccgcgatcagccctttatcgaatttcatgttcgccgtcctttctccggcccctgccggacgatatacctagtatctctaggctcaatataccaagatattctaggtatgtcaagagggacggggcagaaaaaaggcggcaggcatggcctgccgcctttttattgttcttccagccaccgcttcaggtcccaaaggtccggggcgatgtggacatggggccactcccggaaggcagaggccggcgtggtgccattgagcaccgcggcgaactctgtccctgcattttgggccgcccccgcatccagcaccgtgtctccacagaacaaagtctcctccggccccgcccccagtcgggacatggcagccagcagcccctccgggtccggcttatgccgcttcacccggtcgctgccgatgatcaggtccagctcccccagcaccccccggttctccaggatggcctccagggtatcactgcgcttggtgctcacgatccccagcctgatcccccgggccttcagctcccggagcagctccggggcacctggaaacagagtggtctcccggcgctggcgctccatggacgcctccaggaacaggggacggaaggccgcccggtgctccgggtcccgatcccctgtaagcagggtgtaggcatcctccagcagatagcccaccgtccttctcactgtctcccggtcggggaccggccaccccaggcgggtgaatccatactggaatcccgccacgatggagtcggtggagtcccccagggtatagtcaaaatcgaaacagatggcccgatatttcatgcacatgctcccctcagccgttttttctatcttaccacagccctccaggggccgcaatcctcagtcatacaggttgcgcagaaatgcttccgccccatagcgcaggcagcgctggagcctccgctccccccgcttgatgttccgggacaccgtggacttgtccacccccagccgctccccgatctcccgcatgttcagcccctgggcataatacagggtgagcacctcccgctgcctgggcgtgacgtcctccttcagggcccggatcaggttgcgcttgagccggctgagctcggcgctgttgtccgcagccatctgccgggtgtacaccgccatatccgcggcgtacagcttgccccgcctatatcgtgtatttgacatttctccggtaccccctgtcgtagtagcgctcacagagcactgccagttcccgggcctcccgcagcatggtggacagcaccctgatccgctcggccagcatgcatcgctccccctcgtccatggtgtgctcccaggcatcccgcagttggacgatgcggaagtccagcgcccgggcatggtcccggtactccaccgaaagctccaacaaggtcatctcacgcactcctcctcttccctctttgcggcgcaggcggcgcacagcagtcctccgtccgcccagaccagctggtcacagcggtactgctccccgccgcacctcgggcataccagcacaggccgcgcctgctggatgtcccgcaacggcgggtacggcccccggctccgccggactatttggatcttctcctctgtttggtaaattttttctctctcctctcaaaataatacttgacaaaagccgagacgtctgttatagtatcccttgctgttggacagccgtcttgacaagtgctggtgtagctcagccggtagagcagctgatttgtaatcagcaggtcgggggttcgaatccgtccaccagctccacaatttcatatggaggagttcccgagtggccaaagggggcagactgtaaatctgttgcgtttcgcttcggtggttcgaatccaccctcctccaccacgtggccgcaaagttcgctttgcggccatgttttttatcctcaggacaaaaaacatgccgtccgccgcctctctgtgattctatttgaccctcacctcccatcgatcctgctctttttttgaccctaaaagtgcttattttcaagccttttagggttttctgtttccaccagcccgaagcggccggaaatggatgtcaaatgatatgagcaagccgtcccccacactcctttcggtccagcagccccctttacgggcggaacggcggccctgccggtccgggaccgcaaggccgcctgtcttcggatgcttttttactcccttctgtatagaacatatgttctaattttagtcatagaatactcccttttccttcccctgtcaaccctgttggacatctcttcctgtcggagttttctccctggtcccgaaataagggaccgcgccggcagaaggggggcgctcccgcctctcggcaggcgcaaaaagcccgggcacatccaaaacaggagtgcccgggcttctttttatctcattcagacgggggaggtctttagaaatacttcttgattccctcgggggccagggaggcgtcgtcactgatggtgatggtgaacttgatgccatgtttctcgccaaaggcgttcagccaatccaggaacttctcggtctcgttgtcgcaggggccgggaacgatcttgcacaggctgtcgatgaagatatgggtgatgtcataattgccagcgtacagaccgctgacaaagcccttcagggtggcatagctgtcgatatcgtagctgctggcctccaccagacggatctgatagtggatgtcataagtcagcttggagccccgctcgatgcagacgacattgccgtgctcggtctggacggcgttgttgatcatgtcgatcatctgcttggtcttgccggagcccttcttacccatgattactctaatcatgttactcactccttacgatgttaaacgtgggaagctggtcccttccttgctatcactttaccatatcgaaccgtttttttcaaccggattctttgtgaattttttgggatctgtccagggagggctcaaagccgggactccagcttctgcttcatctcctcatagcctggcttgcccagcagagcgaacatgttcttcttatatgcctccacgccgggctggtcaaagggattgacccccagcaggtagccggacaggccgcacacatactcgaagaaatagatcaggtaacccaccgagctctcgctgatctggggcatccggatcaggatgttgggcacgccgccgtccacatgggccaggatggtcccccgcagggcctgctccgccacaaaggacaggggcttgccggacaggaagttcagcccgtccacattctccgggtcgtccgggataaggaaggtgcccttgggctcgaagcggaccacagtctcgaacatcaggcgctggccctgctggatgtactggcccatggagtgcaggtcagcagtgaactccacgctggccggaaacaggcccttgccctccttgccctcgctctcgccgtagagctgcttccaccactccgcgaagaagcggaagctgggctcatagcaggccagcagctccaccgacttgccgctctcatacagggcgtgccgggcggcggcatactgccaggcagggttgtccattcctgggatggacagctccttcatggcccgggccgcgccctccatcagggcggcgatatcgatccccgccgcggcgatgggcagcagccctactgcggtgagcacggagtagcggccgcccacggcgtcaggcaccacgaaggtctcgtacccctcctggtccgccaggcccttcagtgcccctctggcccggtcggtggtggcgtagatccgctctctggctccctccttgccgtacttctgctccagcatccccttgaagatccggaaagccaccgcaggctcggttgtggtccctgatttagagatcacgttcaccgagaagtcccggtctccgatgagggcgatcagctccagcagcgcgtcggtggacagtccgttgcccgtaaagtagatgtcgggggtgtccttcaccttcaggttatagttgggggaggacagcagctcgatgaccgcccgggcacccaggtaggagccgccgatgcccaccaccaccaggacctgggactgccttttgatgcgctccgccgccgcctggatgcgggcgaactcctcccggtcgtactgctccggcagggccacccagccggtgaaatcgcccccggggccgttgccggcggccagcatgtcggccgctttcttcaggccggtctgacgggagaccgcgtagccctggggcagaaatccggccagctgagacagatcaagctttaacatagaaatcctcctcacaggtatcaagatctatgctttcagtgtaacacatctttttgcttttttcacgaaaaatttggaaattttcgcatttccctttttcatatttttctccggaaatcgagaaaaaacacttgacattccacccagcggcatatataatagtccatgctgttcggacgattagctcagctggtagagcatccgcttgacgtgcgggaggtcacaggttcaagtcctgtatcgtccaccatttaaaacttgatattggtcgtgggggtatagctcagctgggagagcgcttgaatggcattcaagaggtcagcggttcgatcccgcttatctccaccaaaacagagaccgacttgttttcacaagtcggtctctgtttgttaccggacctcatacacacaagctccatctacgtttttcccgctgaacgacatgctctggcagcgccctccagccacatcctcatagagaaacaccccctcatgggcctggggatatctggagaagctgtccagcatgatctcccggaggctgtatttcccgggcgccaggccagccaggatgctcggcatggtttgatcccactcttttcggttcatggctatatgacctcctttttgagtaaagaaaccgtcttggtctaatttcattatagagattttcttttactttgtcaacggttgtttttaaatattttcttttattgacattttatttgggctgtactataatgtaatcaaagccatgatgacccaaaattttttgaacgagggggcagctggataatgaacggcgagacactttccacccgctttgcgtaccactatgacctgactttgagcctggctctcccgggtccggaattttccgctgaggaccggcgcactctggagaacgggatcaattcctataatgaaagatccatctacatgaacaaccccaaacatatcagtctgctggaaatgggaaagaaccacatcaagatcaggctctcctccacccagatgctgaccaccccgggccgcggcctgcgggcgctgactgccatcctggtcaaaaccccctccttcgaaggccgcgtcacaccaggaggccagctcttccgcgtactccacacggagcgccccgatgaccgcggcggtgccccggaggcaaccgcgatatcagacgcggagctggtgaaggcgctggtggactatctgctggaacggaaagacgggtcggccgccagcagaaagaaaaaggccgcggtggaggcgatgaagcggctggccatagacgccgccatgatctgcccgccgccgaaacagagtgaacagtaaggcctttggtgcaaggaggtacactggtttgaaaagacaggaagctatccgggtcctgactggccgcctcagatcttcccgtgttaggcacagcgcaggctttgacagcggtcagatgcagatcaccatgggattcaacgcggtgtatgccccggatcaccgcatcgagtcctgtatctggttctacgaggacacaatggaggcaaggtgctactactcctccctgggtgcagaactatgccggaaaagcagacatatcgacgctcttctccgccttctgaattttatcaatgcccgggtctttccatcctgccgcggcagcggatatatgctgtacagcccgcacatcctctacacaccgcggatctatctgacagctgacggctgctttgacattacgatcaccaccatcatcccctatgacttcttcggccttgctccgctggagacattggactatatcacgatatgctgcccggaactgctggatcggctggctctcccgatctactgcgtgctgctgggcaaagagaccgcggatggtgccatctcacacatcgaaagggagttcctgaaaacgtaatgtcctgcagaagagagtcagagcagcatgctgcggctcatatttgtgaccgacgccaccgcagcgggaaggctctggtccatccggcagaatcaccccgaaagcgaatctgacgtgctcaatgtgtatcactgtcagcagcgcgtctatgaggagatatatgtcaaggagcaggtctccctggagggggacgagtgcagctttccatctgcgccaaccgccgttccagctggagccgggcgctgcgcccctatggatccgctttaccggtcaagggtctgaatcataaaaaggagtctctgtcatgaaatcttttacctataccatcgtcgatcctgtaggcattcacgcccgtcccgccggcctgctggtcaagacagccaaggccttctccggtaccgagatctccgtcaccaagggtgacaagaccgtcaagagcacccagctgatgaagctgatgggcctgggggtcaagggaggcgacaccgtcaccgtcaccgccgaggggccggacgaggacagcgccatctccgccatggaacagctttttaaggagaatctataagcgagccccgtgcccacggtccgtttgacacggggctttttgaaaagagggaacgacatgaagattttgcaggggcaaggggtttccaaaggtgtagagcacggccccatctatttttgccgccgcagccagacgctcattcagcccgacaaagccgacgacccccggttccagggggagcggctggaccgggccatggagcagacggcccagcagctgggacagatggccgaactggcccgggcgcaggcgggggacagtgccgcccagctgtttgagacccacgccatgtttttagaggacgaggactataccggtgccatggaggagctgctggccgaggggtactgcgccgagtacgccgtggaccaggccggggagcagttttccgccatgctggcggccatggacgacccctatatgcaggcccgcgccggcgacgtcaaggacgtcaccgggcgcattttgaacaacctgatgggcgtggtggaggggggcatcgactcccaggtgccggtgatcctggccgccgccgacctggccccctccgagaccatccagctggacaagagcaagatcctggccatcgccacccagggcggctccgggaacagccacaccgccatcctggcccgcactatgggcatccccgcggtctgcggcctgggggccagctttaacgagagctaccacggcaaacaggcctacatcgtgggggagaccggccaggtgatcttcgacccggaccaggagaccctccagagcctgaaggcccgccaggcgcagcaggcccagcgccgggcgctgatgcgcagcatggcgggcagagaggatgtgactctggatggccggaaaatcaagctctgctgcaacatcggctctctggaggacgtggatgcggtgctggccaatgacggccagggcatcggcctgtttcgctcggagttcctctatctggccgccggcggctgcccctccgaggaggaccagttccaggcctacaagcgagtggccttggccatgaagggcaagcgggtcatcgtgcgcaccttggacatcggggcggataagcaggcgggccgtttccatctgaacagggaggagaacccagccctgggcctgcgggccatccgcatctgtctcaaccatcccgaggtgttccgcacccagctgcgggcgctgtaccgggccagcgcctgcggtaagatcgccatcatgttccccatgatcgccagcgtgtgggaggtgaaggagtgccgccgggcctgccagcgggtgatggatgagctcaccgccgaagggatccccttcaacccggacaccgagatcggcatcatgattgagactcccgccgccgtgttcatggcgcctgagctggcccggctggtggacttcttttccgtgggcaccaacgacctgactcagtacacgctggcctgtgaccgacatcgcagcgacctgggcaagtttttcgatcctcaccaccccgcagtgctccgggctctgaaaatggccgccgacgccgcccacgaggcgggcatctggatcgggatctgcggggagctgggggccgacccggatctgctgcccaccttcctggccatcggcatcgacgagctcagcgtcgccccctccgccgtgctccccctgcgcgccgccctgcgcaagagcatcgcaaaccgctgcaccctcgacctgctgatgtcctgagccgagccaggcccgctcccatccggacaaaaggaccggtcgtgcccctgtgacacaggggcacgaccggtcccgctttctctttcagccgggaggcgcgcggctcctcccggctgtcaggcgccctttctttcgggagggccgccccctatccgcagcagctttttcttcaattccccgccgttgaaggggaccagaggatagaggtagcactgccctgagatggtccggttggacaccagcaccaaaaacagcaacgccgcacctcccacaaagccccacaggcccagaagtccggtagccaccagcaggatcaggcgcatgaacttcagcgcatagcccagttccagattgggctggttatagttggcgatggccaccaccgccatatacagcatcacttcggcggaaaaccagccggactggaccgcgaagtcccccaggatgatggctccgatcatggagaaggaggtggtcaggatgttgggcgtattgagggcggccagcttcagcccgtcgatggccagctccaggatcagcagctggaggagagggggcacctgcgccggctcctccatcagaataaactccagccacccggggacccgttccggctcctggatcagcaggagccacaccggggtaaggaaggtagtgagaaaagtggtaaaaaaccggaccagccgcaggtaggagccggtgatgggcgggaagtagtagtcattcgcctcctccatcacgtcgaagagggtggtaggcaggatgatggcggcgggggaattgtccaccagcaccaccacatccccttccaggatctgggccgccgccgcgtccggccgttccgtgaacttgaacttggggaagggattgtaccaccgcttccggaccagcagctccgccaggctctcctgattcatggtcaaagcgtccaccctggcctgggcgatgcgctcccgcaccgtgttgaccagctccgggtccgcccggccctcaaaataacacaccgccacgtcggtcctggaggtctcccccacctccaggtgctccacgcacagccggggcgagcggatgcggcggcggatcagcgccgcgttgaagaccatagtctccacaaagccgtcccggctcccccgaaaggacttgtcctggtccggctccgaggtggtccgctggggataggtgcgctggtcgatcagcacgcactggtccattccatccacgaacaccgcccatactccagacaatatctgccccacgatggtgtcctcctccccgctgatggccacctcgcagtaggggacacacgactttgagaaagtatgggcatcccggagcaggtcctcgtcctgtatcccatagaaaaattccagcagcttctccatgatctcgtccttggcaaagccgtctacaaaaaacatgcaggcctcccgcccgcagatccgaaacacccggtagaccacatcgaaattccggtcgcaccgcaaagccccttggaaatgcctgatgttccaggtgatgtcccgctccaccgccatatccctctcctccatccattttttgattagtatccgcggaacgggccgggatataccctccgccgcatgcttgacacgcccttttccccatgctaggatgaacaaaagaactcaaaggaggcccccctatgctctacggctgctgtgtcaatctgctccccaaaacactggaccggatcggtttggaatacgccggacgcctgaagcggctgggctacgactacattgagctgcccctgaacgagctggcccagctcagcgagcaggagttccgggatgcccgaacggtgctggaggagctggacctcccctgccgcgcctgcaacgactttatgcccgcccgctttcagatcaccggctccgacgtcacctccagagcggagctgaccgactacctccggcgggccctggagcgggcggcccggctgggcatctccttcgcggtcttcggcagtccctggtcccgcagctgccccgagcactactcccgggaggcggcctttggccagatcgccgaattcctgtcccttgcgggggaggaggccgccccatatcaggtggtcattgccatcgagcccatcaaccggggcgagaccaacatgctcaaccacttctccgacggggtacggatggcccgcacggtggactaccccaatgtccgggtcctgtgcgactactaccacctgcggttcgagggggactccccctctgtcctgctggacggagggagagagctgttggtccacacccacatctcccagctggaaggccgccgctaccccactgacctatctctggagcccacgctgcctgagtacgccggggtccttcggcagatcggatatgccggcggggtgagcgtcgagtccaaggtggatgccccggagcattgggaggagcaggcggcgctggccctggcgaatctcaggcaggtgctgggctgaccgttcccccgccttccttcaatatttttctctcatgaaactttttcttccatccagccgtctattaggatgggagaggaaaggaggcaccatgagcccttcctcgatgcagcagcaggtggaatcccagcttttggcgtcctacgaatctctgtatcgcttggcctatacctatgttaaaaatccggatgatgccatggatgtggtccaggaaagcgccttcaaagccatctcccgctccgccgacgtgcgttcgcccgctgccatccggggctggctgtgccgcatcgtggtcaatacggccatggacgtgctccgcgcccggtcccgtcaggctgacgcggaacacatccccgagaccggtcaggaggatgtctatcaggacacggatctgatgcaggcgctggacctgctggacgagcgggagcggacggtgatagtcctgcgtttttttcaggagctgaagctccaggagatcgcccaggtcaccggagagaacgtaaacactgtcaagaccattttgtaccgcagcctgaagaaactgaagcttgagctctctgaaggaggccctatccgtgaatcaagaccgtctcgatcatctgaaacaggaatatgacgccatccccgtccccccggagctggaggagcgggtccgcgccgccatccggcaggccaggccggccggggagaagccgccccgggtcctccggctggaccggttcctgcggcgtaccggcctgtccgccgccgcggccatgctggccgtcgtgctgctggccaattccggccccggcatcgcccacgctatggagcaggtgcccgtcctgggggccatcacccgtgtgttcaccttccgcacctatgaggaagaccggggcaacacctccgcccacatcgacattccctcggtggaggggggcggggacgcgctgagcgccgccatccaggcgtacaccgacaccatcatccaacagtatcagcatgaagccgcccttcagggggagctgggccactatgacctggacctgacctacaccgtggccaccgacaatgagaccgtttttgccctgcgcttcgaccagaccctggtgatggccagcgggaatgagtcggtcaagatctacgccgtggacaaggctacaggggagctcctcaccctgtccgatctcttccgcccggacagcgactgcctctccgtcctcaccgaagaggtccagcgccagatggcggaacagatggcctccgatgaccaaatccactactggctccatgacgaggacgtgggggacctgaacttcactgccctggacccggacacctccttctacatcgatggggaggggcggctggtcctggtctttgacgagggtaccgtcgcccccatgtatatgggcataacagaattcacgattcccgcccaagtcgtggaggacatcgccctgccccagtatctgtcctgagccgtccggcggtccggaccagagcactttcggggttccctttccttttcccccgggacgcgggaaatcgggacagcagttccctgacaggagggcatctttttatgagaagtcaccaccgtaccgccgccctgctcaatatggtcctgagctgtgtcatatgcagcatagccgtcaactggatcgccctccccaacggctttgtggtcacgggcatcaccgggctggctatgactgcggagaccttcaccgggatcaactacgccctgatctactatgggctgaccctggccatcctgctcttcaccgccgtgaccttggggtacaaggaggtgtccagcatcctgttcctgtccatcctctaccccctggtcctgtgggtgctcaaccatgtgcaggtggagatcattctgaaggagaagctgatcgcggtcatgttcttcggcgtggtctacggggcgggcgcaggcctgacctaccgcatggggtactcctacggcggaacggacaccctgagcaagatcctcaagcagaaggtctttaaggccgcggagctgaaaaacctgctgctctgcctggacgccgtcattatgctgatcatgctctcagccttcagcctggatacggtggcctacgcctttgtaggacagatcatctacgtgaacagcatgaactacgtcatcttcaacatgggtccccgcctctatgagatccagatcgtctgtgaggacccccgggccatcgagcgttttatcatcgaggagatcggtaagagcgccaccatctccaaggtcatcgggggctactcccaggcggacaagatccagctggactgtgtctgcaactcacgggagtatgtccaattgcgggagttcatccgggacagcgggatcgactgcttcatcaaggtcttccccctcacccacgtcttcggccgcagcaaggatttccaccgcctcagcgaccagaatctgtgacaaaaagcgggacacatatgtgtcccgcttttttctccccattgcccaagaggcggttttcattttccctgttctgtggtacaatgctcctgcgcccctctggggcaggacttttgactttccggagagagaccatggaacaggaactttttttgcccaccctgatgcactggcagtacggcaacaactggtgcggcagcctgaagcgggccagcttctggatcacccctaaagatgaacagctcaccgcccagctgtggaccggaccggccatccgggaaaacgcggagatcctgtacaccgcacagttccccatcagcgacgaggggctggagcagctccgcacctggctgctggagcacgccgctgctgtcaacgccgccaacccggagtccttccgctatgcgtggtagcccccggcgccgctcttttccattccgatgaaacaggaggccgcggccccatgaatctgaatcaactctactatctccaggccatcgcccaggccaggggcctcacccgggccgccgacgccctctatgtcactcagtccaacctgagccactccatggccgcactggaggaggagctgggcatcccccttctctacaaaaacgggcgggataccctgctcactccgtacgggcaggagttcctcgcctacgccgagcgggccatccaggagatcgaggaggggaagcgggtggcccagtcccggtgcagccccacccggggccaggtacggctgggcttcatcagcgctgtcagcgccactctgatcccctggtgcgtcagccacttctaccagaacccggacaaccagggtattacttttacctttgacgagaaacccacccggcgcatcgccgccgattttacccaccacgccctggacatcggcttcggcacccggttcgacgacagctcatttgagttctgccccgtggtgcccgaggagctggtggccgtggtcccagccggacatcccctggcccagcaggagcaggtgacgctggagcagttgagccgggagcggctggtgatctacaaccaggccagccccacccgcaatctggtgctgtccatgtttcgtcagcaggatctccagccagatgtcgctttcgaggtggccaccgaccacatgttagccagctttgtctcccagggactaggggtgggcatcatgccccgcatgttcggcctccggctctactctgtccgtcccctctacatcgcggacactgagacccaccgcatgctctatatgttccgccccaaggaccgcagggtcctgcccgcggtccagcggttctgggactttgtgctggaggtctgcgcccagtaccagtctgacgaatagatacggaaaggcccgtcctccccgcatccgcgggggaggacgggctctcttctgtcccgccggctcacttgtccgggtgcaggccggaccagcctgtctggggcatggtccgcagccgctccaagtcctccgcctccagggcaaagtccagcgccaggttctggcgcatccgtccagcgtcggccgacttgggcaggggaaccacgccgcagtccagggcgaagcgcaggcagatctgggcctgggagaccccgtattttccggccagctccgccagcaggggatcatccgccagcctctggcggcccagggggctccatgcctccaccaggatctggctggcccggcagaactccaccgtctcccactggacatagccgggatgaaactcgatctggtccaccatggggggcactgtacacacctccagcaggttctccaggtggtgaggcaggaagttgctcaccccgatggcccggacccggccggcccggtacagctcctccatggcccgccagctcccccggtccagctccttccactcctcgcaggcggcatccggcctgggccaatggatgaggtacaggtccaaatagtccatccccagcgcctggcatgaggcgtcaaaggcggccagggtcctgtcgtagcccagctggtccttccacgccttagtggtgatgaagaactccgaccggtccaccccggaggcggccaccgctctgcccaccgcctcctctgtgtggtaggcggaggcggtgtcgatatgccggtagccagcccggatggcctcagagagcaccgcgaagccgtcggtctcccctgccttccaggtcccgaagcccacctcgggcatctccacaccattgcgcagcagcttgtttttcatatcaatttctcctttcttctcccgccagacggcggaccgtcagttccctgacctcctccggctccaggaccgggataggccgtcccagcagcaggcccagataccgctgcttgcagtactgctccagggcctgggtccggtgccatgcctggaccacgtcccgtccccaggtcaccgccccgtggtgggccagcagggcggcgctgtgcccctccgccgcccgggccaccgcccccgccagctcctctgtccccaggggcagccagggcagggcggggaccggccccagcagcagggcccagtccgcggtgatgggctcggtcaggtcctcccccaggttggccgaaaacacggaatatggagcgtgggtgtggactacgcctcccacctcaggccgggtacggtagagagccagatgcatcggactctcggacgagggcctccctgttccggacagcacccgcccctccagatccacttccagcagcatgtcctcctccaggtctcccttatagacccccgagggagtaatgagcaccccgccatcggagcaccgggccgacaggttcccgtcgttggccgccacatagcccgcctgggctatctggcgggcggcctggcagatcttccgccgcagctcctgcttctctcggctccagctcacggcgcatcccccttttcccgggaaaccagttcccgcaggctctccccgaaggggggacggcagatgcctccctccgtgacgatggcagagatcaggctgtggtcggtgacgtcgaaggcggggtcccagcacctcacccccgctggcgccatgggctcctggtaccagagggagcggatctcttccccgtcccgctcctcgatggggatgtccgctccggtgggacagtccaagtcgatagtggaggtagggcccagtacatagaaggggacattgtagtaccgggccaggaccgccaggccgctggtaccgatcttgttggcagtgtccccgttggccgccacccggtcgcagcctacgaagcaggcctggacccagccgttcttcatcaccatggaggccatgttgtcacagatcagggtgacctccaccccggcccgggccagctcccaggcggtgagccgggccccctggagcaggggccgggtctcgtcggcaaagaccctcagctttttccccctctcctgccccagcaggatgggacccagggcggtgccgtaccgggaggcggccagcgccccggcgttgcagtgggtcaggatgccgtccccctcccctaccagggtcagaccgtgctccgcgatccggcggcacatctccccatcctcccggtggatggcccggcactcccgctccagcacctggacgatctgctccggcggccctgccgtccggtccgcccgggccagcatccgctccagcgcccagcgcaggttcaccgccgtgggccgggtggccgccaggccggcagcccactcccgcagccgggtacggaacgccgcctccaccggcgcccggtccgccagtcttcgggccagcacatacagggcatacgccgcaaagacgccgatggctggggcgccccgcacccgcagggtgcggatagcctccgccagctcttccggctcttccagttccagccagacctcccggttgggaagctggctctggtccagcagcctcacccggcggccgtcctccgtcagcccaagatattggtttttctccttccagcgggtctcctccatcagaccgcctcctctctgttttgattatgcctagattttcttttcctgtcaacctggaggggcctgagattttcgttgtcattttcttcaaattgcgctataatataaagaaacaggaggtacggatgaacagcctcgcccgtacctgaagccacactataaggaggcgtgtctcatgagcaactatgtcgtgtccatcagccgcgagtttggaagcggcggccgcctgatcggcaagaagctggccgcaagcctgggcatcccctgttatgaccgcacactgatccaaaagactgcggagaagagcggcctttcccccgactttatcgcccgggcggaggagcgggcccgcagccggttccacctgaacatcgcccccatcggcatcggcgtccccaccttcacccaccagggcatcccggtcagccatcaggcattttttgcccaggccgacgtgatccgggagctggcggcggaggggccctgcgtcatcgtgggccggtgcagcgactacattctgggggaagaccccgcttgcatcaaagtctttatccatgccgacatggccagccggatcgaccgctgtgtggcggagtatcacatcccctccgacaacatggagagccggatcatccagatggaccggggccgcgccaactactataactattacaccggccacacctggggggagatgcgccggtatgacctgaccctcaactcctccatcaccggcatcaatggcgccgtggagatgatcgctcagctggtgcgcctgcgctctgctcagttggaccaggcccctacccaggcgccctgaggcgccctgaaaggagttcccatgtgtgacgcagtcctctctccccgcatcctgatctcaggtgcggatggaaagatgtccaactatgtccgtgccgtccgcgccgcgggcggcacgcctgtttctggttactgccccccaccggacctgtcctgcgccgggctgctgctgtgcggcggcggcgacctggaccccgtcctgtacggacagcccgaccagggctcccagcccccggaccccgcccgggaccaggcagagctggagctgttccgcgccttttatcaggcgggccgccctatcctgggggtctgccgaggcatgcagatcattaatgtggctctggggggcaccctgcttcaggacctgggggacgtccggcgtccctcccatacccacccccaggcggaccaggtccacccggtccgcgcccagccgggcagcctgctccacaccctctacggcccccgcttctccgtcaacagctctcaccaccaggcagtggactgccccgccccagggctggtccttaccctccgggcggtggacggcgttcccgaggccatagagcacccctccctccccattctgggggtccagttccacccggagcggatgagcggcccccttctccgccccgacacggtggacggcgctcccatcttccgctggttcctggccctctgcggccggaccggccccgtctcttcttctactcaggaggtctcccagttatgaaccatgctcccctgcgcatcctgaccggagcggcggtcctggtcctctccgtctccctgctcaccggcgctgccgtccctgttcggtctctccccgccgcctccggggaggagacagtcctcgcccgcccctcccttcaggacccggacaccctcgcccgggcggtggcctgtcagtccctctcctactaccgcccggagctgctggaccgctatctggcctacggcgccctttggccggagctctccccggaggacgtggtcacccgggtgaacatcggcctggacgggaccttttacggcgatgtatcccaggcggaggagccggagagcctctccgtcctagtcaacaaataccacccgctgccggacggctatgtcccccggctgcacagcctgcccgcccggtacgccccctccgggggctccctggcccctgccgcagccgcggccttcatgcggatggccgacgcggcccgggaggacggcatcaccctttacagcgtctccgcctaccgctcctactcctatcaggactccctgtaccgccggtacaccgctcaggacggcgtggaggccgacacctactccgcccggccgggcttctctgagcaccagaccggcctggccctggacatcaataccgccagccgcagtgcccatttcgagaccaccgcgacctaccgctggctcatagagaactgctggcgctacggcttcatcctccgctatccggaaggcagggaggacattaccggcttctgctttgaaccctggcactaccgctttgtggggcgtacgctggctctccaggtccgggagagcggcctgacctacgatgagttcctggcccgcagggcagtggacaggccccatacagcgctctgcgccggggacatgcctctggaggccgtccccatccttctggacggcatctgctggctgcccgcccaggcggtggccgccgccttcggccgtaccgccgccatctcaggggaccagctggtcctccccgccgaggagggctccgtggtccttaccgccggctctctcaccggggagcgggacgaccgccccttcgcgctcagcagcctgcccttccagtgggagggggagttctacctctccctggaggacctgtgcgctctgctggaactgacggcccggcgagaggaggggttgatctctctcattccccgctccgccccatctgctctcctgccggaggagctgccgcccatccagccactcccctgctgaccctgcccggcgcctctcacggcgccgggtcctcttatatagtatgatgtggttgcagatcttacaaaaaaggaggcagatccatgtttcgacccatgcggcggcaccgccagcagctctctcagggggactgcgccgccatcctgtcccgggggacctccggcgtcctggccgtggccggcgacggcggctacccctatgcggtccccctcagctatgtgtatcaggagggaacgctgttcttccactgtgccaaggcagggcacaagctggacgccctgcgtcggtgcagcaaggcgtccttctgcgtcatcgatcaggatcaggtggtccccccggagtacaccacctactttcgcagcgtcatcgccttcggccggacccgtattttggaggacgaggcggagaaacaagctgccatttggctcctggcggagaaatactgccccggcgacagcccggagcatcgccaggaggccattcgccgggaggccggcggactgtgccttgtgtcgctctccatcgagcacatgaccggcaagcaggccatcgagctggttcaggaagaccgccggcaggctgatctccctttgtgacccccgatccccttttgtgttctggggctgaattttccttttttccaccctgtcccctgcgggggcggtaacacacaaaaggctcttgagcagaaacaagcggatgccccgctggggcatccgcttgtttcggtcccgaagagggcgccccgcacagcggggcgccctccttattcttatgggagcttattttgccacgatgactcggatacggccgccgtccttctcggagcggtcataccaggcggacagctcgtaaccgccgtccttcacccggtccagggaggacaggtagtagtcgccgcccctgtactcatagaccagcacgttgtcggacatgaggtaggtccggttgccggccgtgacagtgttgccgctgacgcgggcagcctccacctcggtcagctgccggatcttatcgggggcctggacattgcccatcaccaccacagggcccttcttcacgccgtacttgacgctcattccgggcagggatacggtctcgcccgccagatccatggtgtaactcacgatgacgctgacgccgccctccgggctgctgtccaccacatcagtcatgatgccgtagctgtgcatatcgccggtggcgtccttcaggatcagctttgtgatctcacccgcaccgttcagggtgtagtagcgcaccatatcggtggtcacgttcagccccgccagacgctcgggatagatccttacgccggtgccctcataggtgtccaggatctccacgccgtctgcgaagggataactgcccagtttggaggcgtcggaggacaccttgccggagagcttgccggtctcgctcagccgcttgagggacacggagccgtcctcactgctgatgaccacctggaccaggttgcccagcttgaagtagtcggtggtccactgatagctgtatgtgcggccgtcggtggccaggatggtcacagtgtcagcggtgtaggaggaattggccccggagccggagtaggtgccgcggctcaggttagtgacgatgccgatcttgctgccgtcctgagaggcggaggcggcggccacagcggccacgccgccgttccggcccagcagcagggtgacggtgtcccccacctgatagctacccaggtcggacagctcgtaggcggcggaggctgtctcgatctcataggtctggcctgccaccttcacggatgtggggttggagggggtggggctcagttcctggatcgtgccggccacccggtcggtgtacacccacagggtctgcatggactcactccagtagacgatgtcgttgttctggatggacttggcggaggaggcggcgccgtcccggtacacccgggcgctgtccacatcgaaggggacggactgctgccagctgccggccgccaccaccgggccctccatcacgccgttgaccagggccacccggtccacctcaccggcggcgttgagtgagtagcccagcttgttaatatagggggtgccctccttggtgttggtggagagcaggttataaaacagatacagggtatcctgccgggtcagcacgtcggtggacttctgggcggtgacaccccggtccagctttaggttgcggtacatggccagctggccggtgggataggccccagagaagtcctctgcggtgtagcccagcagcttgaggacgatggtagcgccctccgccagggtgatctggttggaggggcggaaggtcccatccagatagccggagatcagcccggcctgcacccccgcctggacatagccggcggcccagtgggtccggggcacgtcggggtagggcgaggtggatgcctcccccacctgatccccggtgccggtggcgttgaccgccatggtgataaactcggcccgggtgacccggcggttcaggtggaactcaccgctctcatcgcccaccatgatgcccagggcgttgatgacctggatggcctcctctgtggagactgtggacgcggcagccgctcctgccggcaggaccatcaggcccagcagcagcactgccgccagcaggccggagcaaaatcgtctgattttcatctgtgcttctcctccttattcatagcgcagggcgtcgatggggttcagggcggccgccttttttgccggcagatagccgaacaggatgccgatgcccacggacacgccgaaagccacggccaccgagctcaggttaggcaccgcactgaaggtgctcccgccgcccatactgctggtcatcatgcctccaatgagggaaccggccaaactggccagaccgatccccaccaggatgcccagcaccccgccgatggctgaggtggtgcctgcctcaatgatgaactgcccgcggatatccttccgcttggcgcccagggactttcggatgccgatctcccgggtgcgctcggtaacggagaccagcatgatattcataatgccgatgccgcccaccagcagagagatggcggcgatggccaccagcaccgccatcatggtgcccatcatggcgttcatggcgtccatcatctcggcggaggtcatgacaaagtagtagtcgctgctctggaaggtcttgtacagccggttctcgatgatgcccttggccgttgcagctgtgtccttgctggtgctggtgaacatgtacatgctggcgtccgcgctcccgctcaggcgcagggcggtggtgtaggggaggtatatgatgtcgtccccgctcccctcgctcatgtcgctgttcttctccagcacaccgataacggtaaagtgctccccgccgatggacagctgcttgcccagggcgtcgccctggaaggcctcttcctccagataagcgccgatgacgcatacgttctggtagcgggcagcgtcgatgtaggagataaatcggcctttgcccaggttctggccgctcatggtggcccccctctcgttgaggaaggtctcacccacaccataaatgctggtgcgctcaaaatcctcgctcccctgccgcaccgccagctgagcggagacatagggggtcacgccggagatgtactggggatatttatccaccagttcatacatatcgtctgggtccaccgaacgggagtcccccccgtacataaacaattggacctggaccagattggcgcccagcttctcaaactgctcgttcatcatattctgcatgccgttgcccaggctggtgataacgatgacggcacccacgccgatgatgatgcccagcatggtgagcagagcccgcatcttgctggtcatcagggacttcagggccaggcggaaggactgtccaaagttcatgcgcccgcctcctgttccgccggggaggcgtccgaaaatccgcctgccgccggctcgtcctgctccatctcttcgggccgcaccacggccctggggtcatgggcatcgccgtcgtagatgatctttccgtcctggaggcggacgatgcggtccgccttcaccgcgatggagttgtcatgggtgatgaggaccacagtgtccccctcccggttcagctttttcagaaagcccagcacctcccgaccggtgcgggagtccagtgcgccggtgggctcgtcagccaggatgaccgacgggctgcccgccagggcccgggcgatggacacccgctgctgctggccgccggagagctgggagggcaggttcctgcacttgtccgccagccctacccgctggagggaggccatggctcgctccttccgctccgaggcgtccaccccggcatagagcagggggagctccacgttttccagcacgttcagcttggggatcaggttatactgctggaagatgaagcccagcattttgttgcggatctcggcctgctggtcgtcgtccatggtagacacgtcgatcccgcccagatgataggtccctgaggtaggcacgtccagacagccgatgatattcatggccgtggactttcccgagccggaggagcccacgatggccacgaactccccctggtcgatggtcaggctgacgccgtccaaggcatggacggtctcctctcccatctggtagatcttgtagacgtcctttaattcgatcaggtgttccatacgctcagccacccacgcccatcatcatggccatagcgttggaggcgatattctgaacatagaccgtctcgccctcctccaggccgtccaggatctcgatgtactcgctgctgctccggcccagggtgacagggcgctcctccagcttggcggggtccaccaggttgccgctctcatccagggcgccctgaccggccaccagcacggtgttgccccgctggaccgcctctaccggcacgcacagcacattgcccgcgtcctccaccagcacctcggcagacacgttcatgcccggcttcagctcctctggtgtgccctccaccaccacggtgaccgggtaggtggtgcggccattggccgtggtgccgttgatgttgatcttgtccacatagcccttgaaggtcataccctccagagcgtcggcggtgatctctacctcctggcccacctggatgttgttgatgtccagctcattcaccttcatctcaaaggtcagggtggacatgtcatacagcactgccaggttccctcccgcggaggtcaccgcggagctgtccacgttgtcgccggccttgaagtttttctcgataacggtgccggagatgggggcggtgatctcatagttctccagggcctggagccggctgtccagggccagcttggcgttctccacgccgatgcgggcgttctccagggtggtctccgcggcagtaccgccgatggtggccagcacagtgccgtaggacaccggacttccggaggtgacatggagggcggtgatctcccccgctgtctgtgccaccacggtctggccggtgctttggctgaaggtgccgcttccggcacaggccacgctgcccaccacagcggtggcggcggtggtgccggtcagtccgccgggattgctcacccggaactttacctgacggatcaaggcgcctccggcacccacctcgtcggcgccggagatgctctcgatggtgccggtcactgtctccatcgtcccttcaatggtcagtgtgcccgtctggcccacgtacagccccgcggcgtctgcgctgtggaaggggatttccaccgtcatggtggtgttgtcccccacgtccgcgatggggtcgcccaccgccaccgggtcgcccacgctgacatagagcttctgcacgatgccgctggcagtggagtaggggttcacgctctcctgagcggtgcggtaacccagctccgcctgcgctacgctcagctgggcctgctgcaccgcgttctgggcatcctctgcgtcaaaacggtagagcagagcgcccttctctacccagtcgccctcctcaaagggagcctccacgatctccccgttgaccagggcggagaccttgtaggagtcgatgggcgtgatggtcccggtgctggacacggagatcctcaggtcctgccgctgggctgtctcaggcagataggtgcccgccacgaactgctggccggcgctcatcatgggccggataaaaatcaggaaaatggccgccagcactaccaccgcgataatcagtcgcttgagccattttttcttctttttgggcaccttaagcttgggcggttcctttttgcccggtgcctggaccgcctcttccgtttttacctgtgttgcttccataccttgaatctcctttatgtcttggtcgcggacggggctgctgtcccccgtctcaaaatgtccagctgggcgcacagccgcgcccgggccggaccgctgtcctcttcaaagatcgcctgtgtcatggcagtggccgagatgtatatcaggatccggaagatgtccatcaagtcctcttccccccgcaggtccagcctgtcccggtccacccgccgctccagccactcccccaggtccggccgatccagcgggctcagccgcaggcccaggcgcatgtccgagttgcggctgagcatcctggccagcccggcccagtgcttccgctgggcccgcagatcatcgaacagggcgggcagcgccccgagcagatcgcctccctgctcctccagcacccgctccagccgctggagcagcccgtcctgataccgcttcaggaggtagtggaacagctcctccttgtcacgaaagtacatgtaaaagctgcctcgggggatccccgctgcccggatcatccggttgatagacgcctcagcatagggcacacgggcaaactcctcctcagcggccaacagcagccgctcccgcttctccgcgggcaggtggaagaaggtcttgctgggcattcccgtcccgcctcctcacatgacaagttgtcacacagtatagtcccccttcatttttctgtcaatcgcccccctccaggtttcaaaaaatgttcacaatccttctctgccgtacgggctgcagcggacggatattccgtccccccgccccagtctctgtcagaggccccatatgcttttcttttttaccatatcagagaatctttaagtacagtacataagaaaaattaaaattttcttaaaccggctcctccgctgcatctgcctgagtcctgactctacaccttcccccagggggaaggtcaagcaaaatctgtggctggcccacattttgtccactggataagccttttcattttaattcctattttttaagaagtcaataatattttcttttttactaagaataaccagagggatcgtcctgttctgcattaaaatagaggcaaaaggagcgtcagagctatggaagaactcggatacgccctgcggctggcgcgggagcgcaggggcttgacccagacccaggtgatgaacctcaccggcatcaacaacaaaacgctctccggctatgagaacaacatcgcggagccggaccttcagaccctgaccactctgctgcggctctaccgggtgtcggcggaccggctgcttcacctgcccgtctcggctcaggagctccccgccgatgaggtcaggctccttaccctgtaccgtgcctttccagaggagcagcggcagcagctgatgctggtgctggagaccctgtccagatccgcccctaagcccaagcccgcccctaagtccaggcagccgtgaccggaatctaggcttttccctggaagcagagcaccccccggagccttggctccggggggtgctctgtactatctggccagttcccaaatagcggccgccatcatctgggcgtttttcagcagggtgtccgcttccatatattcgtccggctggtgctccgtcatctcctgtccggggaacaggggcccgaaggccaccaggttgggacatgccttggcgtaggtgccgcccccgatggagagcagctccgcctcctgcccggtctgctcccggtacaccttggacagcgcctggaccagcgggctctccgggggcatgtagatgctgtcctgcccctcggtgcgctccccggcaaagccgccccgctccatggcccccatgagcctgtcggcaaagtcctcataccgggcggtgacgggccagcgcaggtccagggtgagggacaactcctccccgccgccccggatgatgcccaggttcaccgtcagcgccccggagatctggtcagacatggcaatgcccagcccctcgccccgggtctcctctcccaggacatccgccaggaaggcggcagcctggcccgagtccccatccagccccagcttcttcagggccagcagcaggcggccgatggcgttgacccccttctccggggtggagccgtgggcgctctggccctccgcctccaccagcagtccctccgctgtctctgtcacccggacgccgtccagcgtcagggcgcaggcggcggaccgctcctcctccggccaattcagctccgcccgggcccggtcaggcaccacattgtgagcggtccccccggaaatgcagcggatggaccggggggacggggccagcgcccgacggaagtccaccacggcgatccccttctccccgttgataatggggtacatgccgtccggggtgaagcccatcaccgggatctctccgccggcctccacatagtggcggatacaggaggagcccttctcctcgttgcaccccaccagcaggcgcacccggcggtgcaggggggcgccgctgtcccgcaccgctttcagggcgtacagggccgccgccgcgggccctttgtcgtcgatgaccccccggccgtaaatccgcccctccgcccaggtacagtcatagggggggtagtgccacccgtctccggcggggaccacatccagatggcacaggacagccaccatctcctccccctccccgtactcgcaccagccgcagtggccgtccacgtcccgggtctggaagcccatctccgacgccctggacaggaaccagtccagcgcccgccggcactccgccccatagggggcccgccccgtcccggggaccgagacgctggggatgcggaccagctctctcagatcccggagcagggcctcctcttctttttggatcaattcatcaaaattcatcccttttctcccctttcccactcattttcctccagacagcgggagatggcccaggctactccctcctcctggttggagggggcggtccgctgggccgcctcccgcaccgctgccggggcattgcccatggcgatgggcagccccgccgcccggagcatagacaggtcgttgtcgctgtcccccacggcggcggtctcccccagggggacgccgtacagcagcgcgatcagggccatggcccgccccttgtccacccggtcgggcaccagctcaaagtcgtggtcattggaggcagtcagctgcaccccgggcagcgcgcccagctcctccagggggtagcgggcctggttccagtccccgtgcaccttggtcagcggcagccccctctcctccagataggcccgcgggtcctccgccaccacggcggcggagtggaagatggggaaggggtaggtccgggaaagggattccttggaaaaggggtccaccacgatctcctccccggcaaagatcatcagctcgatctcccggcccaggcacagctccagcgcccggcggcccgactcctccggcatgtcccagcggcgcagggtctccccccggacaccgtccaccacggcggcgccccccaggcaggagagcagcgcatcgcagcccgcctccccggcgaaccaaaccgcctcctggatcgggcgtcccgtattcagcaccacccgcacccccgccgcccgggcccgggcgatggcatccttggacgcctgggtgatccggcccgccgggtccagcagggtcccgtccaggtccagcgcgatcagtcgtatcatgggcatcttctccttgagcaattataggaacagactccccacctggtagaccagcagagaggccacataggccacccccagctgccacccgatggaaaacagggtccacttcgtgctgttcatctccttggccagcgtagacaccgccgccacgcaggggacgtacagcaggatgaacaccagcatagagaaggcagacaggggggtgaaccccgtcatggccgccgccacctgggcgccggtggcagtgagcgggaaagcgtagaacatggacagggagctgaccaccatctccttggcgatcaggccggtgagcagagccaccgccgcctgccagaagccgaagcccaggggcttgaaaatgggggcgatgacgctgcccagggcacccagcatgctgtccgcctcgttctccaccatatgcagggagaagtcaaaggactggagcagccagagcaggatgctcatcagcaggatcagggtgcccgccttgatgaggaagcccttcaccttctgccacacatgggtgagcatgttgtgcagggagggcaggcggtaagggggcagctccagcacaaagggggcgggctccccggcgaagagggtatgcttgaacagcaggccggacaggatgcccgccgccatgccgatgacatacaggccgaagaccaccagcccggcccagggtccaaagaaagccgaggagagcagcccgtacaccggcagcttggcggagcagctcataaagggcaccagcaggatggtcatccgccggtccttctcgttctccatggtccgggcacccatgatggcgggcaccgagcagccgaagcccatgagcatgggaatgaacgccttcccgctcaggccgaagcgccgcagcaggcggtccatgatgaaggccgcccgggacatatagccgatgtcctccagaaaggacaggaagaagaacagcagagcgatctggggcaggaaggagagcacgccccccacgccggcaatgatgccctcacagatcaggctcaccagtacctgggacacccccgcccccagcagagtctcctccagcgcggcggagcatgtgtcgatgcccgccgccaccagattggacagccaggagccgaaggggccgaaggtgatgacgaacatcaccagcatggcgcacaggaacaggggcagggccagatatttccccgtcaccaccttgtccaccttctcgctgagggtcagctcccccggcttctgccccttggtcactgaggcggctaccacccgctcgatgtactggtagcggctgtccgccaccagggtctcccggtcacccaggtcactggcgctttcgtattccgccaccacccggtccagctgctcctgcaccggctcaggcagggccagtgcccgctccaccagctcgtccccctccagcagcttgatggaggcccagtgggcgggcaggccggcggcataggcgtagtcgtggagcagctcccccatccggtggtggatgtcgtgggtaaaggcgtcgtacaggtcgtcgggctctacggtgcagcccaggtgcatctgccggtgggcggtgtggagcagttcctccagcccctccccggtgcgggcggtgatggggaccactgggatgcccagctccttggacagccgctccacatcaatctggtccccccgtttggccacctcgtccataaagttcagggccagcaccgtgggccgctccagctccagcagctggacggtaaggtacaggttgcgctccaggttggtggcatccacgatgtcgatgatgcagtcaggggcctccccgatgatgaaatcccgggcgacgatctcctccatggagtagggagacagggagtagatgcccggcaggtccacgatggtcagggtcttgtcgcccagacgggcggtgccctccttcttctccaccgtcactccgggccagttgcccacatactggttcgagccggtcaaggcgttgaagagggtggtcttgccgcagttggggttgcccgccaaagccacccgcatgggccgggtgtcgtgggcagtggggtcatagctccccccgtgctcctggagctcgtgctcgtggtcccgcaattggcggcgggcggtctccgggtcggtcacgtgccgggtcatggcaccccgggcggtcccgccccgctccgtcctcctgggctgtcccatccggatctgggccgcgtccgcccggcgcagggacatctcatacccccgcaggctcacttccagggggtcgcccagaggggcgatcttggtcaccttcaccacagtcccgggagtcagccccatgtccaccaggcggcgcttcaccgccccggactggttgcccaccgacaggatcatcccgctctctccgggggtcaggtcatacagggtccgctcccccgatccactgtgttctgacacaggtctcacttcctcacgataatgatctctcacactggacctaattgtagccgacttttcccctcttttcaagggcaagtcccgcctggagaattcataatttatacaaatattttttacactccattcaccctgccgcccccgccccggtctatactgttcccatcagaacagtttctttttgaactatcggaggtgtgcctatgctctcccccttggagaccgccctgaccggccagcccttccgccgcctctactgccggatgctggacgagctggctcaggagtggtccctctcccgcaccgaggcagaggtgatgttcctgctctcctgtgataaaaccctggacaccgcccgggacatctgcgagactcagctgctgaaaaaatccgccgtctcccgggcggcggagggtctggtgcgtcggggatggctggaggcgctgcccgacccccgggaccggcggatccagcatctccgactcctgtcccctgcccggcctttcagcgaagaggtccgtcgggcaggagaggcgttcttctgtctgctgctccaggatgtcaccctggaggaacagcagcagatggagaagatcgctcagaagatagagcacaatgtgcgcaccgtactcagccagtccgattcgattccacacattttgatgaaaaaggatgggaaaccgctatgaaagaagtgaagcagccctctaaaaagcctctggtctattactacctggtggctctgctcattctgatggtgctgaacttgaccctgttccccgccatgctggagaccccggtccaggatgtgacttacgatcagttcatgtccatgacctatgagcagaatgtgggccaggtccaaatcgagggggatgagatcacctttaccgacaagaccaacgagaaggtctaccgcaccaccgccaccaacgaccctgaccggacccagcgcctctatgagaatggggcccagttccaggagatcgacacccagcccggcctgctcacctccatcctggtgggctgggtcctgcccctgctccccttcctgctcatcggctggttcatcaacagacggatgaaaaaatccatgggcggcgacggcatgatgttcggcatgggcggcggctctaatgccaagatgtatgtcccctcatccactggaatccgctttgccgacgtggccggcgaggacgaggccaaggaactgctcagcgagatcgtggacttcctccacgacccggagaagtaccgccagatcggcgccaagctgcccaaaggcgccctgctggtaggccctccgggcaccggcaagaccctgctggccaaggcggtagccggcgaggccaacgtgcccttcttctccattgccggcagcgagttcgtggagatgttcgtgggccggggtgccgccaaggtgcgggacctgttcaagcaggccaatgacaaggccccctgcatcgtgttcatcgacgagatcgacaccatcggcaagaagcgggacggccagatcggcggcaatgacgagcgggagcagaccctgaaccagctgctcaccgagatggacggctttgacggctccaagggcgtggtggtgctggccgccaccaaccgcccagacagcctggaccccgccctgctgcgccccggccggttcgaccggcgcatcccggtggagctgcccgaccttcagggccgcatcgatatcctgaaggtccacgccaagcagatccgtctggcggaggacgtggacttcgaacccattgccaagaccgctgccggggcctccggcgcagagctggccaacatcgtcaacgaggccgctctgagggcggtgcgggcaggccgcccctacgccactcaggaggacttgcaggagagcgtggaggtggtcatcgcaggataccagaagaagagccgggtgctctccgaccaggagaagaagatcgtggcctaccacgagacgggccacgccctggtagccgccctccagacccactccgccccggtgcagaagatcaccatcatcccccgcacctccggcgcgctgggctataccctccaggtggacgacggtgaccatttcctcatgtctaaggatgagctgctgaacaagatcgccacctacaccggcggccgggccgccgaagagctggtcttccactccatcaccaccggggcctccaacgacatcgagcaggccaccaagctggcccggtccatgatctcccgcttcggtatgagcgacgagttcggcttcgtggcctttgagacggtgagcaaccagtacctgggcggggatgctgccctggcctgctccccggagacccaggcccgcatcgaccggaaggtgacggagatggtggacacccagtaccagaaggccatggacctgctgaaaaccaacgaggaaaagctccaccagctggcccagtacctctatgagcacgagaccattaccgggcgggagttcatggagatcctagagggacagcgggaggtctgacagacggccttctccttccctccagggtccgccgcgccagggcccgaaaatttttcttgacaaaccgggcctccgggcccataatacagttgcagaagacaggggagcctgcggcagcgggctgagaggaagctgagcgcttcgacccttcacctgatgtgggtcatgccaccgtagggagtcatgctggccgtgaccagacggggtgcccaccgggcaccccgttttttgatcctttccgaagggagcgtgaggagacacatcggcgccccggcctggccgggagcgggcagagggggagcgccctgtgcccgggccgcatacagcagcgatgggaagccgtgttccggcgtgagagggggccagtaagccccgaccgaacccagggaggaccctgtctgtccttccgggacccgatttgtggcccctcggggccggaaaaaggggagacgctgtctgcttttgtgtgtttccccatccattttgaaaggagcactttcccatgaatcagagcaacaccaaaaagctggccattgccggcattctgtgcgccgtggcggtggtgggtagcctgttcactttccccgtcctggccagcaagtgcgcccccatccagcatatggtcaacgtcctgtgcgctgtcctgctgggcccctggtacggagtcggggtggctttcggcgccagcctgatccgaaacctgctggggcttggcacgatcatggccttcccaggcagcatgtgcggcgccctgctgtgcggactggtgttctggaagacacggaacctccccgccaccctggtgggggaggtcttcggcaccggcatcatcggcggcctggccgcctatcccgtggccattctgtttaccagcgcagacgccgccacggtggctttctacgcctacatcgtccccttcctcatctccactgtggccggtgccattctggccggcatcctggttgccgccctggggcggaccggggccctgtcctccatgcggaccgccctggagcgctgaatccccacttcttttcccggcccgcagagcgggccgggttttttgcttttttgcctcctccggggtataatgggaccaacgacgagacaagggaggtcctttcccatggacatcaccccagaacaggtccgcgcccaccggctgcgggcccaccatctggaccgccggtatcccgccagccggatactggaggctgcgggggcctgcgggctccagaactccccgcccggcgggtgggagactgccctcttccagcgcctggagggctgctccctccccctcctccgagacgccctgtaccgggaccgggccctgctccaggcctggagcatccggggcgtgcccctggtctttcccgccggggagagcggcgtctttctctccccccttctggcccgggagggggagtgtccctggatctacacccgggggatcaccgcggccctagactttgtcggcatgtccttcgacgaggcccacgcccgggtgcgggaggccgcccgctgcctggacgggaccaccgtccgcagcaaggaggccctggaccagctgctggctgaccgggtcggggcgcagctcccgccggaacagcgggccctgtgggactccccctccatgtacggccgccctgacaggcagaccgtgggaggcgccgctgtctcctttctcctccgcccctgctcctttgcctctctggtggtgttcggccgccgggaggagaacagtcccacctttacctccttccgccgctggctgggccgggagccctccccctgccctcagggggaggcggagctggtgcggagatttctccactgctacggccccgccgcccccgccgatctccaggcctggctgggcagctctccccaacaggcgaagcggctctggtccgccgccgcagaggagatggaaccggtccgggtgctgggccggacccgctgggccctgatccgggaccgggacagcctcaccgctccgccggagcagcccggccgcctgatcctgctggggccccacgacccctatctggacctgcgggaccgagccctggtcctggaggaccccgcccgccagcgccaggtctggcggacagtctccaaccccggcgccgttctgaaggatgggcgcgtggccggcatctggaccggaaaagcggtacagggacgactagagttctccctgtccctgtgggagcccctctctcctggagcgcgtcgggccctggagcgtgaggcgggggcctacgccgccttccggggcctggagctgagtctcctgccctaatcgcggggccgcctgatccgcaagctgagcagctgtgccctacgggcggtgctaatcagtttacgaacaagcctcgcagagttcgcgcccgcaggcgcgaatccagttctgatctgtttttcccggcgacatgtgcgtcggggaaaacacctctcaggctgcaagtgtggggtttgtccgcctgcggcggacaaaccctgcgtgcggcagactacatctttctcgaaaaagtggccttgccactttttcgaccctctcagcgccgcccatcgggcggcgctgctgctgttcattccactgtcttcagcgactctaccatatccagctttttcagcttccggtgggccgccagattgaccaccagggagaagacggcggtgagtaccccggcgtagagatagctggacagggccagtgtccgcccgaacatgagcaggtcgatctccactgtcagcaccagccactggtggagcagcttccccatccccatccccagggccacgccgaacaccgtgaggatcacgttctcccggtagatataggcggacagctcgccgtcgtagaagcccagcaccttcagggtggccagctcccgcatccgctcggtgatgttgatgttggtcaggttgtagagcaccacgaaggccagggccgcggcgcacacgatgatgaggaccacggcgtagtccacgctctccagactggaggtgaatacctcccgggtggccgccacctgggacagggtggtgacgccgtccagccccaccagctccgcgtccagggcctccgccccttcagcggggtaggccgccagcacctggttctcctccggcggctggccatacagggtctggtagtaggcgtcggtcatgtagacatagtgcatgatatagtgctccgtgacatccgccacccgtacctggacccggctgtccccgtccagagtgaaggtgtcccccgccgacacccccagcagggaggccagcttctccgtcaggaccactccgtcgtcaggcaggagcaccggcacgctgtccgtccggtggcgcagggagacgaagggggccagcgcctcctggctgggcaccacctccaccgtgcagtccaccgtgtaccgctccgtctcggcggaggccgtctccgagcggctcaccagccatccgctcaccagctcggaccgctccagcgccccggtcacctccgccagctcgccgggggtcactcggtccaccagcccgatctgggcggtatagcggtagatctcgtcgtactgcctgtccatcacgtcgaaaatggagccccgcaggccgaaggcggtgacgatcagagcagcgcagccgccgatgcccaccaccgtcatccagaagcggcgctgatagcggaacaggttgcgcagggtgatcttgtagttgaaggacagccgccgccacaggggggcgatccgctccagcaggatgcgcttgcccatggggggtgccttgggccgcatcagctccgccggcaccgctgccagggtggagaagcaggccgccagggcggagagggtcaccgtccccaccgcggccccgcaggccagcagggaggtagcggggtaaaagccgtactggatctcccccactgtgtagaggatggcccaggcgttgcagatgatccagggcagcagggtcagccccactgccagccccagggccgcccccgccgcgctggccaggaagccgtagcccacatatttcaccgcgatggcccccttggagtagcccagggccttcatcccgccgatggtgatccgctgctcctccaccatccgggtcatggtggtcaggcacaccagggccgccaccaggaagaagatcagggggaacaccgccgccagactgcccatccggtcggcatccatctcatagctggcgtagccggtgttggtgccccgtcccaggagataccaggagcagtcctccaaggcatccaggtcccgccgggcctgctccagctccttgcgggcgtccgccagctcctgctccgcctccgccttcccctcctcatagtcggccaggccgtcggcatactccgcctcgccgttctgcagctcagtcagggcatccgccagctccgcccggccgtccgccgactcccgctccagggtctcccgggcgtccgccagttccgcctggccgtcccggtactcctgccagccctcgtccagcccctgcctggcatccgccagctcccgctccccgtcggcgagctcctgctccccatccgccagccgggccgcgccgtcggcgtactccgcctccccgtcgtccagctcccgcttggcctgggtcagcagccccagggaggcgttgagctccagggcgctggactggagccggggcagcccggcggacagctgggcctccacctggacggcctggacctccagtgcctccgcctgggccagggcctgggccgcctgggcctggagctgctgagcctgagccgtcagctgctgggcctgggcctcgtactgctgggcctgggcttgaagctgctgggccagcagcagatttcccatggctgcggcctgctgggcctgggccgcatactgctgggccgccgcaccggcctgggcggccccctgctgggcctggaccgccccctgctgggcctgggccgccccctggcgggcctgctgggccccggcgcgcatctgctccacgcccgccagcccctgctcatactgggccatcccctcggtgtaggcggccaggccgtattcatatttggcgtaccccttgcggtactccgcccagccctcgtccagctccgcccgggcgtccgccagctcctgccgggcgtccgccacctcccggcgggcatcctccagctcgggcagggcatcctggtactcctgctccccgtcccgcagctcagtcagagcgtccgccagctccgcctccccgtcgtcgatctcccgctgggcatcggcggtttcctgttcaaaggtgttcagcccgtcatagtactccgcccagccgtcatccagctcccgccgggcatccgtcagctccgcctccccctcggagagctcctgagacacctccgcctccccgtcagacagctcccgccgggcgtccgccagggcctgctcggcctcttcccggatggactccccccgcagggcggagcgctcctccgccagaggctccagggcgtcggaaaggctgttcatcagctcggtgtagtcctcactgtaacacaacagctcctccgccccctccgcctgaaggtaggcgtcggtgtagtagtccagggaaaaggccgcctgcggcagcagaacaaaggctgagaccgcccccgtccccagagaggaagaaccccgctccacggagatatacagaggggaatccgccgttcccacgatggtgaattcccgccgggccagggcgtcctcaaagtcgccggtcccggtgtccaggcggatggtgtccccgatggacaggcccgacttctccagaaacaggggctccaccaggcactcccccgctttccggggcagccgcccctctaccagccgggggcggttggacccctcctctgcaaaggagtgaacctttacgatcatctcctgatccttcagggggacagctgcgtcgatggtgtaggccccctcggcttcctccaccccctcctgccgggccagcagctccacatcctcctccgtcaggcccagggtggagaccacccgcaggtccatcagccgctgctgatcaaaatacaggtcaccggtctccttcatgtcgggggcagtggcccgcagtccggccaggaagcacaccgccagggcggagaggaccagcagggagaggaagcggctgcgggtgttccgaacctcccggaccgcgtcggtcagcaggcggctgggggctttttttcgggacatgggctgttctcctcctctcctttttgtattttttcttcacaaaatcgcattttgtagaggcattaccactcaatggtctccacggggaccgggcggtcgttgtggtcgatgcgctccacccgcccgttcttcacgtggatcacctggtctgccatgggggctatggcgctgttgtgggtgatgaccaccaccgtcatgccctgctggcggcaggtgtcctggagcagcttcaggatagacttgccggtgacatagtccagtgcccccgtgggctcgtcgcacagcagcagcttggggtttttggccagcgcccgggcaatggccacccgctgctgctcccctccggagagctgggcaggaaagttgttcagccgctcccccagccccacatggcgcagcacctcctccgcgtccagggggtcccggcagatctgggcggccagctctacattttccagggccgtcagattctgcaccaggttgtagaactggaacacgaagccgatgtcatatcggcggtatgtggtgagctgtcgggccccatagccgctgatctcctggccgtccaccctgatagccccgctgtcacaggcgtccatcccccccaggatgttcagcaccgtggtcttgcccgcaccggagggccccacgatgacggcgaactgtcctttctcaatctcaaaggagatgtcgtccactgcggtgatggtgatctcccccatctgataccgtttccccacatgctgaagggagatataggccataggtcatccctcctgttgtccgttataaaacaggtgttgaatatcttgtattttttattataataggggataacagaggattgcaatgggcaaaagggcggcttctgtggaaaatccgacaggctctgtcctctgtgtcgaaaaacgggggaggtgcgtccatggcggaacagcgccaggaccggagggtccgcaggtccaaggcccagctgcggcaggccctgatccagctgctccaggaaaagccggtggaggagatcactgtccgggagctgactgagcgggccgatgtgaaccgcgggaccttttacagccactatcaaaacatctaccacatgctggaacaggtggaaaacgagctcttcgacgagctggggcggctgctggatgcctatccgccccacctgctccgggacgagctgacccccatcctggtggacgtgttccgcttcgtgcggagcaacagccagctgtgcctggccctgatgggcgcatggggggagggcgacttcttccgccggctggacgccatgatctatgcccgctgcctgcgggagtggcagggcatctaccccctgggcagtctggacggccccaactactgtctggagttcgtcatcgccggggcggtgggcatggcccgctcctgggcccttcagggctttcctcaggcagaggaggcgctggcccgcctggccgatcggctcatctcctctggtctcgccggcacgcttcagcacttcgattgatttcctcatttttcgctccatctttttgtggaaatcgccggtcgaaaaaatgaaagaaatcgttgcgggacccttcttttttcgataaaatgaatctgtatcggaacttgaaaaagagggatgggacaagctatggagcttttgaaagagcgtattcgccgggacggcaaggtaaaggggaccgacgtgctgaaggtggacagcttcctgaaccaccagatggacatcaagctcttcgccgagatcggcagggagtttaagcgccgcttcgcggactgccagatcaacaagatcctcaccatcgaggcttccggcatcggcatcgcctgcatcacggcccaatacttcgactgcccggtgatcttcgccaagaaaagccagaccaagaacatcgccggcgaggtctacaccgccaaggtggagtccttcacccacggccgggtctatgacatcatcgtggccaaggagttcctgggccccggcgaccgggtgctcatcatcgatgactttctggccaacggcgccgccctgatgggcctgtccaagctggtggaggacgccggcgccactctggtaggggccggcatcgtcatcgagaaagccttccagcccggcggcgacatgatccgcgcccgaggcatccggctggagtccctggcccgcgtcaagtccatgaatgaggagaccggcgtggagttcgtggactgagcccgccgtccccagaattgaatcgcccttcgattaaaaccggctcgcccggttttaatatatttgtgcgggacccgtccggctcctgcacatgatcttttaaggaggaaaacacattcatgaagaagcttcttgcctttgtcatggccgccgccatgacgctgtccctggccgcctgcggcggcggcagctccagctccgccggcaccagcacccccgccggcaccagctctgctccggccgcctccagcacccccgctgacaccgccgacttcaaggtgggcgccatctacatcaacggtcagaacgacaccgccggctacaccttccagcaccacagcggcatcaccaaggctatggagaacctgggcctggaccccgccagccagctgctcatcgtggacaacgtggcggaggattacaccgccgtctccaacgccatcgacaccctggccggtcagggcgccaatatcatcttcggcatctccttcggctacatcgacgccatgaatgacaaggcggaggagtaccccgagatcatcttctcccacgccaccggctacatgggcaatgacaccaacttcaacaactacttcggtcgcatctatcaggcccgctacctcaccggcgtggccgccggcctgaagagcctggagatgggcaacaactccatcggctacgtggccgcctacaaccgggagtatgccgagacctgctccggcatcaacgccttcgccctgggcgtgcaggccgtcaaccccgacgccgtggtccatgtgaacaagatctccacctggggcgacgagaacctggagcgccaggctgcccaggccctgatcgacacctatgactgctgcgtcatcggccagcactgcgattccgcccagccccagctggtggccgccgagaacaacgtgttcggctgcggctacaactccgacatgaccgagcaggcccccaacgcccacctcactgccgccatctggcactgggatgtgtactatcaggccgccatcgagaccgctatgacctgcggcggcgccgagaactttgtcaccgagatgggcggcaacgcctactacgccggcctgtccgagggcttcgtggacgcctccaccctgaacgagctggtggctgcccccggcaccgccgccgccatggaggccgtgcgtgagctgatcgacagcggcgagtgggacgtgttctccggcgtgaagctgaacatcaccgtggacgccgaggccggcaccgccgctgtggagcaggtggatgcccccctgatgtccgacggctatgagctgaaggacggcgaggtcgtggagatggccaaccccgagatcgtgcccgccggcggcgccagcgtgaccgacgacgtcatcaagagcggcatgaactacaacgtggccggcgtggtggagggctgagtcccctccccccgtcagacacagcgcagaccctgaaccgggccggccggcatcccccgccggccggcccggccttttggctcctgctccccggtccggacccgcctccggaccggggaggagcagccaaaggcggcggagggccgcaggggaccgccggtccccaaggataatgagaaaaggggagaacgccatgccaacagaatacgccatcgaaatgaagggcatcaccaagaccttcggcagcgtggtggccaacagggatgtggagctgaacgtcagacagggggagatcctggccctgctgggtgagaacggctcgggcaagaccaccctgatgaacatgctgtccggaatctacaagccggacagcggcaccatcctggtcaacggccggcaggcggtcatcaattcccccgaggacgccaagcggctgggcatcggcatggtgcaccagcacttcaagctggtggacattttttccgccgcggataacatctggctgggggatgagaagtccggccccattctgaagaaggaccggtacgccgtcatccaggagatggcccggaagttcggctttgacatcgacccccggaaaaaggtgtacaatatggcggtgtcggagaagcagaccctggagatcatcaaggtgctctactacggggccaaggtcatcatcctggacgagcccaccgccgtccttaccgtccaggagacagccaagctcttcgacgtgctccgccgcatgaaggcggagggccacgccatcatcatcatcacccacaagctcaacgaggtgctggagatctccgaccgggtctccatcctccgcaagggggagtacatcaccaccgtagacaccgcccagaccgatgagcagcagctcaccgagttcatggtgggccacaaggtggacctgaacatcgagcgccccgtggtggaaaagacccgccccctgctggagatccgggacctgaccatccgcagcgacgagggtgccgtggccatcgaccgggtgaacttctatatccggggcggtgagatcctgggcgtggccggcatcgcgggctgcggccagaaggagctgtgtgaggccatcgccggcctgcggcccatcgagggcggccagatgatccacaagggggagaacatcgtgggcctctcccccaaggcgatcctggacaagggcatctccatgtctttcatcccggaggaccggctgggcatgggcctggccccctccctgtccatcacggacaacatgctgctgaaaacatacagcgacggcaggggcatctttgtggaccggaagcggggccgggcggaggcggaacacgtcatccaggagctggaggtggtcaccccctccaccgagaccccggtgcgccgcctgtccggcggcaacgtgcaaaaggtgctgctgggccgcgagatcaaggccggccccaacgtcatcgtcaccgcctatcctgtccgcggcctggacatcaactcttcctatgctatttaccacattctcaacgagcagaagaagtccggcgtgggcatcctgttcgtgggcgaggacctggacgtgatgatggccctgtgcgacaagatcatggtcctctgccacggcagagtgatgggcgtagtccacgcccacaaggtcaccaaggaggagctgggcctgatgatgaccggcgccctggacctgacccgcaagtatgaggacaagcccgcgggcattgcccgggacactctgatcgaggaggtggaccaatgaaccggaaagaaccgctcttccgcgtggtcaagcgggagtcgtccagccccgtccgccaggccctggcctatgtggcggcggtggtcatcgccctgctcatcggcgcggccctcctctcctccatggatgtggaccccctcaccttctaccagaagatggtgaccatgggcatcccgggcaacaaattcccctggcgcatcgtggagaacttcgtcaagctctttgtccccctgctcatcacctccctggccctgtcgctggccttccggatgcgcttctggaacatcggcggagaggggcagttcatcatgggcgccatctgtgccgccgcggctgcccacaagctgggcccggtcctgccccagcccctggtggtgctggtcatggccctgtgcggcatcctgggcggcggcctgtacggcctgatcgtggccctgctgaaggtgcgctacaacaccaacgagaccctgctcaccctgatgctcaactacatcgccctctatctcctccagttcctgggggagaccaaggctggctggaacttcttcctggaccctgattccgcccggcccaagttcgccggcttccccgacaacgcggacatgatcaccttccccctgggccccttcaacctgaacctgtccctgatcatcgccatcgtcctgtgcgtgctcctcttcggctatctgaagtacaccaagcacggctatgagatcgccgtggtgggggacagccccaacaccgcccgctatgcgggcatgaaggtggggcggatcgtggtgcgcaccatcttcctgtccgctgccctcatcggcctggccggcgccttctatgtctcctccgccggcaccctgtccacctccgtcaccaacgatgtgggctggaccggcatcgtggtggcctggctggccaagctgaacacggtgggcatcgtcatcaccgccctgctcatcacagtgctccagttcggctgtcaggctgccagcaccacctattcctccatcgacgccaacttcgcggacctgatccagggcatcatcctgttcgccgtcctggccgcggacttcttcacccgcttccgtctggcgcggcgcgccgcagcccccaaggaggtgtccaaatgaacgcatccatcgacgtattgaccctcttcctgttcaacatcgtgctggtgaacatccccctgctctacggcacagtgggcgagatcgtcaccgagaaggctggcagcctgaatctgggcgtggagggcaccatggccatcggcgccatcttcggctacctggcaggctgtatggccaacagcctgctggtgggcctgctggtctcctttctggccgccggcctgtgcggggccctgtttgccctgctcaccgtctccctccaggccaaccagaacgtcaccggcctgaccatcaccaccttcggcctgggcctctacttcttcatcggcaagggcctgggggaccgctggcccgtcatgacaagcgccgacgccctggtcagcggcttctccgcccgggagatccccttgctctcctccatcccggtggtgggcaaggccctgttttcccacaacatcctggtctatctgggcatcctggtggcggcggcggtgtggtggtacctcacctgcaccaagaccggcctgcgcctgcgctccgtgggggagaaccccggcgctgccgactcggtgggcgtcaacatcctgctgtataagtacgtccacctgatcctgggctccggcatcatggggctgggcggcttctatatggcactgaacatgggcggctccttcgagggctccaactgctggatcaacggctacggctggatcgccatcgccctggtcatcttcgccaactggaaccccctgtatgccatcctgggcaccctggtctttggcttcttcaacacccttcagatctactccggctctctggccggcgcattcccggacgctctgggctggctcaacagcatcccctcccacctcttcaaggccctccccttcctgatcaccgctatcgtgctggtggtcacctccatccgcaagcgggagggcagcggacagcccgccgccctgggcctgaactacttccgcgaggagcggtgaacggcctttttccaccatcagcgccctgtcccataggggacagggcgctttctgtgtcccgatgagggcatcggaccctacggggtgcaatcttctcccattgcctgcgtaggggcgcacatcgtgcgcccgccggtctcccaccggccgcccctattctgccaggacaggcgcgatcccctcgtggggtatgcccgccaattcaacacacccgcggcggcagcacaaacggggggattgggtgtggtccaccacccgcgccggacgcgggcgccatgcccaagggcccgcgtctcccatatcggggggccggggcgggtgtggcctgtgggacctaggcgaagccgtagtcacaccggacacactcccccggcggcgctttgcctactttgccgccgggggcaaagtaagccgcccctcagggcggaatcccttggaggcggagacggtgggatggaaggaagacccctcatccgtcacggcatacgccgtgacaccttccccccggtggggggaaggctttgagggcgcctcccggggccgcccctgtgctgaaaacccagccttgtcccgtcagcaccgaactatgacatctgcctgatgtcatagtttcaccacaaatctgttatactgatgccaccatccgccgtcattggtttgataccgccgttctcacactccatttaacattgatgggaagattctcctgctataaaatatgtgagaaagaaggtgagtccatggagagagatatcctgcgcatccgtcagaaacccttgaagggagaggatgggtgccgcaccttctctgtccgcatccgtgaggatatcgtctcccgcatggatctcattgccgcccaaaccgggcggagccgaaacgagcttgtgggcatattcctggaatatgcccttgaccactgtgagatagaggagggcacccgcaatgaatcgtgattaccgcgattacccggccagcatttgggacgccatcggtgatgttgaccaggggatctgctgtgccgccctgggcggtgtggtgtgggattttatgagccatctgaccccggcgcagctcctcgccgccatggacagcgccgcgctggagaccctgcgggccatccgggacatcctggaggacgacacgctggaggacccggagtgtgtccagcgcattgatgccattctctccgccttctatctcaagttgggggcggaggtccaccgccgcggaatttgaatcgtcccgcgcctctgccctctgcgggaatgaatcccaccgcgcacgaaaatgcgccctggcctgcttagtccagggcgtcagcttgcggaaaaagcctcgcagagttcgcgcccgcaggcgcgaatccagttctgatccgttttccccggcgacatgcgcgtcggggaaaacacctctcaggctgcaagtgtggggtttgtccgcctttggcggacaaaccctgcgcgcagcagactgcatctttctcgaaaaagtggcaaagccactttttcgacagtcttgcgccccggcctgctcaggccggggcgcgtctgtttactttctggccgcggacagctccttctcctgtctgggctcctccgcctccggcctgcgccgccgcagggccttttccgcctcgcagatggggatgggggccatggccagggccagtaccgtcacccactgggtcaggtccatggggcacacggagaacaccccctgaaggggcggcaggagcagcacagacagctgcatgaccatccccgccaggaacgccttgttcatggccgggttggacagcgccccctgggccagcagggactggtcctcgctgcggacgttgaaggcgtggaacagctggctcagcgtcagggtggcgaaggccatggtgttggccgccgccccctccatgccgggggcgcccaggtggaacagccccagcagataggcccccaaagtcagcccgcccaccatcagtccctgccacgccaggcgcagggagaatccccgggagaacagcccggcggaggggtcccggggcggctggtccatcacgccctcctccaccggctccacgcccagggccagggcgggcagggagtcagtcaccagattcagccacagcagctgcaccggcaccaggggcatctgcccgaagttcaagagggtggccacgaaaatggtgaagatctccccgatgttgcaggagagcagatagtggatggccttgcggatattggagtagatcccccgcccctcctccaccgcctgaacgatggtggaaaagttgtcatctgtgaggatcatctccgccgctcccttggccacgtcggtgccggacagccccatagcgcagccgatgtccgccgccttgagggctggggcgtcgttgacgccgtcccccgtcatggccaccacccgcccctttttctgccaggcccggacgatgcgcatcttgtgctccggcgacacccgggcaaagacagcgaatttttcaatgtcctcctccagcatctcctggggcatgaagtccagctccgggccggtgagggccaggtcccctgggcggcagatgtccagctcccgtgccaccgccatggccgtggcacggtggtccccggtgatcatcaccgggcggatgcccgcctggtggcaccgctccaccgcccccttcacctcccgccggggcgggtcggccatgccgaacagccccaggaaggtaaggtcccgctccaccgtcccgctctccagctttctgggctgcagggacagctcccgccgggccaccccgatgacccgcagggcccggcgggccatgtcctcattggcggcgaggatctgtctccggtccgccggcgacagtgggcctcttgggccggacacgcaccgctccagcagcacgtccggtgcccccttcaccagcaccaggcggccgcctccctccttttcgtggacggtggtcatcagcttgcgcccggagtcgaaggggatctccccggtgcggggcaggctctcggacagctggttccggtccagcccctcccgggcggcggccaccaccagcgccccctcggtggggtcccccgcggataccggggcccccgccttccactccagccgggcgtcgccgcacagggcccccgccagcagggcgtcccgccggtgcccccccgccgggacccacagctcccgcaccgtcatccggttctgggtcagggtgcccgtcttgtccgagcagatgacgctggcacagcccagggtctctaccgcgggcagcttcttcacgatggccccccggtccgccatccgccccacccccagggccagcacgatggtgacgatggcgggcaggccctccgggatggcggccaccgccagggagacggcggtgaggaacatgcccagcatgtccttcccctggagcagccccaccccgaacatgacggcgcatacggagaggcacaggaaggagagggagcgtgagatctcccccatcttccgctggaggggggtgggctgggtctctccctccagcagcaggccggcgatgcggcccatctgtgtgtccatgccggtggcggtgaccagggcggtggcccgccccgccgtgaccagtgtgccggagatcaccatgttggtccagtctcccaggggggcgtcctccggcagcggcccacccgccgccttctccacgggcaccgactccccagtcattgcgctctcgtcacagcgcagtcccgccgcctccagcaggcgggcgtccgcaggcaccaggtcccccgcctccagcaggatcacgtcccccggcaccagctccgccgcctccacccggacgggcgcgcccccccgcagggcggtggcgtggggggaggtcatcttccgcagctcctccagggcccggtgggcgtggtcctcctgggagatggagatgatgttgttcaccaccacgatgaccaggatgatggccgcatccagccagtcctccccccggctggccgccagggacagccccgccgcccccagcagcaccaagatcatggggtccttcatctgggccatcacccgggagagcagccccggccgcctggggggctccagctgattcggcccgtaccgggccagccgctcctccgcctgccgccgggtcagtcccccgggccgcgcgtccagttcctgaaaaagatcggcctgcggccggctgtgccagctatccatgacctcacgctcccttcctttgtaccgctcagtatagaccccggcctgtccattttttgcagaatccagggggctgggacaggctttttcccgacaaggcttgacaagttcctcctacacatgtagaatcatctcagaaattctacatgtgtaggagtggtctttatgtggaagctgacggacagcgagtggaaggtgctggaggccctctgggccggcgggccccagcatctggggcagatcctgggcgccctggcgccggagaccggctggagccgcaccaccgtgcacacctacctcacccggatggccgccaaggggctggtatccatggaccagtcctccccccagcggtacgccgccatccccagccgggagacgtgcgccgcccgggagcggcgggatctggtgaaccgggtctatgacggctcggcgggacagctggtggccgcctttgtgaaggacggcagcctctccccccaggagcgggaggagctgcgccgcctgctggacgagatggaggtgtagccgtgttcgatctctggtccttcctccatcagacggcggcggccagcatggccgccctcttcgtgctcgtgctccagcacatcttccgggacaagctctccccccagtggcagtacgcggtctggatggtggtggtgctccggctgatcctgccggtgggctggctgggccgctctgccatagccgacctgaccgggctgggcgaggccctgcggacttgggtcgagctggggctggactccgcctggtcctccccctggaccccctccctgcccctggcgggcatccccatccccccggcgggcggactgccccgctctgtcactgactggctgttcctcctctatctggcgggggtcctcctgtccgccctgtggctggcggcgggcgggctgcggctgcgccgctccctgggggaggccgtgccggtggccggagcccggctggaggccgtcgccgccctggcggagcgcttcggtctgtccatgccccggcgggtggtggagagccgcgccgcctccacccccttcctggtgggggtggtccgtccggtgctggtgctccccatgggctgggccccggaccgcaaggtgatccttcacgagctgatccatttgaaacagcgggacgtggccgccgggtgggtcaccgccctgttccggtgcgtccactggtgcaaccccttcctgtggcgcatctttgaccgcatcgacaaccagcgggagcagcgctgtgaccagctggtgctggagcggctggagggggaggaccgccgggactacggccgggtcctgctgtccatggcggatgacggccggcgccgcttccccggcgccaccaccatggccaacggaggacagaacatcaaggcacgcatccaggccatcacccggttcaaggcctttccccggggaatgggactggtctccgtctgcatggtggtgacgctgaccctctccctggtagtgggcctgccggtctccgctgccgatcccctccccggcgctgtccgcctgctgggccccgtgggcagtctctcctacgccctgtcccaccggcccgccaccgtagggggcgccctggacgcatacagcaagggcatctacgcccagtatcacgacgttcaggactgttacgcctaccaggccatgaccctcccccaggagcagctccccgacctggtggaggagtggcggcagacggaccgggcgggctggagcgtgctcccggggaccgatccccgatcggcgtcctaccgcaccggccccatcttccggggactctcctatgatggggaggggggttactggacccagatgtacttcttccgggacgagggcgggccgcgggagggcactgagcgctccatcggctaccgccgccacaccctccacctccagcgccgggaggacggcacctggacggtctcgcccctgtcggtacaaaccggccggctggcctccccctttgagtgggaacagatacggctcacttcttacgacaaccttcccttccccagccaggagccccccgttttcacctggcacggagaggcggatggggtggaattggagctatggcccgaggcagagctccgggtccaagacgcctatatagagggctctgctgtcaaaaagctagatctgaatggcttcggcagctcgatccataccgatgccccagatctggatgcccggtttaccagtgttgtgggcggaatggtgcttcgactcaccaatcataccaaccagcccaaaaccatgaccctggacgtcactcagtactgggatgagggggtctccgtcctgaccggaacggatgccccggaggacggccagcaggaggacccggtgttcggtctgctgtctcaagtccagaacagctgttataccggctatgatgtgtccggtctggaggtggagctggcccccggggaaagccgggttctgtactggggcagccgcggcaaggggtatgccaaccgcatccccgccgcggactgcgtcatggcggactggctggaggccgtctatacggacagccaggggaacgaggtccccatcccactggagcgggaggtgcatctggattgaactcaaaactgatccgcggggtccagtacgccgcctgggcctacttcttcctctatctggacatcaaccttaaccgcttctccctcctccccaatgcggtggggtggtatctgctgagccgggccgtcaccgccctggaggaggagcatccagacctgcggctcctgggccccctcaccttccccctgggtctctgggcgctgaagcagtatgccttcctcctcccagcctgggacctgtcccagttctcctggctgctgagctggctggcgctggcggtggagctcaccaccctgtatttccacttccagttcctcacagacctggcggacatcgccgcccgccacgccggagagacgggccgtgacttctcccccgccctgctccgggcccgcacggtggtcaccgtcctctccaccgccgcctccgtcctgttttacctgggggtggacagctccggccccctgagttccttctccatcgcgctgaccctgttcctgctggtggtgctggtggtccagatcctatgcaccaccgttctcctgtttcgcttctcctccgctctccggcgggcaggccccgttttgccggagggccccggtatataaaaacctccgccctgcccccacatgggggcagggcggaggtttttctacgctgtgaagggcctcagttctgggcgctaccgctggcggcgggggcgctggcggaggcggaggtcccggcggatgcggaggcgtcctcctgggcgctcagctcctccatccgggtgctcaccgcctgccgcagggcggtgaccgtctcatagaaagcgggcacgtccagctggtcaaagacatcgttggtaacgatctcatgctcgtccagccagccctgctggagctgggtcatcttctcctgcacaaagtccgcctgatagtcggccggctccacctccaggggaaggcgcaggatgatgtggtagccgtaatcgctctccacgatgtcactgatctcgccgggctccagggccagggacgcctcctcgaactcggggaccatctgacctgcctccacggcctgatagccgtccgggttggtggccagtccggtgtcctcgctgtaatcgttcatcagctggtcgaacagggcggcggggtcgctgctctcccgcagctggcggagcagatcctccgcctgagccttcttctccgccgcggcagcctcgtccaggggctctccggtctccgggtcctgggtcagcagcaggatgtgcttgacggagtacagcttccggtcgttctggatgtaggagagcaggtcggcgtcggtgggcttcatggtgccgttctctccaaaatacttatcctgaagctggccgttcaggtcctcgctctcacacagctgggtgtagagctcaggagtcaggggatactgccacaggtacatggccatcacgtcctcgccccccatggcctcagtcatagtggccagctgatcggcaaaggtgtcctggaagtcctgggacagggtcacgccctccccctccgctatcccggggatcagggcgtacagggccgcagtcctcagcgcgttgtccaaagtcccctgggtcagggtgacgccggaggcgtcctccgtatcccagggcagctcggtgatgccgaaataggtgctgtaataactgagcatgctgtcggcgctgtacgccacccagtacagcagctcagcggcggtgatgtccacatctcccacctgggccaccacagtgtcacccgggatgccggcggtggtgaggaacacatccgtgacggcgtccaggtccacggtgatcggttcactgctggaggtgctcccggcggcactggaagaagcgccgctcccggagctcccgccgtccttaccgcaggcggtcagggaaaaggccaggatcagggccgcgagggtcagggcccccgcccgtttcatcgatctcataagagcagttcctttctgtttcatccaattcagatctgttccggtccgcagggccggatacagtttgatatcataccacatctgtcttccggtttcaatggagaagggaaaaactccccactctgaaatgcggggcggcttcagccctccgcccccgcgaagtcgtccaccacctgccgtgcggcccgcagggcgtcctccccctttttcagccggaaggtaaagcggggcacctcccccggagtgagcagcaaccggttctgataccggtccatggcgcacagggcggaaaactgctccagactgaaccgggccagggtaaagaccagctgcccctgcttctgggcaatgtcggtgatcccggcctccgccgccgcagcgcggagcagggccacggagatcaggttgttcaccgtgcgggggggctcgccataccggtcgatgagctcatccaccaggtcgtccgcctccgcctcgctgcggatggcggcgatgcggcggtacaggtccatccgctgctccggggaggggacgtaccggtcgggcaccgacgccgccacgctcaggtcggcggcacattcggtcttgggaggcaccggctggccctgctcctgaagcaccgcttcctccagcagcttcaagtacatgtcgtagcctaccgacaacaggaagccgctctgctccggccccagcacgttgcccgcaccccggatctccaggtcccgcatggcgatcttgaagccggagccgaactcggcgaactcccggatggcgctcagccgcttggcggccacctcggtgagcaccttgccccggcggtaggtgaggtaggcgtaggcccggcggctggaccgccccacccggccccggatctggtggagctgggccaggcccaggcggtcggcgtcctcgatgatgagggtgttggcgttgggcaggtcgatgcccgtctcgatgatggtggtgcacaccagcacgttcagctccccgtcggtcatccggctcatcacctcgtcgatggcctcctgggtcatcttgccgtgggccacccccaccgccgcatcctcccccagcatggcctggatgcggctggcggtgcggtcgatggtctccacccggttgtggaggtagtacacctgcccgccccgctccagctcccggcgcatggcgtcccccagcaccccccagtcatgctccagcacataggtctgcaccggctggcggtcggcggggggctcctccagagtggacatgtcccggatgccgctgagggccatgttcagcgtccgggggatgggggtagcggacagggtcagcacatccacctgacggaagttctccttcagcttctccttgtgctggacgccgaagcgctgctcctcgtccaccaccagcagacccaggtccttgaagcgcacgtcccggttgaacaggcggtgggtgccgatgaggatgtccacctcaccgctctccacccgccgcagggtctccttcatctgggcgctggtgcggaagcgggagaccacatcgatggtcaccggatatttggcaaagcgccgcagggcgttgagaaaatgctgccgggccagcaccgtggtgggcaccagcacagcggcctgcttgccgtccagcacgcatttcatgacggcccggaaggccacctccgtctttccgtagcccacgtcgccgcacagcagccggtccatgggcaccgggcgctccatgtcccgcttgatctcctccacgcagcgcagctggtcctccgtctctgcgtactcgaactcctcctcgaattcccgctgccagggggagtcgggagagaaggcgaagccgggctgccgctgccgctgggcatagagctggatcaggcccttggccagatccttcaccgcctttttggccttgctcttggccttctcccagtcggtgccccccaggcgggagagctttttggtctccgccgcgtcctcgcccccgccgatgtacttgctcaccaggtccagctgggtggcggggacatagagcacatcggagccggcgtaggcgatcttcacatagtccttctccaccccgtcggcaggcagcttcaccatccccatgtagcggcccacaccgtgatgctcgtggaccaccaggtccccgggggacaggtcggcataggacttcagcttctcccggttggtggccgccttccggggccggggctttttcagtgccgccccctgtccctcggtgagtaccgccagacgggcctccgggtactccatcccggcggacaggccgcccaccgagaccagggtctcccccggcccagggagggtctggggctggaactccaccgccgcccggaggccctgctcccgcagcagcatctggagattcagggcccgctgttcgctggacaccagcaccagggtgcccaggcccgagcgctggtagtggtccaggtcggagaccgccgtctccaggctggcgccaaaggagggcagctgcttggccgtcaccgacagcaggcagccggggggcaccggataagccgacagagtgaaggagtccagataggccgtcggccagtcggacagccggacgttgagctccgggaaggtgcgggccagcacggcgcaggagccgtccagctccccccgctccatcagggacttggcatcctcctccagctgccactggtaggtcttggcccgctcccccacccggctgctctcagaaaagagcacacaggcgtccggcggcaggtagtcggccgccgtggccagctggggatagatcagcgccagatagcggtccgtggcggggaagctccgcccctgctccagcgcctcccggtcctgccgcagagtctgggccagctcatgccgccccgccttctccgcccctgcggccagcttctccagccgggctgccagccccgccgtccctccgggcgccagatggggcagcgcctccgccgccggcagcagcaccgcccgctccacgttctccgtccggcgctgggtggcggggtcgaacagccccatagcatccagctcgtctccgaagaactccgcccgcacgggctgctccatccctggggagtagacatccaagatcccgccccgcagggcaaactgtcccacgccttccacctggtcgcaccggctgtacccggcggcggtcagtgtctcagccagctggttcaggtcatagctccccccggtccgcagctccgcccaggcccggtccaactcctccgggggcagggtccgctgaagcagtccctccaccgccgccaccagcaggggcacctcccccgccgccatggcccgcatcagggccagccgccggtgctcccactggcgggagacagtggccgcgttgtgaaagatgtaggaccggggggcgagcaccggcacccgctgccccgtcagggactccagatcccgggccagccgctccccttccccctcgtcggcgcacaccagcaccaccggccggccggtgcgggcgtagaccccggcggcaaagtgggcccggtggaccgccgacagcccggacagggccacgggacagcggccgctgtccatggcggccagcagctggccgaactccggcacattgttcaagatgtcgttcaaaagtttcatagcggccaccaaatagaaaaatatggaaatcaaaaacgtgacaaagccccccgttcccgactttagggagggggtcattttccaacagtatatcgccttttctctggtccgtcaaggaaattcccggggatttccgcccccggtctccattcaggggcgggtccgggccccctacgggatgccttcggtctctgcgtaggggcgcgctttgcgcgcccgccggccgccccgcagggcggaaccctttgggggccatcctgcggctgggatggggggaggaagacccctcatccgtcacggcatacgccgtgacaccttccccccggcgtgggggaaggctttgggggcggcgctggaagccgcccctacgggatgccttcggtctttgcgcgcccctgcggcacgtcacaggtccgggaatggcaggcagggcccgcctcctgtgtaaaggccggaaccaaaacagcggggaagacctctgtctcccccgcccgggtcagcggttgatctcccggttctccgtccgccccagaagatagtccaccgacacgccgaaatagtccgccaattctatcagctttggaagcctagggtttacttctcccgcctcgattgcctgatagttgcgcaccctgcattttagaaaatctgccatatcctgctggaccagtccccgttcatttctcaaaacctttagtctttctcccagtgatttcaaactggtcacctcttgacacgcaataaaaaaacatgttataataatgggcgtaaaggagtggttcctatgtatgacctgatctccatccttctggactatgtggaggcccttccccccaccccggacatggaccgggtatccgaagagagctttcccttcctgcagcggctgtatcagctgacaggcgaggacgaggcggaccgcatctggggcgcggccatggaggtgggcgcctccgagggccggcagatgctcctcaccgggctggccctgggcctggagctgggacaggagctggaccagctctccctcagccgttgaaccggctcatcccccggtcgatgccctcggccaggatgcactccaccgcgtcggcggcccgcttcaccgcctggtcgatggcctttttgtcctccccctggaacttgcccagcacccagtccgccatatcataatccgggtggggcttctcccccacccccacccgcagccggggaaactggtctgtccccaagtggaggatgatgtttttcaggccgttatgacccccggccgagccccccctgcggatacgcagacggcccacagccagggcggtgtcgtcagagaccaccagcacgtggtccggcgccaccttatagaagtccaccgcctggcgcaccgcctccccggacaggttcatgaaggtgacgggcttcatcaccagcaccttctggccggagatggtgaacacgttggtcagcgccttatatttcagcctctggatgggggcgcgctggcgctcgcccagctcgtcagctaccatgaagcccacattgtgccgagtgttttcgtatttctcccccgggttgcccaggcagaccaggacccagtccaccccgccggttccatttccaaacagcatatcggtctcctcaaacagtctgaagaggggcgggtattggctacccgccccctgttttcgcgcccttccggtccccgctctctcttacaggaacagcggggagacggaggtctccatatagatgtggctgatggcctccgcgaacatgtgggccaccgagatgtacttgatcttgtcgcacttgacgccgggcttggccgggatggtatccaggaagatgacctcgtccagcacgctgctgttgatgcggtcgatggccggaccagagaggacgccgtggctggcgcaggcggtcacatcctgggcgccgccgatctccatcagggcctgagccgcgtggcacagggagccgcccgtatccaccatatcgtccagcaggatgacgtgcttgccccgcacgtcgccgatgatgttcatgacctcggaggagttggccttctggcggcgcttgtccacgatggccaggggcatgttcagcttctgggcaaaggcccgggcccgggacaccgaccccacatcgggggagaccaccatggtgtcgtcatggcagtccgcgtacttcttggtgaagtggtccacaaagatgggggagcccagcaggttgtccaccgggatgtcgaagaagccctggatctggttggcgtgcaggtccatggtcagcacccggtctgcgccggcctccgcgatcaggttggccaccagcttggctgagatggggtctcggggcttggtcttgcggtcctggcgggcgtagccgaagtaggggatcacagcggtgatccggccggcggaggcccggcgcagggcgtcgatcataatgagcagctccatcagcgcatcgttgacggaaccgctcttgtcgtccttgcggaaggagcaggtggactgcaccacaaagacgtcggagccgcggacggtctcatagatagaggcgaaattctccccgtcggagaaggctcccacctcggagtcgcccagagggatgcccagctcctgacagatgttctgggccagcttggggttggagtttccggtgaataccttgatatccttcccgtgtgcgatcataaacaacttccttccttacgcggaccgccggtacctggccgggtcggtcaccaaatctgcttgctctctgttcctctattgtgacggcagtgccgatcagcacggatatgcgtggggcttctccatcaaactgcacagatccggcacgttatgcggatacccccaaccattatagcataatagcaagaaagtttcctgggttcaagagaatttttcgagaaattttcgaaaattttctgggaatttttattcctgcctctcttttcctaaaaatgtctaaaaatgccccggcagcagacgctgccggggcatgaggaggtgcggagcagatcaggccgcgtcggcctggggggaacccgccagggggaccacgcccagcttctcccgcaggcggcctgggtgatagatgtgggagagctccagccccgcgcagaaggtatccaccaggtccaccagcagggcctccagggaccggggcagtgctccgcccaggggccacatgtgggacaggataatgttgcgctccttgtcggagagcttggtcacctgctcggcattccgggctgcggccctggggtggtcgaagcactggctgccggggtgggcggacttgtcccgggggtcatagaggtacaggtcgtggagcaggcccccgcgggcggcggcccgttcatccagacgcagccaccgggctgcccggaaggacaggtaggccacgaacagggagtggtccagggtggtgatccggccgtggtgctgccagcggcccatcatccgcaccggctcgctttccaggagctctcccgtcaggcggcagaactccagcagatgcttgtgcatcggatatcagtcctttcatgggtattttcctccctttcacccagttgggaaaaggggggcggaaatgggatgccgcggcgggcggttctgggccgtccccgcgatatctggctcacggctctgatgagagtgtcgctctgctcccatcatacccggagaccgcgcatttgtcagctggaaaagagagggggcgcctcagcggatctgtcccccgccccggatcacgaacttgaagctgcacagctcggccagccccagggggccccgggcgtggagcttctgggtggagatgcccatctcgcagcccaggccaaactcccccccgtcggtgaagcgggtggaggcgttccagtacaccgccgctgagtccactgccgccaggaagcgccgggccgcctccccgtcctctgtcacgatggcctccgagtggccggtggagtgggctgcgatgtggcggatggcctcctccgtcccgtccaccacccggacagccaggatatagtccaaaaactcggtgtcgaagtcctccggacccgcgggcgtgccggggatgatcccggccgccgtcccgtccaggcgcagctccaccggccgctccccccgggctgccctggcatccgtcagccgctcccgcatccggggcagaaagaccggggccgcctcccggtggactaggcacacctcggcggcgttgcacacgctgggccggctgcacttggcgttctccaggatgtccagcgccatgtccaggtccgccgcccggtccacatagacgtgacagatgccggtgcccgtctcgatgacggggacggtggcattgtccacacaggcccggatcagccccgcgcccccccgggggatgagcaggtccacgtatccgctggcggtcatcagctcgtgtgcggaggcccgggtggtgtcctccaccagacacagggcctcctggggcagtccggcccgggagaggccccggcacagggcggagacgatggccgcggcggagcggtgggcctccttcccgcagcggagcacacaggcggagcccgccttcagggccagggctgcggcgtcgctggtgacattgggccggctctcatagatgatggcgatgacccccattgggacggcggtcttctcgatcaccagcccgttgggccgctccacccggctgaggacagcccccaccgggtcagggagggccgccacctcccggatccccttcgccatgccggcgatccggtccgggctgagggccagccggtccagcatcacctcggagatgcggccccgggccccctccagatccagggcgttggccgccaggatgggggccgtgtccgcctccagctcctccgccatggccagcagggcccggtccttggtctgtgtatccgccagagccatggcccctctggcctgtctggcacgcgcaagcagttcttgtgtggtcatcccttccgcctccttgtggtccttcgcctttgagccccgtcaggcccgccggcccaggaaccgggtccccacctgcttcccctccacgatatcatagagcagctggggctggtccccgttggtgatgatcatgtcgcagccctggccggtcaccatgcgggcggcccgcagcttggtggccatgccccccgtgcccaggccggagccagccccgccggccagcgcctcgatgtcggcagtgatctcctccaccaccgggatcagccgggcacccgggtccttgcggggatctgcggtgtagagcccctggatatcgctgagcaggaccagcaggtccgctttcaccgtgcaggccaccacggcccccagggtatcgttgtcccctaccttgatctcagcggtggccacggtgtcgttctcgttgatgatcggcagggcgcccagctccagcaggcggaagatggtgttctggaagttctccctccggtcgctgtggtcgatgtcctccccagtgaggaggatctgggccacagtgtggttgtattgggtgaacagccggtcgtaggtgtacatcagctcgcactgtcccacggcggcggccgcctgcttgccgggcatgtcagtgggccggcagggcagattcagcttgcccacccccatgccgatggcgccggaggacaccaggatgatctggtgtcctgcattcttcaggtcggagagcaccttgaccagctcctccacatggcggatgttcagccgccccgtggcatgcgccagagtggaggtgcccaccttgaccacgatcttcatagcatcaaacccctttattcagctcgggaaccggaggacagggccgttcccctgtcctccctggctccgcctgtcccttattttgtccctaattcctgcgtcttttcataggcggccagcaccgcgtccatggcggcggcccgcagaccgcccttttccagcgcccgcaccccttggatggtgctgcccccgggggagcacaccgcgtccttcagggcaccggggtgagcgccggtctccagcaccatccgggccgacccggccagcatctgggcggcgtaggccagcgccttgtcccggggcaggccgcaggccaccccgccgtccgccagggcctccaggaacaggtaggcaaaagcggggccgcagccggacacgcagctggctgcgtctatcagcccctcaggcacctgatccaccagcccggcgggggccatcaggtttcggaaggaggccatatcctcctccgtggtccccaggccgcagaactggagcaccccctcgccgatggccgcgggggtgttgggcatcacccggatcaccgggcagtccacccccgccatctcccggatccgggcgcaggtcaggccggcggccatggtcaccagcacaaagcagtcctcccgctccttcagcacaggggtaagagaggccagcatctcccccatcacctggggcttcactcccagaaagatcagccggcaggcgcgggcaacctcttcattggtacctgcggcgcagcccagctcttcggccagggcttccgccttggcgggggtgcggttggtcagcagcacctgctgggggggcacagttttacagacggcccgggccagagcagcgcccatgttccccgttccgataaatccgacagtcgcagtcatgtgtgggagcctccttcttctgatgctcttttcgcctatactatatcacggccgctcgcctttttcaaacggaaacagattaagaaatggtaaatcttctccctttttgcgtggagatctgacggtcctctctccccctgagataaatcctaagaaaatcttaaggatttcttgcttgatttttcggtcccgtccgcatagactaactgtactaatacagtgaatacagtttgaagggaggcggcagtatgctgaatctggactaccgggatgcccggcccatctacgagcaggtgcgggacaatctgcgccggctgatggtgagcggcgccatccaggagggggaaaagctcccctctgtgcggtccctggccagcaatcttgccatcaaccccaacaccatccagcgggcctatgagtccctggaggcggagggctatgtctattctatccctgggaagggcagcttcgcggccccccgcaccggggtggatgaggagcggcgggaccggctgctagggcagttcgacagtctgacagccgagctgctgtacctgggggtcacgcgggatcggctgatcgcccgcatccgggaaaaagggggagaggtccaatgatcaaggtaaacaacgtcgtcaagaccttcgacggcttccgcgccctggatgggctcaccatggaggtggagaagggctccatctatgggctggtgggccctaacggcgcgggaaagtccaccatcctgcggcacatcaccggcatctaccgccccgactcgggcaccatcacggtggacggggcgccggtgtacgaaaatccggcggtgaagtcccgggtggcctttatccccgacgacctgtactactttctgtccgcctccacccgggacatgatgaagttttaccgggggctgtatcccgcctttgatgacaagcgctatcaggtgctgaaggaggccttcccggcagtagacgagaaacagcccatccgccgcctgtccaaggggatgcagaagcagtccgccttttggctggctctgtgctgcaaccccgacctgctggtcttggacgagccggtagacggcctggacccggtgatgcggcgtcaggtctggtccctgctcatgggggacgtggcccagcgggggaccacggtgctggtctcctcccacaatctgcgggaactggaagacgtgtgcgaccacgtgggcatcctcagccggggcaaggtgctcctgcagcgctccctcaccgatcttcaggacaacgtggtcaagatgcagatcgtatttcaggagccggagatgcccaagctgccggaggacctgaacctgctccatgtcacccaggtgggccgcatccacaccctgatcgtccggggcagctccgacgtcatcaaaagccggctcgccgcgttccagcccatcctgatggaggccctgcctctgacgctggaggagatctttatctatgaactgggaggtgaggactatgcggtccgtgacatcatgctttaattccaccctctaccgcaaaaacctcagccgcttctggcccatctgggccctgtactcggtgatctggctgtttgccctgcccctcaatctgctcaccacgatccagcgggggcagaactgggctctggaggaccttgcgcacagcctggactatttttcccgggtctcggtgggctactccctgaacttgggcacggtgctggccgtcatctttggcctgctggccgctatggcggtgttcagctatctggatgccagccgctccgcctgcatgatgcacgccctgcccctgcggcgggaggctctgtttttcaccaactatctgtccgggctcagcttcctgctgctgcccaacgccgccatctttggcctcaccctggccggcgaggctgtggggaactgtctggatctgaaggcgctggccatctggctgctggtccagtccgcctcctgcctcttcttctactcctttgccgtcttctgtgccatgttcaccggccatctgctggctctgcctgtcttctacggggtgctgaactgcctggcggctatcatcagcgcgctgatggactcggtgctctacctgtttctctacggctacaacggcctgagcggcaccacccagcaggctgtggcctggctcacccctctggagaaactgggcggtgctgtatcctggacccaggctgcggacagcggggcctatcagcttgcccagcccgccgtggtggcggtctacgccggtgtgggggtggccctgtctgcggccgccctgttgatctaccgcgcccgccagatggagtcggcgggagacgtggtctccgtgcgggtggtccgccccatcttcaagtacggggtggccgtctgcgccggtctctccggcggcacctttacctactatgtgctgttcggagacggccagctctccctggtgctgtccatcctcttctgggctgcagtgggctattttctggcggagatgctgctgcgcaagtccttccgcgtcttctccgcctggccgggctgcctggtcctgctggcgctgctctccgccctgttcctgtgcatccggctggatctcaccggctatcaggactacatccccgcctccggcgaggtgagccaggtgactgtggatctggagggcagcacctatcccagcgacggcttcggcgggagcgtccagatcaccgacccggagcaggtcgcccagatcaccgccctccaccaggccatcgtagctgcccgctccagggaggatagcatctatgacgactccttctatatctccctctcctacaccctgtccaacggacagagcatccgccgctactaccacggcgttccgctgtaccgggcggagcaggggatggagggcaccgtcacatgggctctggatcagctggtctctgaccggagcttcgtccgggccggctatggacttgaccagtccgcggactggagcctgacggaggcgtacgtctacgatctctgggacacccaggcccatagccacgagtccgcctccctctccgccgcccaggcggagcagctgtggcaggccgtgctgaccgatttcgacgcgggcaccatcggcacccgctacctttttgaggaccaggaccgcctggagaacacctgtgaggctgacctggacttcagcttctacctgacggagcaggacagcatggtgcaccggggcggctctgtgaccatcaccctcaccccccaggcctcccacaccctggccgttctggaggagctgggcgttctcaccgacacccgcatcgcccgcacccatgcccaagccgatcgctggtacgccatgacggatggagctgaggatacttcttccctctacaccgcctccccctgatggacccacacagtcaaacatgccccgcccgctcccattggagcgggcggggcatgtttcttttttatggctgggcctccatggtctgttccacgatatccctcatgatctcccctgtcatggcgctctccacatagccgtagagattgccctccccgtcgatcatccaggtggtggggtaggcccggatgccgtactgataggtgagctggtactccgtgtccatcactatggggaaggtatagccgttctcttccaggaagatggcgatctcctcctgggtcccctcctgccccagcccaggggcggccactcccagtaccaccaggtccccctggttctcgccatactcctcatacagcgcctggatatccggcatttccccccggcaggggccgcaccaggtggcccagaaattgagaaaaatggtcttgcccttgtaatcggacagactgtgctcctccccgtactggtccaccagggtgaagtcaggggcagggaccaccggcggctccgacgcaccgttgtctgcatctgtggaggcggacggctcctccccgctgccgacgctctggctctgaggcacggcggagccggtctgggacagatattcggtgaagccgttcataaagccggtaaaggtcatcacccccatcaggatcagcagagccgcccccgccttccccgtccagcgcaccacctgctggtgccgcttgaagaaggacagcaccccgccggtgaacagccccaccgctaggaagggcagcacaaagcccagggtgtacaccccgatgagcagcgccgctgccggggccgaagccgaggatgaggccatcaggagcacgctccccagcaccggccctacacagggggtccaggcgaaactgaaggtaaagcccaggaccagggccaccagcggccccatggtccggccgcccagccggaagggcagcctgtgctcccgctccagcgccatggaatgtccaaacacccccagctggtacagcccgaacagcaccatgataatgccgctgatccgggcaaaccacagccggttatcgctgaaaaactgccccaaagcggtgaagccgaagcccagcaggaaaaaggtggcgctgatccccagcacaaaaaacagggtgttccacatcacccgccccctggggtagcggatggtgccgtccacctccaccgtcttggccccgcctgccagatagcccacatataaggggaccagaggcaggacgcagggggagaagaagctgaggatgccctgtatgaaaaccgtcagcgccggaacgctgatctccagatcaaaccccataaaaaacctccattcgcactgttctctgcggcgggatcatccgccgccggggcagggtccgccggagagcttccggtccacctgttccactgtgatctcctccagccgggccatgcaccggtcgtccaggtcatcaaaaagggcatccatcacctgagccatgccggtggccaccagacacttcacctcctggctgccgctgtgccaggaggtggagacgaagcgcacctccagcgcccgggccacctgggccagggacacctcccccgcccccttggcaaagcggtagcctccgccggagctgccctccttggtctccaccaggccgtcctttttcatacgggcgagcaccttccgcacccgggcggggttagtgcagatgttccgggccagctcctcgctggacaggacgcaccctcttcggttgagatagaccagagcgtggaccgccacgcagaaatcgctgttcataatggttctcctcccagggagccgttttctgtaactttatcagatacagaagaggctgtcaagagggtgttcgtcccaccatcagggacaggccctgccaatcctgccgccagcagcacacccggcccatcaccaggaaactggccagggacctgcggagcaggcggtcgccagggacggacaggcggccggcacgcaagcgtgccggccgcccaaacggtcctgcaaatctcccccggctcactccagggtcaggtccccctcccggatccagccgatccgacggaaaaacagcccgaacagccaagcgaggacggcgggcagtacaaagcagatcagcgccatggccagccagtccatgccggtgatggcagccttggcccccgtggccacatcgttcacccagccggcatagaccccgatggggcccaccataccgcaggtccccattccagccgccacacccccggcggggtcattcatctcaaactggaacacacaggtggccagggggccggtgaccgcggaggcgaggatggcggggagccagatccggggattgcggacgatgttgcccatctggagcatggaggtgcccagcccctgggagatcaggccgctccagcggttctcccggaaggacaggacggcgaagcccaccatgttggcgcagcaccccgccactgcggccccgccggccaggccggtcagcccgatggcggcgcagatggcggcagaggagatgggcagggtcagggccacgccgatgaccaccgacaccaggatgcccatccagaagggctggagcacagtggcccacttgacgaagtcccccaccgcggaggccgccgtgccgatggccggggcccaccaggccgacagggccacccccgccaggatggtcaccagaggggtgaccaggatgtcgatcttggtctccttagacaccgccttgcccagctccgcggcgatgaccgcgataaacagcaccgccagagggcctccggcgccgctgcccccggacagggtgacgctgcccagggcattggccgcatagcccaccgtgaccagggaaaagaggaccagcgggggggccttcagggcgtagccgatggccaccgccatagccgccccgctcatggccgaggcgtatccccccacttcgatgaggaactccatccccagctgctggcccagcgtcttgacgatggtgccgatgagcagggagcagaacaggccctgggccatggcccccagggcgtcgatgccataccgcttggccgagatctcaatgtttttgcgctttaaaaacgcgcggagcttttccatttctctcaccttttttcgtgatggtcccgcacctgccggcaaaaaggccatacaggtgtcaagacacttgtatggcctattatagcggctctgtcctgtttgtcaacgaaaacttttccctccggcagtcaagccccgcccggccgcagctcaccacagccgctccttcgaatcatcccggcgtccccatcctccaggtcagggccgccccccgggcagccttggtcaggccgatcaccttttccagccggggaaaaaaggtatcctgggccagctccgccagcttctcttccttctcggcgcgctcctcctctgtatccgtccagtccggcccggtattcatcggctccgagtaccaatctgtgtacatggagtccggataggagtaactctccaccaggtgcagcccctccctccccggcccgggcagaatgagcaggccgtccttgggggaggcaagcagggcattgcgcagttccaggtcccgcagcaccagcttggtaaaggaccggtccgtggtggtgatggtccggccccgggtcacctccgggcagccatagtcctcgtggaggtccggtccggagggcagcttctccagtccccggtccaggacgcccagcaccgtgttgaggccggtggacatggcacttttggggcggatgcgcagctcatagtcccgctccagatggatcgccagccggacgcggatggaggtcgtagtgtaccggccattgctctcccccaccgtccggatgatgagcggttcgtcccggtagctcagcaccagctccccgtcccagtctgctgcccggctgcccataaatacgccccccttctccttttgataggcgtaaagcatctcgttccagctcataagtccgctcctttcccgctcccgccgggtctcatgcccgccggaactgcttctccaggtcctttcgggtcagctcgatggccaccggccggccgtgggggcagtatttgacctctccccgcatgacggctcccgccaccttctccagctcctggggactggtgcgccagccccccttgatggccgccttgcaggccatggtgtggagcagctcgtcccgggcggcggaggggtccgcccgcccggtggtgagcagcctgcccccgatctccagcagggtgtcctcgatgtcccccgggtccacgtcaaagggggcctgccgcaccaccagcgcccccccgccgaagtcctcggcgtagaagccgaactcctccagcagcggcaggttggccagcagggcggccccctcctccgccggggggtggagggtgaccggggtgagcagggtctgcaccatgggggtgtagccctccgccttcatgcggtcgaagttcatccgctcgtgggcggcgtgcttgtcgataaacaggatggtgtccccctgttccacgatgatgtaggtgttcagcacctccccggcgatgcgccagggggctgcctctccctcaggctcaggctccgccggggcggagatctggggcgcgggcccttcctccagggccggagccgggcccgggtctggtgcgggcgtctccgccggcgcgggggcggggcgctccgtccgggtcccggccaggaggtcgaagtcctccggcgccatccggtcgtggcaggtcatcccgccctgggcttcaccggggcaggcgggggccggggcctccccggtcttccactccccgggggcggtcatttctccagagatcggagctctggggcggggaggctccgccggggcgggctggggtgtgcgctcccgctgctggggcgagaggaaagaggcggcggagggcatccgggacaggccgggcacctcccgacggccgtaggtcacgtcgtggaggggcagctccccggcgggcagcctggtctggttgggggtcacggtgtcgtgggcccggggcttctccagcgccacggcggggcggacatggtcccgctccagggcggagaggaccgcgtggtacaccgcgctgaacaccccccgctcgctgccgaacttcacctccgtcttggccgggtgcacattcacgtccaccgcgctgagcctggtggtcagatggaggacacagccgggaaatttgcccaccatcttctggttctggtaggcctcctccagggcggccatcatcagccgggacttcacctgccgcccattgacgaagaagaactgccagttccggctggcccggcagcaggagggctgggagacgaagccggacacggacatgccctcgtccgagctgtccacctgggtgaagcccagggccagatcccggcccagcaccgcgtagacggcggagcgcagctgtccgtccccgggggtggccagctcctgctttccgtcccggaggaatttcactgccacctccgggtgggacagggccacccgctggaccacgccgaatacggcggccccctcggcggcgtcctttttcatgaacttcagccgggcgggggtgttgtagaacaggtcccgcaccaccatggtggtgcccagggggcagcccgcctgctccaccggcccggccacgcccccctccagggacagggaggcccccagcggggcatcctgggtgcggctcatcacgtcgatgcgggagacggcggaaatggcggccagtgcctccccccggaaccccagggtgccgatggcctccaggtcatactccgtgcgcagcttgctggtggcgtggcggaggaaggcggtcttcatctggggggccgggatgccgcagccgtcatcggtgacccggaggaaagtgaggccgccgtgggcgatctccacagtcaccgatctcgcccccgcgtctatggcgttttccatcagctccttggccacgctggccggccgctccaccacctcgccggcggcgatcaggtcggcaacgtggggatctaacacttggatctcaggcatagagcacctccagaaattcaaagctccgctcctgcgggtcgtttttggtcataatagtcagaattcagaatacagatcccgggacggggccgggcctcccccgccccttatcccataaggtccagccggacagaatccgggtccacaaaggcccgccccggccggtccgggtccagccaaacgaggacctccgccccctcctggggctccccccacagcaggccggtggacacggtatagtcccggccgccccaggtgtacccgcacaccgcgctccagggcgagttccggcccgggacattgacaaaggactgggtgttccaggtcacgaagatgtggtggcggaccgagcggacggtgccggagaccgccgtgccctcccgccgcagccgcgcctggctccgccgccgggccaggcaggccagggcgcacccgccccccgccgccagcagggcggcccctatgggcaggaaggcccagtcgggccccgcgccccccaccgggatgtcccacagcaggacggccccgccgaacaggaggaaaaacgcccccatcagtcccagcacccaggcgcacagctccgcccgagaatttggacgccccatgccgcacctcctctttcatccgggcctctccgccccgcctcagctctcctgcaggtcctgcttcagctccgccagcaggttgagggcctcgatgggggacaggatgttcacatcggtcatccggagctttttcagcaccgtctggctgcccaggtccatcagggagacctgctccccgtccgccggaagggccggtccccctgcggggaggacgccgctccccgactccagctcctccaggatggtccgggcccgccgaatgacccggtcgggcaccccggccagcttggccacctcgatgccgtagctctggtccgcgcccccccggacgatcttccgcaggaagatcaggtcgttcccccgcttcttggcggcgatgttgtagttcttcaccccggggatctccccctccagggcggtgagctcgtggtagtgggtggcgaacagggtcttagcccccagccgtttccggtcggcgcagtactccagcaccgcccgggcgatggccatgccgtcataggtggaggtcccccggccgatctcgtccaggatgagcagggagcgggcggtggcgttcttcagcagtccggccacctcgttcatctccaccatgaaggtggactgtccggaggagaggtcgtcgctggccccgatgcgggtgaacacccggtccaccacgccgatgcgggcggagcgggcggggacgaaggagcccatctgggccatgaggacgatgagggccacctggcgcatgtaggtggacttgcccgccatgttggggccggtgatgatggcgcacaggtcctctccgctgtccatgtgggtgtcgttggggacaaagggggtgccggcggggagcaccttctccaccaccgggtggcgcccctcggagatgctcagggagtcggagccgtccacctggggcatgcagtagccgttgacggcggccaccaccgcgaaggaggtaagcacatccacctgggccacggcggcggcagccttctggatctgggccacgtgggcgcaggtctgctccttcagctggcagaagagctggtactccagggccaccaccttgtcctgggcggagaggatggtgtgctccaggtccttcagctcctggctgatgtaccgctcggcgttgacggtggtctgcttccgggcccagtcggggggcaccagcccggtctgggacttggccacctcgatgtagtagccgaacaccttgttgtagctcaccttcatgttcttgatgccggtctgctccttggtccgggtctccaggtcggccagcatctctgccccgtggtcgatcacgttgcgcaggcggtccacctcctcgctgtaccccggacggatgaacttgccctcccgcacggagaaggggggctcgtccaccagggcggagctgagcagcgcccgcagctggggcaggtcgtccatctcccggcgcagggactggatcagggcggaggggcagccctccagcagctcccgcagccggggcagcctgcccagtccggcggacagggcggccaggtcccggcccccggcggttccgtacaccaccctgccgatcaggcgctccaggtcggtgatctccttcaggcagagcaccacctcctcccgggtgatgatgtcctccaccagatcgctcaccgcctgctgccggcggttgatctgcaccggggagaggagggggcgctccatccatccccggatcagccgccgccccatggcggtgcgtgtcttgtccagcacccacagcagggagcccttcttctccttgccccgcagggtctcggtgagctccagggtctgccgggcgttcaggtccagctccatgaactggcccgcggtgtagcaggtgagggcggcgatgtggctcaggtcggtcttctgggtctcgtacaggtaggagagcagccccccggcgcactgcacacaggcctggtcctccgggggcaggctgtccagcccggtgcggaactgcttttgcaccaggggcagggcggcctcatagcggaagcgggcctcccccccgttctcacagcggcagtccagccgctcccgcaggaactggggcaggccctccaggctccaggccccgtcggagagcaccgcctcccggggagagaagcggcccagctcgtttttcaggtggtccatggcctccgcccccgccggaaaggaggtgacatagaactcgccggtagagatgtcgcacaggcacagccccagcgcccgggagtcggcgtacaccccgccgatgtagttgtttttcccctcctccagcatggaggagtcgatgagggtgccgggggtgatgatgcggatgatgtcccggtccaccagccccttggcctgggccgggtcctcggtctgctcgcagatggccaccttgtagcccttggcgatgaggcgggcgatgtagctctcgcaggagtggtagggcacgccgcacatgggggtgcgctcctccgggggcttgttccggtcccgggtggtgagcgtcaggtccagctcccgggagaccagcttggcgtcctcgttgaacatctcataaaaatcccccagccggaaaaagaggatggagtcgggataccgctccttcatctccaggtattggcgcatcatgggggtgatctcagccatatcggcaccgcctttcggtaaaataaaagtaaaaagtgcaaaatcctgtggaaagtgtggaaaagtacaacgaaacagacaggaggcgcactaaccgccagcgcgcctcccgggggtcagctctcctccggccccccctggtcgctccgtcccgccaggtagtccagggtgaccccgtaaaaatccgccatccggatcagggtggacagttggggttcctgctgaccgtgttcatacctctgataggtgcggaggggcacatccagcgcctttgccgcatctttctgcaacagtttcttggtctctttcagttcctgaagccgcgttgaaaacgtcgccatttacacacctcgtattgacatgccatttttggcatgttataatcaaaatacgataacccgcagaagggagcgctattgtttatgacttctttttgggaccacttatatcaatacgcccaggaacatctggtcgtccgctatctccaggaggagcccaccagctacggtcggctctccatccagacggacgcccgccggcgggggctggaggacctgctgcggggccccgccgcccgctccttccgccgcctctgggaggagcagcaggagttgcacagcctggaggagcaggccctcttccgggccgggctgtccatgggcctggccctgggcggccgggtccgggacttggagtagccccgcctcccgtccccctgcggggcccttggggcgggggctcccccctcactccgccagctccccgaacagggaccaggtgttggcgtcggtgatccgcacctgccggaactggccgatcagctccgccgggccgtccagccgcaccagccggttgcccggcgtgcgggcggccaggggataccgggcgtccccgctgtccccgtcgatcaggcagcgcagggtcttccccacataggccgcgtgcttctccgcggagatctggttctggaggtccaccaggcgctggaagttggcctgcttctgctggtggggcatggggtcgtccatctgggcggcgggggtccccacccgtggggagaagataaaggtgaacagggcgtcgaaccgcacctgctccagcagggacagggtctcctcaaactcctccgtggtctccccgggaaagcccacgatcacgtcggaggtgagcacgatgtccgggatgagctccttcagccgccgcacctcgtccaggtactgcgcccggtcatagtggcggttcatggcccggagcacccggtcattgcccgcctggaagggcaggtggagcaccggggccaccttcccgcaccgggccatggtctcgaacagcttctgggtggcatccttggggtgggaggtcataaagcggatcaggaagtccccgggcacggcgttcacccgctccagcaggtctgcgaagtccaggggctcctccaggtccttgccgtaggagttcacgttctggcccagcagggtgatgtcccggtacccctccgccgccagctgctccacctcggccaggatgtcctccggcctgcgggagcgctcccggccccgcacatagggcacgatgcagtaggagcagaagttgttgcacccgtacatgatggacacccaggcctttacccggtcctgccgcaccaccgggatgccctcggagatggagcccgcctcctccgccacctggaacacccgcccccgctgggtgagcagggtgtggatgaactcgggaaagcgccagagggcgtggggcccgaacaccaggtccacgtggcggaaggactgcttgatcttctccgccacatgggcctcctgggccatgcagccgcacacgcagatgatctgctccgggtggcggcgcttcacgtggaccagggcgcccaggttgcccagcacccgctgctctgcgtgctcccggatggcgcaggtgttgagcacgatgatctgggcctgctcctcgtcctgggtgaagccgtagcccatctcccggagatagccccggatgcgctcggagtccgcctcgttctgctggcagccgtaggtgtccacaaaggccaggggctgggcgggccgggcggcgctgagggccgcgacctcccggcagtactggagctggcgggagatgtcctccggggaaattcgggtggtctgctgtctcatagatcgcaacctcctgagggggatttgatggtcgtccggcccctcctgctgcatggagacaccgatcgaataatcataccatttttcccgaaaaagcacaaggccggacttttgcttttcgccgcttttccacccggtccccgcagggcgcggctctccgcccctccctggaaaaatgcgggccccctcgcggttttccgttgcgtttctctcaaaagggtgatagaatgaatcgttaaatggttacactggagggagacgtatctctctccttcccaacagagagaaaaagggggctgtgccatgcgggtgctggtcattgagaaggcggccgtaaagcagaacatcagggtggtgaagcgccgtgccggaggggccgccgtctacggcgtcctctcgggagacgccgggggcgccggcatcgccgagatggccgagctgctccgggccgagggcatcggccgcttcgccgtcagcgaggcggaggaggccgaggcgctgcggaaggccggctttgtggacgaggagatcctcatgctccgctccaccaccgaccgggaggtgctggagcggctggtggacctgaacgtggtgtgcaccatctcctccgtggacacgggcctggccctcaacgccctggcggagaaccgctccaccgtggccgaggcccacatccaggtggacaccggcatgggcttcggcggcttcctggtgggggagccggagaagatcctgctggcctaccgctccctgcccaacgtggccctgtccggcatttacacccagatccacgccgccccagccggccaggaggcggagcaccagctccagcagttccagcgggtgctggacgccatccacgccgccggctttgagaccggcaccgtccacgccgcggggtcctacgccctgatgcactgcgatcttgcccgcatggacgcggtgcgggcgggctcggtcctgctgggccgctgccgccgcaccaaagacgacgggctctccaccgtgggccacggggaggccggcattgccgagatgcgctggctgcccaaggggcacaccgtgggtgcggaaaagaccgccgttttgaaagcgcccacccgggtagcggtggtccctgtgggctatcagcacggcttcggggtggagcggccccgtcccgccggcctgctgggcaccctgggccgctggcggcggggcaggcggctttatgttcgggtgaacggccagcgggcccgggtcatcggctctgtgggcgtgagcgagaccctggtggatgtcaccgatctgaagtgctccgccggagatgtggtctccttcgacctggaccccatgtacgcccggggctgtgtccgccagtaccggtgatcctccctgtgatttcaagaaaaaggtgtttgctatgtccagaaccgtgtcttttcagccgctgctcttcggcggcgatatcaatgtttacagtgtggcccgtgcctttcacgaggcctatggggtgaagagcgtggccttcggcaagttccacaccttcccctgtgccttcagctccatcatcgactaccgcacctgccccgacaacgaggaccccgccgtcttcctctccaatgtagagaaggtggccctggagttctcccacaagaccgtcatcgtcctgggctgcggggacagctatgtgcagctgtgcgcccacctgaaggaccagtttccccgaaatgtggtggccccctacatcgacggcgccctgctggaccgcctcatcaacaaggagcacttctacgagctgtgcgaccagcacggcatcgaccacccggccacctttatctacgacggctccatgggccacgacttcaccctgcccttcggccccccctatgtggccaagccggccgacagcgtggcctactgggagcacgaattcgagggggtgaagaaggtcttcatctgtcagacctgggaggagctgctccacgctctggacctggtgtacgcctccggctaccccgaccatatggtgatccaggagttcatccccggagacgacacctacatgcgggtgatgaccaactactccgaccgcagcggccaggtgaagctgatgtgcctgggccatgtgctgctggaggagcactccccccacggcatcggcaaccacgccgtcatcatcaccgagtacgacgaggccctttccctgaagatcaaacagctgctggaggagctgcattacaccggcttctccaactttgacatcaagtacgacagccgggacggcaagtacaagctcttcgagatcaactgccgccaggggcgcagcaattactacgtcactggcgcgggatacaacatcgccaagctgctggtggaggaccggatcgaacaccgggagctgcccttcgtcatcaccaaaaaccacgccctgtggcggatggtgcccaaaaaggtggccttcaaattcatccccaaggcatatcacccccagatgaaggccctgatccgggcgggggcgtccacccacagcctggagtaccaccgggactataccccggcccgcatctggcgggtatggaagacccacatcggcaacatggtccgctttgaccgccacaacaaggtcccggagaactgagcagactggagggaagccatgtcaactgtcaagacccgcggcgccaagggcgccagagagccccgggagcccaagctgggcgtgctgggggggatggggccccaggccacccaggtgttctatcagtacgtgctggaccggacagaggcctcctgcgaccaggagcatctgcccgccctgatcctgtctgacaccggggtcccggaccggaccgcctccatcctcaccgggaacaccgagcctatgtaccagcgcctgctggccgacgcccgcctgctggaggagtgcggctgcaccgtcatcgccatcccctgcaacacctcccactacttcgtggaccgcatccagcaggagatcggcatccccatcctccacatgatccgggagaccgcccggaccttggtggcccaggggaagcgccgccccgccatccttgccaccgacggcaccatccgcaccggcctgtatcagaaggagtgcgccgccttcggcctggaggccgcccctccggagcccgctgtccagcgtctggtcatgtccatcatctacgaggagatcaaacggggggagcggggcagccgggagaaatttgcccagatcgaccgcgctctggcctccatgggctgtgactgcgccattctgggctgcaccgagctgtccgtcttccgcagctaccacagcctgccccccttctacgtggacgccatggaggtgctggccgagctggccgtcgtccgctgcggcaaacagctgcgcaccatctaagaaaacatctccggggcggtgcctgcccacgcccgccgttggaacgtactccgcaaattgaaaatgggggtggcgcccccatccacacatgacaacaccaggaggtttgctctatggatctcacgccccacaccctgggcgaatactgcgccctgctggagccccagctggccgctcctctgcccgaggggctggacctgtcccagtccgtcgccctggtctcctgcgacagccaggaggtggtccccggcactctctttctgtgcaagggcgcccacttcaaggaggcctatctgtcccaggccgcccagcggggcgcggtggcctatgtgagccagaccccctaccctgccgtggatctgccctgcatcctggtgtccgacatgcgccaggtgatggcccccctggccgaccggtactacggccatccctccgggcccctgtcggtcatcggcatcaccggcaccaagggcaagtcctccaccgcctattatctgaagtatatcctggatgagtatctggcggagcagggcgggccggagagcggcatcatctcctccatcgacacctacgacggctcggagcgcttcgagtcccacctcaccacgccggagcccctggatctccagcggcactttgcccacgcggtggcggccggcatcccctacctcaccatggaggtgtccagccaggcgctgaagtaccaccgcaccctgtgcacccgcttcgccgccgcctgcttcctgaacatcggcctggaccacatctcccccatcgagcaccccgactttgaggactacttctcctccaagctgcggatcttcgcccaggcggaggtggggtgcgtcaatctggactgcgaacacgccggccgggtgctggccgccgcccaggcgggcagccgccaggtcatcaccttctcccagaaggacccggaggcggacatctatgcctcccaggtgcgcaagcggggcaacgacatcctgttccgggtgcgttcccgccgcttttcccgggagttccggctgaccatgcccggcctgttcaacgtggagaacgccctggccgccatcgcggtgtgcgaggggctgaacatcccggagcgggccgtctatgtggggctgatgaaggcccgggtccccggccgcatggaggtgtacaccaatgcggacagccacatcgtggccatcgtggactacgcccacaaccgcatgtccttcgagaccctgttccgctccgttcaaacggagtaccccggccgccgggtggtcaccgtgttcggctgtccggggaaaaaggccctggaccgccggcgggacctgggggagatctccggccgctgctccgacctggtggtgctgacggaggaggactccggggaggaggacaccctctccatctgccgggagatcgcctcctatgtggaggcccagggctgcgactactccatcgagcccaaccggggggaggccatccgccaggcggtgctgggctgccgggagccctccgtcctcctcatcaccggcaaaggggcggagacccgccagaagcggggcaccgagtatatcgacaccccctctgacgtggactatgtccagtcctttcttcaggagtacgacgtgcgccatggcctggacggcatggagaaggtgcgctccctgctgtccattctgcccatcctcaagcgggacgagggccggaccgttgtggtgaaatacggcggctccgccctgggggcggaggcggccaccgacaccaccctccaggacgtggccgccctgcgcatggtgggcgtccgggtggtgctggtccacggcggcggcaagcacatcaccgccctgctggacaagctccaggtgcccacccgtttcgagaacggctaccgctataccgaccaggcggtgctggagacggcggaaatggccctctccgcccaggtaaacaaggccatcgtctcccgtctgagccagctggaggtgtctgccgtaggcctgtccggcaaggacggcggcctgctcaccgctgtggagaaggacccggccctgggccgggtggggtccatcacccgggtggagccccgtatccttcagaccctgctggacggggacttcctgccggtggtctcccccatcgccgcgggggaggacggcggcggcttcaactgcaatgccgacgacgcggcccgggcggtggcggcggctctaggggcggacaagctgatcttcctcaccgacaccgccggggtgcttatcgacagccacaacagcaagactgccgtcccccacatggatgtgaagcgggcggaggagctgatcgacactgggctcattgccgggggcatggtgcccaaggtgcggggctgtatccaggccatccgcgccggggtgggcgaggtgtccatcctggacggccgggtggagcacgccctgctgctggagatgctcaaccagcgggtccaggggaccaccatcaccggctgacccccgttcaaaagaaaacggggctgtcgaagaagcggcttttccgctttttccacaagctgaaacggcgcccccgcctgtggcgggggcgccgtctatttcaattttcacggtccggctggcgggtggaggtccgccggccgggccggttttcattggctctgtgctctctttacaggatcgcgtccaggatcacgtcttccagctggagggggtccagctggccccggttgcaccgatcggccagccggtccatctctccccggtcaatggagacgtcccggtactgcgccaccggcggcgcgtctttcctgtcccgccggtagcagtcgatcccgtacacctgccgtgcccctgcctcctgaaaggtcatctggcactcattcgggcggtagagatactgcatgagtccctctcacctcgcttttcaacacatctaaactgatattcgattcgctggcgatatggatcaccgtggacagcttggggttgacccggccggcctccatgtccagatagtgccggggagacaccccgcaccgctcggccgcttcctcctgggtcagctcgttctccctcctccaggtgtacaggagtctggaaaatcgccatttcagcgccatcagctccccgccggtctggaggatcagcccgtcctccggcccgcacccgtctgccacagaagcagcacagacaggaccagaacggtccgtccgctccacctccgtgtcaccagcggggcgagtccgctccatatggtgtaccatccgtcatcttttggccgtcacctcgttggtgtagacggagcggaggtccccgccgccgttccgctcggcgtacacaccaaccagggcacggtagtcccgtccgatgaccgtatcctcaaaatcgaaggtcccgtaataatagtccgtgttctcctcatacatattcaaatcttctttggtgaaggtctccaaagtggtccaggtgtctcctccgtccctggactcctgcacggtgatatagctgacccccacctcatcggaggtacggactgcgtccacatccgcgtggattcggaccacgccgtcgctcttctcggtggcccacacactgtatatggccaaatagtcgctggcacgggcaaaggcggtggtcatcagcaatccggccagcatggtacaggccagcagcacggcgcagccgcggcaaatcttctttttcatcggttctctttcctctctgttctcttttctaagtatagatggagtcgatcatctgctccagctcctcctccgtcatatctcctataatcgatactacattaagtccattggtccatgacgcggtataaatcgatctgttttgtgcaacagaatgttccacaccacctcggatgtattttacatcttgttgctcgtcttctttttcaacagatactttatcaagcgcttcctctgaattataccggcgaatcattatcttaatttttttctcatcataactgtatgtctctgcaattctaataaaatccgggtctacattggtcgtaactcccagactttcaaacccctccggcagccacttgggtaccagcggctcggcgatgccatacgcatccagcgcctcctgcagggaggtgaactccagctcctccaggggcggctgggcagaggtctggccggactggctggccccgggggggacgatctgaagcgtgccctgggtcagatggaccacggactcccacagcctggaactgccggccatgctccccaggccaaagaggacggcgaccacggcggcagcgatcagtgtgcgcggaaaatggcggaaacggcggaggccggcaggacgggacactgccgcttgggccgccggctcctccggcggcgtggacctgctttcctcgccggcgcgctcctccaggaaccgctggagggatgcctccgggtccagttccaggcccaggggctccttctcctccaggacgtccagatagaggcggatcagctccgggtcacagctctgatccgtcatctcctccatccgcgcgtccaattcctccaggatctcgccggcagataaattttccagatgccgctggattaaaaccaagtccccactccccccgtccggcggggcgactcgcttttccgacatctcgacacctccttactttttatatccttaaaaaacttcatttcgttacaggttccccaaagtttcttcaaattttttcagcttctccctcagacgaaacaggcgcacccggcactggatctccgtcatgcccatcttttccgcgatctcctgatagcggtagccctccagccggaggcgcacgatccgccggtccgcccgggatgtgtcgggcggaaggtagtcactcagatacagcctccgctccacaggtgccgcaggcgggtgggccagctcgtccagcggcaccgtgcggaccttctccatgtcctcccgcatcttcttgagtttgatcttcagggcctcccagagccagcccctgggatttggatggtgcttcacccgctgtccctgctcccagttcttccaacattccgcgaatgtgtcctgcgccacgtcctccgccaggccgatatcgcccagcctgcgcgcggagtaggccgtcatttgctccaacatctccaggtaaagcctggaaaacagcggatcacagtcaaaatccgacactttttaccctcccttcacacaattggcggggtccatcatatcatacctccccgcgcttttcaatgactcgggccggaaacagccccatccacataaaatcgccgttttcccttgtaaattagcggaaaagcatctataatggacaaaagaatacccgggacgcccgcggcgccccggagtcacagaaaatggagaggatcacctatgaaccgcaccaccatcgccgccatcttcgccgaccaggacaagctgggcggaaagacggtcaccgtctgcggctgggcccggaccatccgggacatgaagaccttcggctttatcgaactgaatgacggctcctgcttcaaaaatcttcaggtcgtcatggacgccaacatgctggacaactacaaggacatcgccggccagaacgtgggggccgccctcatcatcaccggcaccgtggtcctgaccccccaggccaagcagcctctggaggtcaaggcccagaccatcgctgtggagggagcctccacccccgactacccccttcagaaaaagcgccacactgtggagtatctgcgcaccatccagcacctgcggcccaggaccaacctgttctccgccgccttccgggtgcgctccgtggccgctcacgccatccactgcttcttccaggaccggggcttcgtctatgtccacacccccatcatcaccgccagcgactgcgaaggggcgggcgagatgttccaggtgaccaccctggacctgaacaacgtgcccaaaaatcccgacggcaccgtggactatacccaggacttcttcggcaagcgggccagcctcaccgtctccggccagctcaactgcgagaacttcgccatggccttcggcaacgtgtacaccttcggccccaccttccgggcggaaaactccaacacccagcgccacgccgccgagttctggatgatcgagccggagatggcctttgccgatctgaacgactacatggacaccgcggaagccatgatcaagtatatcatccgcactgtgatggagaagtgccccgatgagatgaacttcttcaactcctttgtggacaagggcctcaaggagcggctggagcacgtagcctcctctgacttcgcccgggtgagttacaccgaggcagtggagcttctgaagcagaacaatgacaaattcgactacaaggtggagtggggcgccgacctccagaccgagcacgagcgctatctgacggagcaggtgtaccagcgccccgtctttgtcaccgattaccccaaggagatcaaggccttctatatgcgccagaacgacgacggaaagaccgtggctgcggcggactgcctggtccccggcattggtgagatcatcggcggctcccagcgtgaggagcggctggatgtgctggaggcccgcatccaggagctgggcatgaatccggaggactactggtggtactgtgatctgcggcggtacggctcctgccggcacgccggcttcggcctgggcttcgagcggatggtcatgtacctcaccggcatcagcaatatccgggacgtggagctgcacccgagaacggtgggcaacgcggaattctgatcggcccgttttgaccgggaccgcccccgcaggggcggtcccgtcctttttgtctggagccttttactccgccagccgcttttcgtatttcttgagcaggtcctcgatggcctcatcgagcagtctggatttggggatccgggtcttttgagcaaggatatcaaaatccttcatcagctcatttttcagggaagaggtgaaccgggtccggttcaccaaaattgcctcagccatgctgcgcctcctgcaccattttattctgcgccccattccgctctgcgctcccggggcgaagtctccctctgccggtcccccttggcaggggcctcaaaggggcggggttctctctgccttatagtatatagacagcggagggaaaaaacaaggactgaaatcaccaattagcgacacaaaataactctttgtcaacaggggccggcggaaaaaggcgtcggtactgtcaaaagagtgactgtgccgctttttggaaaaagcaccagtctgccgtgcgcagagtttgtgcgcctgcagcggacaaaccccacacttacagcctgagaaatgttttccccagcgcacatgccgccggggaaaacagatcaggtcttgatccgcgcctgcgggtgcggactctgggaggctttttccacaagctgaggcgccgcggtctccctgacgggagaccgcggcgccctgcacagttggaagggggatcaggatgaggaaatcgggatcagaagatgccctgagccatcatggcgtcggccacgcgctggaagcccacgatattggcgccggccaccaggtcatagcccaggccgtagcgctcggcggccgccacagaggagtgatagatgttcgccatgatctgatgcatcttggcgtccacttcctcggcggtccagtacagccgctcggcgttctgggccatctccagggcggacacggccacgccgcaggcgttgacggccttggagggggcgatcaccatgtgcttctgctccttcaggaactccagagcgtcgttggtggtgggcatgttggcaacttcgatgtagtacttgatgccgctggcggcgatcttcttggcggagtccatgttgacatcgttctgggtggcgcagggcatcatgatgtccaccttgtcggcgcccaggccccaaggcttctccccggcatggaactcacagccgaacttgtcggcgtaatcctggaccttgtcgcggccagaggcgcgcatctccagcagatagttgatcttttcgtcggtgacagcgccatcgggatcgtagatgtagccgtcggggccagcgatcgcgaccaccttgccgcccagctcggcagtcttcttcaccacgccccagcctacgttgccgaagccggagatggccagccgcttgccctcgatagactcgccctcgtgcttgaggacctccaccagatagtacacggcaccaaagccggtggcctccgcacgcatgatggagccgccggtggttacggccttgccggacagagcgccgaactcggaggcgcccaccagacggcggtactggccatacatatagccgatctcacggccgccgcagcccaggtcgccggcggggcagtcgatgtcctggccgatgtggcggtacagctcggtcatgtaggcctggcagaaacgcatgacctcggcgtcgctcttgccgcggggatcaaagtcagagccgcccttggcgccgccgatgggcaggccggtcagggcatccttgtacacctgctcaaagcccaggaacttgatgatggacaggttgacggagggatggaaccgcaggccgcccttgtaggggcccagggcgccgttgaactggacgcggtagccgcggttgacctgatagtggccctggtcatccagccaggtgacgcggaactcgatggtccgctcgggctcgatcatccgctccagaagggatgccttctcatactcggggtgggcgtcgatcacgggggccagggaggtcaggacctcctccacggtctgcaggaactcaggctcgccggcattcttctgacggcactcttccagaactcggtcgatatacttgctcattgcactcattcctcctaattgatatatgtgtgtttggtcaaaatctgacggattcccttcatttcagggaaggggctccgttttgccctcttcatgtatagcataacacaattccagcagagcgcaagcacgttttttgtggatgttaccacaacaaaaaaactgtggtatgagaaaaacaaaacatcccatttaaaaaatcgatcgatttccccaaaaaaggccgcggcctcataagatggccgcggcagcggagaaaatgcaggattttagtcaaatgccagtccaagataggcggtgcgggaccagtcccaggcctcctcccgatccggggagagccacttgagcatcccaaactgccagccgccggacgctgccggacgctgggccaaagggccccgcaccagaaagcgctcccccgggaccatccggggcagatggggcagaacggtccgcagcttcgtgcccagtagctccttatacaccaccagacccgccccgtccccttcggcgcaggcgcagacagggccgtcctccgtctcccccgcaaacaggcctccgccggacagggcgcagcatccggcctgataggccagcgcctcctccggataggcgatgtgggggcagtctgccaggatcttctcccgcacggccccgtattccgccggagagacggggcgcagggggttgtcccaggcgggggcagggagctcacctgggtccagggcctcctggaacagggtaaagcactctcggaagccgttggccccgaagaagttgtggagggagggctccgccgggacggtggtcaccacagggatggccagaccgcggaagtattcgtccgctcccgccagcagccggcccgccagcccccggccccgggccgccgggtcggtggccacggcatagaggtacgccgcccggaagcggccctccccggggaggaccagctgagtatcgaaccaggcggtcatggactggaccacgccgtcctcctccagcaggagcatccgctccggcttgtaataggtctggtaaaagttgtccacataggccccgtcatccccgaaggccaactgccagagctcacgctcccgggcggcatcgcctggggtcccaagacgtatctgcgtcatgccgtatcctcctctttttcagacagacataccgcctgccctctctcagtgaggggcaggcggccctgtgctcctcagtatccggggtacacgtcgcttttacgaggcatgatgacggcacaggccagatagacccagaaggcagtggagaaggtgacaaaggtggcgatcacccagcctacccgcaccagagtggggtcgatgtcaaagtactccgcgatgccgccgcacacgccgcacaccatcttatagggcccctctgtcttatacagcttctttttctccatgacatgcttcactccatttccatgagatcgccgaaacgttctttctgtggataggatactacacagaacctgaaaaaatcatagggaacggattaaaaatgctttaattttttccaccgccccgctccagataccacagccgccgggccagcagggtagtggagaggacgaaaaagatctccagcgcgctgctgatgatccccaccatcgcgaacagcaccagggagagcagcaccgtcactcccagccacttcatacagtcccaatagcgctgccggtcctgccgcgctttctggagcaggagcagaaacagggacagcaccagcaggcagctggccgtaaaggcgcatatcacatgcagatccgcgatcttcggcagctcatccggggtatagggcagcaccactgccgacagcagcagcaggaagcctcccaacaggcagagccggggccacagcggcctgggcagcgcggccatcaccggcagcaggacgcacagcagatagacccccaccagcatcccccacaggaaaaagccgtgccgctggtcccgggcggcggcgatcacggaaaaattcgtagtgaaccagcgggtgtcatgggtaaagagcagggtgtagagcgggatcagaaaacaggcgaacagatccagcagacgcgcccgccagtccggccgcagccactttctcacccgttccctcccacttcctccagctcccccgcctcgttgaagcggacggcccggatctcgttgccggtgttcttgcggatgtcgtccagccggatgctctcagtgatggtggacaccagggtataggccgccccgcggcggcgggcccggcccgtccggccgatgcggtggatataatactcgttctcgtcgggcacgtcgtagttgaacactgcgtccacatcgtcgatatccagtccccgggcggccacatcggtggccaccagcacccgcagctccccgtttcggaagcgctggagggtcttctcccgcactcgctgctggatgtccccgtggatgccctcgcaggagatgtcccgcatcttcagcagaccggtgaggcggtcggtcatgttcttggtattgcagaaggcgatgacccggtcatacccccccagctccatcaggcgtaccatggtgtccaccttccggttccgttccacctccaggcggtactggaggatatccggcttgttctcctggtcagcgcgcaccgtgatctctaccgggtcccgctggtacacccaggagatatccatcacttcccgggaaatggtggcggagaacatgcccaggttcttccgtttgggcatcaggtccaggatgcgggtcacatcccggacaaagcccatgtccagcatgcggtcggcctcgtccagcaccaccgtctccaccttgtccagccggacggtgcgccgcttcacatggtccatcaggcgccctggggtggccaccacgatctggggggcctttttcagctggaggatctgtttgtcgatgggctgcccgccgtagagacacacggtgcgcaccccctccttgaacgcgcacaggtcccgcagctcgtcccggatctggatggccagctcccgggtgggggccagcaccaggccggtgacctgggtcccctggggatcggcgtgctcgaccatagggatgccgaaggcaaaggtcttgcccgttccggtgggggccttcgcgatcacgtccttccactccatgaagtaggggatggcccccgcctggaccggggttgcctggacatagccctttttgtcgatggcccgcatcagctccggggacaggttcaggtccgcgtaccggaccttgtcgttgacgatctcgccgttgatttccatatctctgttcatccttttccgcatgtctggtccgatccaaggccccctctcaccgcccgcggtgctccgcggaccagacacgccctttccccggcgcggcctcaaatcagctggggaggtctgccctccccccaaaagcccgctcctgtgcgggaatttgtatcattttatcatagtctgccccaagaagcaagcgaagcgccgcccctgcggccctttccagccgattttccccatttcgctgttgtgctcccggccgcgaggtgctaaaataaaacaaaaactcccgcttttcgggagttgtccaaaggaggaccaccatgccctacgctgtgctcgccgccgcccttgtcgccttggaccagctggtgaaatatctggtcagccacaacatccccctggggggccatgtccccttcctcccccacctggtggagctgacttactttcaaaataccggcgccgctttctccatgctggaggagcacacctggctgctcaccctgatctccgccgtcatgtccgtggtgctgggcgtggcggtgtgtaagaagttctttgcccaccccttcggccgctgcgccctcaccctggtcctgtcaggcgcggtgggcaatctgatcgaccgggcgctccagggctatgtagtggacatgttcaacgtcctttttatggacttcgccatcttcaatgtggccgatatctgcgtggtggtgggcgggatcgccgcctgcgtctattatgtctttttctatgagaagctggaaggaaaggggaccctccatgagcacgctgacgcggaccgctgaccgtcccggcgagcgggcggacgccttcctggcccgggtggtgcctgacctgacccgttccgccgcccagcggctgctggaggccggcgcggttcggctggcgggcaggccggtgcggaaaaactaccgcaccgcccccggagacgtgctggaggtggacatccccgccccccagccggtagacctggtcccccaggatatccccctggacatcgtgtacgaggatggggacgtgatcgtggtcaacaagccggtggggatggtggtacaccccgcccccggccattcggacggcacgctggtcaatgccctgctatatcactgtggaaataccctctctgggatcaacggcaccctgcgccccggcatcgtccaccgcatcgaccgggacaccagcggcctgatcatcgccgcgaagaacgaccgggcccacctgtccctggccgcccagctccaggaccacagcctgtcccgggtctatgaggcggtggcggtgggcgggctgcgggaggatcgcggcaccgtggacgcccccatcggccgacaccctgtggaccggaagaggatggccgtcgaccggcagaacggccgggaggcggtgacccactggcgggtgctggcgcgctacccgggcttcacccatgtggagtgccgcctggagacgggacggacccaccagatccgggtccatctggcctccatcggccaccctctgctgggcgatgtggtctacggcagcaaaaagccggtgcccggcctggccggccagtgcctgcacgcccggcggctgcggttcacccatccctccactggacagcttgtggagctggagtgtcccctccccggctggttccaggatgtgctggaccggctctcccgcctgaattgactgcgcctccccggtccttcagccagggaggcgtttttttcacccgctccccatgggcggcataggatagagggctgtaaaacatggtggaaacgggggtgccgggcttggagcagacgggatgggacgccctgcggggccatctgaacaccctggacacctctctgctgttcctggctctcctcaccggggccaccgccctttcatgggccatcctctcccggcagcgcggagcccttctctccctcctctctggagaggacatcccggagccggacctgattccggcccggctggccgtctccgccctggtggttggctccctgagctacttttttctgctgtccctggagactctctgcaccgctcgatcccagggggcggcagcctgtgcctcggccgggcgcaatgcccgtgcctccctgctggtgctggcggctgctctgatccggctgtatgacttcaacatcctccgatgcaccgctcccgccctggagtcagaagagctccctgtctagcggaccgacgcaatagaaaacaccgcgcctcctcggctctgggccggagggcgcggtgttctcgtttcagttgatgacagtgccgttccagtagtactccgcctggggcagatccagatcctcctcggtcagcggctggtcgtaggggttgaccagctcgttcagggtgggcaggatgtcctccgcctggaagacaaagcagtatttgtatccccggaccacgccctcgccccggccctccagagtgccctgggtgatgccggtatccaggtccactcccactgcctggctggcgaagtagagcatgtcggtggtggacaggtctgtcttgacatactcctggaagatctccacgaactcctgcaccttggtcagggagttccaggagaccactttcttggccagggccaccagcacctggcgctgcatctccgcccggcccacgtcggtgtaaccgctcccgtcgttgttgtggcggaagcggaccacctccatggcctgctgaccgttcaggtggtgctggcccttggtgtagtggatgtgcaggtcctgataggggtcgtcatagttcatctcctccgggatatagacgtccaccccctccagctcgtccaccagggccacgaatcccttcaggtccacatagatgtagtagtcgatggggatgccgaaggtctgctcgatctcctccttcagcacatccacccccgcccccgcgtaggctccgttgatcttggggtcctttctccagtcccggtttaccgccgtatcccggggtatggagatcatccccaccttctggttggccacatcgtagctgaccacgatgatggtgtcggtgttggcgctctccctgtcccggcccagaaggacgaagttgtacacatcctcccgccgctgccgtcctgcgggctgctcctgttccaccggctccgccgcctggctcccgctgccggcggggggggccgggtcgggctcctgggggatctcaggcggccggaccgtcaggttccacaccgcgtacacccccacgatcacggcggataaagccaccagtattccgtagagcaccattccgatccgaaaaagcgggctgcgctttcggcgctttcctccccgctgtgtctgtatgcgtgccagagctgttcccctctttcctgtttcggcaatatacctgtccagtataaccagttcgcctcgattcggcaagagggactttttctcttttaaaaattttaaaaattggttcctcccttcaggagatcatctccgcccccacgacatagctccagccgtccccctcctgccgggcggtgcaatcatagaaacagtaggcccccaggctggagcggtatttctggagcgaaaaggtgtgtctcccgtccgcctcgatgctgtcctccacggtgagcagcagcccggcggggaactcctcaaagccgctgtccgggtccgcccggatcagaccctcctccgccagctcctccagggtgccccggcgggtgtccagcccaagttcggcacctaaggtctccatgaccccctcctgctcccgctccgtcagaccggtgcagccggtccagtcaaaggccagcagctccgcgccgctgttcaggcccggatcagtctcccacaggtccctcaaggcccggcagtacagctccgccaggccagtcaggggctccggccgggtctggggtcgggtgcggaacacgtagctggctgagcccacatcaccccactgggcgcagatctcatacacgcagtccccgtcccccgggagcagaacggtcccgttctccgcctccagggtctccgcctggtcctccccctcctgggtccgccccacatattcagcgggccagcggcggagggccacctgtgtgggctggacctcgaaggccagcgtcagcgccggggcgagggaggccactcctcccccctctgtttgtcccgcccccgcggggatgccggtatagaggaccgggtattcctgactgtccagggggtggaggccgcaggcaatccaggtctccccctccccatccggtcccgctttgctccagctggcgttccccgaccaggacagggtgatctggtcccagccgcaggatacggtgagcgccggcggctccgccagctcttccagggccttctccccatcggagaggacctgggtcccggtggtctcccccgctccgctgctctctccccccgccggggcccgctctgaaacgcaggccggagcgcaggcagccagcgccagcatcaacaccagcgccgccggaacgatccattttttcatctctctccgctcctttcttacggctccgcctccagcagatggtccagcgtcagggcgtctccttccccctgcagaacggcggagaggaagctgtcactccatcgcgcggcctcctcccagggctcctccgccccggcagacgcccggctctcagtctccaggacgacccacatgtctccggtcagaaactggctgtgacacagcccctctgccctgccgtctccgtccaggtcccctgtcagtcgccaggcagtgacctctgtcccgttcacctccgtcactgtcccgccggggacggcctcccctggggagggcaggtctcccggagccagggtgagggcgaaagaggtctgcgcctcctccccgactccgcccccccgtaccgtgacccggagcagggcccccgaagcgtcatacagggcctctccccccagctggccgcagtcccagcccagctcccgaagcagatcctcccgaaagagggcggtcagctcctctggagtcagcgcccggctccgtgtctccgctgccggggcctggtctgtcaaggctgcccccaggccctcctccccccggtacagcgtcccaatgtccgggtagttcaccgcccacacagggggcgagagctgcttttcatcctcctccatggcctcggagctcccctggtgcgcggccccgctctgggcggactgcatcccggcactgtccatgctgtaagcctgggcggccccatccggctgccggacgccgccggcccaggccagtcctgctgccagcacacagcaggcagccagtattccccaccggtaccggtggggagcccgcccctgcggggcgggcccgtcaccctccgccagcgctgtcagccgggcgtggagcgacggggataccccctgccggtccatatactttttgtattgattcattttgtttctccttctagcaatcgcctgagccgggaccgggcccgggagagccgggaccggacggtcccctccgcctgtcctgtgagccgggcgatctctccggtggagagtccctcgtagtaaaacagatggatgacagcccggtcagccggcgggagggaaaagatctcctccagctcctgccgctcctccggctctggggcggggagggactcccacagggggacgcttcgccgccgccaggcggcccgcagccggtcccggcacccgttcaccagcacccgcatcagccaggcgggaggactgtccaactccgccggagccttttccagaaattttagaaaggtgtcctgcaccgcgtcctccgcctcctgggcgtccccaaggatggccagcgccgcccggtacaggcggtcctcattctctttcaccagcgtctcccaatccaccggccggttggatatctgagacatcccctgctcccccctttctatcccttcagacggataagcccgcccttttgctgcacggaacggaaaattttctgcctgctgtctctgctcctttagacgtccgcgctcccaaaaagttccggtccccctgccgggggcaaaaaaacgggggcccggtctcccggccccccgtccctgttccgctctcctcacccctgtccggacgccccgccctccaggcgctccaccggcctggcgtatttgaagcaccgcccggggtcatagtaaaaatacatcagccgcccgggggtgagatccaggcggcagccagccccagtgtagtcgaagccggccatggcggcctcgatccgctcttccacgacacggttctctccctcgtagtcaaagggcccatgctcgaacaccacgtactccccctccggcacgtccatcagccgcagctggggcggcaccccgcccccgtaatccgaggggagcctcaccccccagcactcggtccgggggatcccccagccgcacagacggcctttcgggtcgttccggtaggccatgatctggccgctcccgcagttggcctcgctcccgccgctgtcgtccagctttcccttgatgctgtccagcaggccgcagacggtgtcgtagtcctgccccgggatctcggcctgtctctgccagaagtcccagtagccgttgctctcccggtcctccagatacaggaatttgtgggcagggatggtgacaaagtagatcttcaccccctggcaggagccgatcatgcctatctcctccgtaccgaaaaagtaccggtcaatggggcgcagcttggtacgcagcaccacgggcctggggttgcgccggtactcccccgggggcacgccataggctcgccggaaggcccgggtgaacgcctcttgggaggaaaagccatacgccagcgcaatgtccagcaggcttttctcgctgtcccgcacctccttcagggcaaaggccagcctcctgccccgcagataatcccgaagccgcatgcccgagatctccccgaactttcgggtggtataagattctgagtagcccagcctgcgggacagggcctgcagggtcagcgcctcgctgtcctgctgccggatacaccggtctatctcgtccacgatgctctggatctgccgctcccactgatacatttccaccgctccttccattaatgtgtcttcccccttatgataccccatttcctccgccgccgcttgatcccagctgctcagttccccttcccagatataaaaatccccgccggtcagaaggccggcagggagcgcacttacaggggcaggatccaggtagcgaagaagaaatagatcagcagggagagtgcgtccacaatggtggtgatgaagggggaggccatcaccgccgggtcgatgcccagcttctccgccgccatgggcagagtgcagcccaccaccttggcgcacagcacggtaaagaccagggtcaggcagaccaccagggccaccaggggggtgacctccgggttgtgcatcagccaccggtctaccaccatcatcttgacgaagttggcggcagccaggcacacgccgcacagcaccgccacacggatctctttccacaccacggccaccaggtcggagaagtcgatctcatccagggacagggcgcggatcaccgccaccgacgactgggagccggagttcccgccggtgcccgagagcatggggatgaaggaggtgagcaccacacaggccgccagggcgctctcaaagctagtgatgatgatgccggtgaaggtggcggagagcatcagcagcatcagccaggggatgcgggagcgccaggtctccagcacgccggtcttcaggtagggcttatctgagggcaggatggccgccatcttctcgaagtcctcggtggtctcctcctcaatgacgtccatggcgtcgtcaaaggtgacgatacccaccagccggttgtcgccgtccaccaccgggatggcggacaggtcgtacttgttcagcagctgggccacgtcctccttgtcctcatgggtgttgaccgagaggacgttagtctccatgatgtcccggatgcgggtctcataggaggacagcagcatccgccgcaccgtgaccacccccagcagcacccggttctgggtgacatagcaggtgtagatggtctccttgtcgatgcccacgctgcggatgcgggcaaaggactcctccaccgtggcgtctgggtggagaaagacgaactccgtggtcatgatggagccggcggagtccttgggatagttcagcagttggttgatctggctgcgggtggaggcgtcggtgttgcgcaggatcctggagaccacgttggcaggcatgtcctcgatgatgtccaccgtgtcatccaggtacagctcgtccagcacctcccgcagctccctgtcgctgagggccccgatcagcttctcctggtcctcggtgttctccaggtaggtgaacacctccgccgccgtgtccttgggcagcaggcggaagaccaggatctcctgctccacgtccagctcgtccaggaactcggcgatgtccacctcgttcatctgggacagcagctccttcaggctgcggaacttccgctgttccaccagctccagcagcaggtccaggtcatagttttcgtgcatgcgttatttcccccttttgttcatcgcttggaacaattcgggacgcaaaaagaccacaagggcgacggacatctggaaaacggcaggctgggcggagccccgctttcggctcctgccgtctttcagatgcacttcgaccctgtggccgcacacgaaaggggcgggggcttcccatcccccgatctgttcagataccggcggcgcggcgggaccgcagcaggcccctgttctgcgccgccccccgttcgtgacagcggtcgtcccgatcccgatggcgacttcggccttccatgcgttcccacatcctctcccggcatatgctcagggggctcccccttctgcctgtatgggtccccgtccgctccgggcggtgacctgtatctatctctcagtatagcattcccatccgcattttttcaagtaaaatctttgctcatccggcctcctccgggctttttgccgcccaagtcacctccgtgccggtcttgacgatgttgatgtagctgtggcccacgcccagagccgctggctggccgtcctcccgatagaaggagagccggtcgctctctccctcccgctcccaagtgatgggccaggccaggccgtcccgcaccagcagtccgccgccgctgccggtagtgcgcaccttcagccggcccgcgctgtcccctgagagctgggacacatcggtatagagcaccagcacgtttttcaccgccacctgctctccggtgttcccgtccacatagggctcgccgtactcctccaccagatacagcccgctgtccgggtcgtattcaaacacgccggtcttataggtggagaaggggacggtgaggatctccgccgcctctcctccggcctccggaccctcctggaaggtccagcccacctggaacccctcctcgtggtccagacgcacccgctggtaggtgggcagcagctcctggatggtctcgctggaggtgagcactgagtgctccaggccggcgctccgccggcgctcctggtcccgccagaacagggtgccctcataggggccgttgacgcagtccagggcagtgacgccccggctcttgatgaactcatatgcctgggggctgcccccggcatggaggtagaccgcatcgtgtccataggccagggaggcatagtagtcccgggcggagcggaccgttccgatctctcccgcccccgccacatcttggaacacggccatcattcgggtgatgcccccctccgccaggatctcatagatcacatccgcctgggatacccccacctggggcagtgccttcttcaggttattgagcatgacagcgatgggccgccgggcgcccacatccacctcgcagccctcgccggtgagggggttggtgtagggcaggacgggctccggttcgggctccggctggggcgccaggaccgacaccgcgggctcgttggggccctcgggctcgctggcagcccccttcccgccgcaggcgggcagcgtcaggaccaggagcaggcaggtcagcaggcaggccaggcgtttggtgggcatctcagatctccccctcttgctttctttcctttatcatacccgccccaggggcgggtgtcaatctcatgcgtgtcgatggagggggaaaacttgccggcggggtccaaaatacacagcgggccgccaaaagggcggcccgctgtcaaactgggcgttcagttgaacttatagatcttccgagccagccggtagaggcccaccgacagccgccggccctgataacccgggaaattggtaaaggcggagacggcccggtacttcatcttgtgatagatcccggtgtccaccgtccgcagatattcccacagctgggtcttcttccccaggcactcgggggtgtcggcgatggtgaggaagatggaggagatggccatcatcatggccagataattgaacatgtaccgccccagcttgggctgctctgcagtgaggacccgcaggtcgtgggagtcgatcatctgataggtgacccgcagctgctggtccacccggcccaccatcaccgtctcgttgacggactggtccgcccggccgatgaagtagcggtacaggtccacatccagatagtagatgttccgcaccgagggcaggggctgatacacgaagatgttgtccacatagaaggtgtgcttgggcagctccagcccgcagtcccgcagcagctgggtgcggtagatcaccgaatgcatcagcagatactgggaggggcggaagcgcccgatctgctcccagccgaatacccggttgcggggaaacacattgcggtagtgcatcacccgctgggtgttgtcctccacatgctcatagacgtagttgcacaccagcatatccaccagcttgccgtcccgcacgaactgacgcagcttgtccagggccttcttcagagcgggcacgtccacccagtcatcggagtccaccaccttgtagtagacgccccgggcgttccggataccctgattgactccctcgccgtggccgccgttctcctggtggatggcccggacgatatcggggtactgctgggcatagcggtcgcagatggcgggggtgtcgtctttggtggagccgtcgtccaccagaatgatctcgatgtcgtcgcccccctggagcagcgtctccacacagtggtccatataggccgccgagttgtagcaggggacggcaaaggtgatcagcttatccatacttctttctcctgtctgtcaggttttgggcgcggtccgggccgcagggtcagatcagctgtccggccagctccagcgcccgggccacgatggcgtccatgttgtagtatttatattccgccaggcggcccagcaggtgcaggttggggaaccgctctgccagcgcccggtatcgggcatacagtgcgttgttctccccattgatgatggcgtaatagggcgtctcctccggcgcgccggtgtaggcccgggagaactccttcacgatagtggtcctgccctccagctcctggcccgtcatgtgcttgaattcggtgatgcgggtgtagggctggtccacagtgtagttcactgtgccccggctctggaaccaggtctggtccagggtctcgaaccggaagtccagggtgcggtagggcagggggccgaagcggcggccgaacagctcatccgccgcgccggtgtagaccaccggcccctggaacgggacgccgtccaccgtcagcacgtccccgtccagtcccaggtgggggatggcgtcctcccccagctggacagtaatgttggggtggtccagcatggcctcaaagaggggggtgtagcccttcaggggcatgccctgatactcgtcctggaaatagcggtcgtcctccgacaggaagacaggcacccgggcagtagtgttggggtcgatctgatccggggtctggccccactgcttcatggtgtagtggacgaacacgtgctcatagacgtagtcagccaccttggccagctccgggtcctgattctggcgcagctccaggatggtgaccttcttctctgcgccgtaggcggcgatcagcttctcccccagacgcttcccctcctcgggtccgaaagccttccgcagggaggtcaggttgaagggcaccggcatctgcatccggccgccgtccggggccggcaggtcggccaccacccggtgctggtagtcccgccaccgggtgaagcggcacagatagcggaataccgcctcgtcattggtgtggaaaatatgggggccgtactggtggatcagcacgcccgcctcatccagccggtcataggcgttgccgccgatgtggtcccggcgctccagcaccaggacccgctttccgccccgctcagccagctcccgggcacacaccgcgccggcatagcccgcacccaccaccagggcgtcaaaattcaattccaaggggtctcccacctttttctgttttttggggacaacgccccatgccgggacagtatatcataaatttccctgaaaggaaataaagaatcgattaaatgtggattgaaatggtgccggacaacgggcgcagatataaattttacgatgtaaaaattcttatttacaaatatcatatagattggtaatatatgggcagatccaatttataattggggatgatttgaaaaaatgaagcgatttgtcgccggcctcgcacttttattccttgccatcacaggctgttctgcccaggaagcggcaagcagtacgccgcatatatatccccctctcatttatgtgaatgattgtctttatcatgacctaggacggttcagagccgtcacaaaactgccagacggatggatattatggggagaggtggagcagcgtgtgccccaaaccgaggaaattccagaagaaaatttcacatccaactctttagacccgggaactgagctgtttgccaatgaaacggatgacacgaagatctatgcaaaactggaggaaaagtattatcttttgtatgaacaggttatagaagaggatgcggactcctaatgccgcagcaagtcaatcactttaacagatcgctgcaacatatattgcagcgatcgtcctaaaagaggcgcggccctcctgctctccaggaggcccgcgcctgtcttagtctgggggatcagtggaagggcaccatctccatgcgcacgaaatagccctgagggtggtggcacacggggcagctggcaggggccatggtggactccaccacatagccgcagttcagacacatccactgacaggtcacggaggagacgaacagctcctcccgctccagcagatcggcgaagcggccgaaccgctcgccgtggatgcgctcgatgcctgcaatggagtcgaacagcttggccaccagggggaagccctcctcgctggctgtcttggcgaagtgggcgtagtcgtgctcccactcctggaactcattgtgctgggccgcccgcaggtgggagagcaggtcgggatacaggtccaccggataggtaccgtccgcccggacggtctggccggacaggtccgccagctgccggtaaaactgcttggcgtgggtcagctcctggtctgcggtgaacagaaagacctgctggaccacgtacaggtttttctctctggccataccggcggcgatggtatagcggttccgggcctggctctcccccgcgaaggcccgcatcaggttgatgtgggtctcactgcgggcgaaggtctctgctttgtttggcatgagattacctccttttctgaactggttcccgttcagtatgcccgcgggggaaactccttattccagtatcaggaagagcctccctgtccgacatggcatctgccgcaccaccttccgggggaggtttggagagatatcccccgctgaagccgggccccgcgcccttttcccttgccttttccctcttttccaggtataataatgaaaatacacacgggtgttgacacccgcgggggcgggagcggagcatcccctccccgaagaggaggcatccccagggatgaaagaaaagacaaatctgaccatgctgtgcgacttctatgagctcaccatgggcaacgggtacttccagaccggactgggcgagcgcatctgctactttgacgtgttcttccgctcggtcccggaccagggaggctttgctatagcggcggggctggcccaggtcatcgagtatatccagaagctgcgctttgacgaggaggacatcgcctacctccgctccaagggctgctttgccgagcccttcctggactatctgcgccagttccgtttcaccggcgacatctgggccgtgccggagggcacccccatcttccctggggagcccatcctcaccgtgcgggccccggccatccaggcccagttcatcgagaccttcgtgctgctgtgcctgaaccaccagagcctcatcgctacaaagtccaaccgcatcgtccgggcggcggagggccgtccggtggccgagttcggctcccgccgggcccagggggcggagggagccatcctgggcgcccgggcctcctacatcgctggctgctccgccaccgcctgcaccatggccgaccagcactacggctcccccgccaccggcaccatggcccactcctgggtgcagatgtttcccgacgagtacaccgccttcaagacctactgccagctctaccccaacaatgccaccctgctggtggacacctacaatgtactgcgctccggcgtgcccaacgccatccgtgccttcaaggaggtgctggagcccctgggcgtcaccaagtgcggcatccggctggactccggcgacctgacctatctgtcccggaaagcacgggagatgctggacgaggccggcctcaccggctgcaagatcgtggcctccaacgccctggacgagtacatcatccgggatctgatccgccagggggcccgcatcgattccttcggggtgggcgagcggctcatcacctcccgctccgagcccgtcttcggcggcgtgtataagctgtccgccatcgaggatgaccaggggcacatcctccccaagatcaagatcagcgaaaaccccgccaagatcaccaccccccatttcaagaaggtgtaccgcatcttctcccgggacaccggcaaggcggaggccgacctgatctgcgtccacgacgaggagatcgacttcacccatcccctggagctctttgacccggccgccacctggaagcggaaggtgtacaccaacatcgaggcccgggagctgctggtccctatcttccggggaggcgagctggtctatcaggtgccggagctccagaccagccgggcctactgccagcggcaggtggacgccctgtgggatgaggtcaagcgctttgagaaccctcacaattactacgtggacctgtcccagaagctgtgggacatcaagcagtccctgctcaccagccacgagatggcataagaggacccccggcggcgggagcttcccgccgccgggggttttttgcgccttttggggaatgaggagccccctgtcacctgccggtcacagacagctccaggcccggataggcggccgccgggtccgtggggacgccgttctccgccagctccaggtgcaggtgggggccggtggccctcccggtggcgcccacatagccgatgacctccccctgctccaccgtctcccccgtcactgccgtgatttgggagagctggccgtaggtggtggtccagccgcccccgtgggccaggatcacccggtcacccagtccgccctccccgtcccagcccgccgcttccaccgtgccggaggcggcggccagcaccggcgtcccctccggagccgggatgtcgatgccggtatggtctgtcctctgtccggtcacagggtggacccggccgccgaacagggcggacagggtatgatacccctccaccggccagagccagccgctcccggcgccctggggctgtgacgccagggccagcaggtccgcctccccgtcccaactgtcctcccctcggaccagagatatgtggagggtcagctgggtgtaatatccctctccctccgcctgccgcagcctgggctctatcgggatctcataggagcgccccggttcccagacgcccggcgtgtccaggtggacgctcatggagacctggtccgccgccacgtagcggccggagatctgcaccctccagtcctctccctcctccagctcgggcagagtgaagcgcacctggctcccttcttcgttgagggtcacgctctccgtcacctgctggagccgcgccgccgcctcctggggaaggtcctgggccccggcggcggaagagggcccccaggccaccgcgccgccgcagagcagtgcggcgcacaccacagccgccaccagagcggtccccttctttttttgtaaaaacaggttcatgatccttcctttcatctccgtgccccccagccgggtagtcagggccgcggtcacgccccctgacgatgcctgcaggagcacctgtccatagcggcggcggaagccgttgtcctgtccctccaccaccgcctcgtcacagtacaattccagatcccggcccgcctgtccggccatccgccacaccagggggttgaaccagtggaccgcgtttgccagcagcatgactcccttgtaccacaggtccctccgccggatatggcagagctcatggcgcaggatcaggggcaggtccgcctccggcacctccggcggcagcacgatcaccgggcgcagcaggcccagggtcatgggggtgtccaccccggctcgcagcaccggcaccgtcccacccagggcctccagcgccgcctggtctcccgcccgcgcctggctgccctctaggatctttcttcgggcccgcaggtagcccccgccctccacgccgaggaagaggaccgcccccgccgcccagagccaggagagcgcctcggtcagttcggcggcgcctcccgctccgcctgcctgcggtccccggacggacgcgggacccgagatccccggaagggaaacgagtgtttcctccgccgctggcgcagggaccacctgggacaaagcggtccccaccgggaccgggacgggcagggggatcagcaggcgcagggccagcaccagccacagcaggtaacagctccctgcccggtagcgcctgcggatggcgccgctcagccccagcagcgggagcaggagcagggaggtggcgagggagacccagaccacccgctccaccagcgccgtcatgtctcctctcccccgctcaggcggtccagcagtgcctggagctcctccagctccgccggttccaccctctttccgtcgtagagcgccgccgcgaaccgggagatggaactgccgtagagctttttcagaaagctctctccctcgctgcgttgatagtcctcccgggccaccattgctgtataggtgtttaccttaccagtttttttgcaggatagaaagcccttctcctccagccgcttcagataactgtgcagggcactggccgtgagcgggcgctccagcccctccagaatggctggggcggacactgggccccccgccccccataccaccagcataatgtccagctccgactccggcagatgacggttctcccccatctggttccctccttttttgcaaatgcagaatatcctgtgtctatattctatatttgcagaaaatatttgtcaaggcatttttgcatttgcaaacaattttattttaaagcacggcggccggcagtcaacacatctcatccagagatgcctgacgccggccgccgtgctgctatttcaataatcctctttgtactttaatagcctttcaattacaataagtatgctattttctgttattttgcgatctcctcgcagaactgcatcagcataactgcaaactgagcccgtgtggcactgccctggggcacgatcgtgttgttgcccatgccggagatcaatccggcgccggcagcccagctcatagcctcctgtgcataggtgctgacactggacatgtcggcaaaggaagacaggctggccttctcggacacatcgtatcccttggacttggcaaagctgtacaggatcatcgccacttgttcccgggtaacgttgtcgttggggccaaaggtcccgtctccatagccgctgaccacaccgttggcagcggcccagttgaccgcactggcataccaggtgcccgcagccacatcggtaaaggtggatgttccaccagccggagctccctccatgctgtacaggacctgcgccaccatggctctggtcagggtctggttggggctgaaggcagcggcgccagtgccggacatcagtccgttctcataggcatagagaaccgcatcatagaaccagtctccggccttgacatcggagaaggtcatggtatcaggctcctgtgccgtctcccctgtcttcacaaagctgacctccacctctaccttggagtcaggcatggtaaaggtatagcgggtgtcgctctgtttggtgacacgtacatcgtctccgtcccggtcggtcacggtgacgtcgtccacctcatagccggaggcgggagtcacggtgatggtcactctggtgccctcggatgcattttggggactgacggacacggtcccctttccgctgccggcgccgacagaaacggtgtatctgctggagctggaggaactgctgtcgtcatcatcgtcatcgtcatccggggtcactgcgccggggatatagtcgatcttcaccgcgtcatttttctcaaaggcggaggggctgtaataccgggtgagagagccatcgctgcccttcacaaagctgaagtgctccatgaagtcccacaggacgggcatatcactgggatagcagttgtggggacgcagcaggcacagagcccactggaccaacggtacatccacaccgtcgatagtcttcgtccagctgtacacatccggatgacggctgtcagcgctgaagtgctggtctgcatcttcggccgtgaactccttatcgatcccattggccttcagcatatacttagcccagttctgcagagaggtggattcaaagcccttgggcatatcccccaggtccatctgacctgcaatgagcatggtcggaatggtctcaaaggcagaattttctttttctgcagctgccgctgaggtagagccaactgccgcaaagaactcaggattggtcactgcaaagccctgggttgccgccgaaccggcagactggccggaaccatagatccggttgaagtccaggtcggcatagctgccgtcgatcttctcctccatcaaggtgacaagagactgatagaacttgtcggagtcggcgtgggacacgctgctgggactggaactgtatgtctcgcacacaaaggccagagcaatgccctctttctccgcgagctgccaccacagggtggagtccataaagatggagtcagtctggctgttgccgggatagagcatcaggataggcagttccttgccctcaaagccctcagggatatacaggatatactcccgggggtcccatttcccgtcgccgctgttgtcgctgaacgcgatcacgcctgcctgaacggtgccgtgaccggcgatctttatatcctcctggccccagatctgggtgccgtcggacaaagtggatttcacctggccgtccttggcatcctgctgggcagctacccgggcggaggtgtagtccagacgctgggcaatggcgttggaataggggaaggtgttgtcatagcgggtatagtcggacagccactcatagatcgcctgcgcgtctgcacctgtgcccgcgatctccaccttggagatgccgtgccccgcgccttcctccttcagctggccgttggcgtattcggtggcataggccttggaagcaatatcctgccagtacacaccggcaccggtccccgtggccgcgcagtcgttggcggactgccaatagttctcgctccctgtgtaacccgccagataggtgggaacgggcacatccttgggggcgatctgtccgccgatgcccacctgattcagagtctcatccagcacatcggtaatatcgccgttggagctctttccgtcataaggagtgctggccacggcggtgagagcatccgcaccggcactggtcccgtccacataggcctggctgatgacaaagatggggttggcggccgcccacagctccagcgccgcggcgcccttgccgtagcctgccaggtagaactcaccgaaggtggagaacacgttctgcttatggatgttgttgccgctcttcaggaaggcgatagcggcctccacataggcgctctcatcctgggcagagccccagccccccgcgccgggctccagcacgaacaggccctcgcccttcgcgttagccagttcgaaccagccattgtcccgcaggaattcgtaggtatctacatcgtccggcacagccaccacagtgaagtaggagcggatggaggcctcaggggcgatgtacacctttacggtgcgggcgtcattggcaatgtcgccatcgccgtccacgtcgatgttcttggtgtaccagccggtcaggggcagctgagccgcctgggaccagtctttctccaggttggtgatgctgtcaaagtcagaggctgcacctgtactggtctgatccaccttaacgggtgttccatgaccaacaccatccttatagtacaggagggtctggtcatctgcgcctctctcccacttgctgaaccagttttcccacagctcgttcaggtcactggggaccaggttgtggccccggccgtagcactggctccatacaaagatgggcacctcgccgccgccgaagtccctggaccagatgtagtttttatagcggtttgccgcctcagttggattgacgatcaggctgatgggggcctgctgggagccgatctgttcctctgtgatgccgctctccactttgggcgtagctaccagctcgtccagggtcttgcccagcagcctctgtgcccaataggtctgggtgtcggtcgtccaggtgcactgtttggctccctgagaaccggtccactccccggcctccaatgcgcccagcttcatgggccagtagtcgtactcgccgtaaatggcgtagaagggcaccaccagctgtgagccgttcttctgggccgtagtccgaacgccggaggtaatgccgaatgcggcaaacagctccacagttctggggtcctgggccagagtgttggcggtggctccgccgccggcggactgaccgtagccatagatccggtcctcatccaccgtcacgcccgcctttttacagtcgtccttgaccagctccagcaggtccagcatatagtcggcgttgccggtcaggtcgtaggtgaccgcgataaatccgtactcgtcggcggcctccttgatgtcggtggcctccaggaataccattgcggtctgaccggcgccgtgggtggtcaccaccaggggcgcgggagaaccgctggacttcacgctgtctgggatatagatgatgtaggtccggttggtgccctcccacatgtggtcccggtagagcacattgtcggtgtcctggttggtgtagggcaggcgctgggtgatgaagtggccgtacaccgagttgttgtcatagccgctgtagtaggtcaggaaggagttgatgttctccgtcagcgcggggtcggccatgtcggagacagactcactctgcaccgccacctgggtctttacatcgctgaaggaggtggcaatggcatcagagtttgccttgtcctgccagtagacctggccgtaatcgctgtcggggtctgcggtcggcaggcagtcattgacatccttccaataggcgatcagggattcgctggtattgcctacgaaccaggtggggatggggatatcgttgtagtgctgggcctcaaaggtccgtttctgggtaatttgactgccgtccttgtcggtgtacccctcgaaatccatatggttgggctggggcgtctttcccacctgggtctcaccggccgcttccagcagagcatcataagccgcatccacctgagcatccacatagacctggctgatcatcttcagggggttctgggcggcccacagctgcagggcgggggcgccgtctccgtagcccaccagatagtggtaggtgaaggcggagtaataggtcccgctgctgaccagggtgcccatagccgcgtccacataggccagctcgtcttccgcactgccccaggtcccgttctcgggcttcatgatcagcaggcaggccagcgtctcgtccgcgatgtcaaaccagccggacttctccaggaattccgtgctgtccacgccggagggaagcgccatgctgatccagtactcccgctgacgggctccctcagggatgtagacctcgatctcccggctgtccgccccgcgggcgctgtcgtttacgctgatctggtaggtaaagtatccattgatccgctgataggagccgatgctggcgtccgctttctcagtgtcttcaatgggggtggggccatcggtgggatcagcggggaccactggctccagtgcccactcctggtacaagtcgtcgtacacggtgtactcatagccgtccttgctgctgccggaggccttgccacggcagtccagggtataggtgtcgccgtcgctcagcttcttgttgtactcgatctcgccgtccacaattttcaggtcggggccgtagaaggcgtcgttgtcgaagtaccagccgttgatacgggtggtggagtggtcgctctcgccccagtaggagtaaatctcagagggatagccagtgaggcggacattctccttgacccagtcggcccctttaagctcggtcatgattttgctgtaggtggcgatggtctccacgttgttggtgtcctgttcgccgtcgaaggcccagaccttcagaccagtggcggccacggcagcccagtcagcttcatcatagccgctgccgaaggttccgttgttgcagatgtaggcgtcgatggtgaagtcatactcatccttgtccagcgtgccttctccgcgattggaatcgctgttgatgggatactccgctccggccagtgccttgatgatttgagcggaggcgttggtgccccgggagttgccctggaggaccacgggtccggtgatgtcatacttctcaatgaagtacttcatcacgttgacgtcatccttcacgaagtcatagacctcgtcgtattcgccccacttggcggcggcactggagcggtcgtggatattcaccacgatagcgccgttgccggcccaggaagtggtggcggaatcatacattacgcctgttccggcgttattgctaccatctggaagcttccagtaggagataccctggccctggatggtgaagacaatgccgtcggcggggtcatagtcctcagggatgtagtagtagccccggacatagtcctccttgctgccgtcggaggcacttgcggcggtgctgttaatccttagatcgtacagatcctggaatccgtccctgccgaactggcggtcgatggtcttctcccatttgtttgcagaagtgtactcgccattctcgtccgccaaacaaagggcagcttcttcttcctcatcagtgtggcggagtttcagctccagggatgctcgggcctgatagcccattccggtagtattggccttgtactctccggagtccgacttgccatagtagatggtgccgtccacaccgcggtaccaagcaccggtgcagtagacaccgaaagcgttgcgctcccggacgccggcgtcgtcgccggtgtacaccaaatcgttcttctcagtggcttgggtatcatcgtcgatggtcagagtgacggtctggccgttgacactcacatcggcgatcttgatttcaccgaagtctggattcagagtgccccggtcctctaggatatagttctcgggggtcagatcttcaggcacggtggcatcttctctgtaggtaatctcgacctccaccaaaccggtgccgtagacggtctcgtcggtgtaggcctggatgctcgtaatatcatccacggtcaattcttccgaattcaccagcggctccagaccattgcttaccggcggctgactgccctcttgagtcagcttctctccgtcttggataagttcttccccgtcttgaggcggtccagatggctcttcttcgtcctcaggctgctcatcctcagaggccggctgctcctttttcatctccagccagggttcccccctgctcatcgacagggcggaatcctcttcctcccaagtatggcgcaggcggaggtccatcccttcctctgtgccctcagagatatcgtggttggtggtgaagccaccaaccacgaggagagcgctctcctcgtcgactgtcacttcctggatctggatctctgtaaattcctcgtcctgaggaccgcgcccttccaacaggtagctctccccattcagtccgctgagatctgtcccctctttatagacgatctcgatctgcttcagttcatttccggtctcggtctcctctgtgtaagcctggatgctcaccacgtcgctcatgaccggctgcccagatcttacttcctcttccgggcccccctccggctccaccgccagcgcgctaccacccagcagcgacaacagcatggtgccggtcagcacggaagaaatgatccgctttgacaatcgcttcattttttacatttctcctttcaccgttttcctctgcttcaactgtgcctctctcatccgctcccttccactgcacgttcaggcctcagcaggtctgaaaattttgtgcaaaattttcccaaaagaaaatttgtttcttttgaccacttttttcttttgaagttaactcaaattgtaatattaaacaattttaacttccaatacgactttctcatgtattcatgtgacattttcatgttttcttttaaccagacagcgccccgccgcggactctctccacggcggggcgctgtctttctcttgcgtctgttgtcaaaggaagttttccaccgcctccagcatggggagaggggcctcttcagggataaaatgaccgcagggcaggttgtgtccctgaatgtggtctccaaatttggcccagcactccagggggcggaagaaccgctccaccagtccgtttgccccccacagcaccagggtctcggcccggatcttccgcccggcccgcaaatcctcctcgtccagcgccagatccaccgtctcccccgcccggtactcctcacagatggcgtggatggtttccacgttgtagtgcctcagatactcgtcgtagacgtcctggggaaatgcctcggctgaggtgtcgttctccgagtgataccgggcaatgtgcagggaatagcggaaaaactgcttccggctggacaggatcatgtcctccggcagcggggcctcctgggtaaagaaataccactggaacagcgccttggcaaactcccgggtggagaggctgtacatgtcataggtggacacgatatccagcagcaccagtttatttaccgcctccggatggtccagcgccatgcggtaggccacccgggccccccgatcatgccccatgacgtggaagcgttcaaagcccagggcccgcatcacctcgatttggtcctccgccatagtccgcttggagtagttgctgtggtcaggcagcccctccggctttccgctgtccccgtagccccgcaggtcggtggccaccactgtgaagcgctccgccagctggggcgccaccttgtgccacatcagacaggtctccgggtgcccgtggaggaggaggagcggctccccctgccccatcctgaccccgtggatttccacaccgttggcctggatgttgaattcctctccctgcatccgcatcggtctcttcaccctttcctctatattgagcactctgcccaattttaagtttcttctgccccctattttagcagatgtccccacgttggactattttgcttttttcatcgacctatggcctccatgcataccggcccttcaaacaaagcagcgggccccgaaccaaatggtccggggcccgctctctgttctttgatcagcccaaaacactcttggtgcgggccaccttgcggtcctccatcttggagaccaccactgcgcaggccgcatcgcccgtgatgttgatggtggtgcggcccatgtcaaagatccggtcgatgccggccaccagcgcgatgccctccaccgggatatttacgctctggagcaccatggccagcatcaccatgccggcgccggggacgcccgcagtgccgatagaagccaaggtggcggtgagcacgatggtggccatctggccgatggtcaggtcgatcccatagcaggatgcgatgaaaacggcgcacaccccctggtagatggcagttccgtccatgttgatggtggcgcccaggggcagcacgaaggaggcgacctccttccgggcccccagccgctcggagcactccagggtgaagggcagggtgcccaccgaggatgcggaggagaaggccatcatcatggcaggggccatccccttaaagaaggcgatgggggatacgccgcccagggccttcaccgtgctggagtacaccaccacggcgtggacgatatagcccacataggccaccgccagcaccgccaccagctgagccaggatcttgggcccgttttccacgatcaccgggcagatcaggcaggccacgccgatgggcgagagcttgatgatcaggtccatgatcttcatggacacctcattgaagctgtccaccacctgggcggccaccagccccttttcccccgccagcaggatgccgaagcccaccaggagagagatgacgatgacctggagcatggaggcattggccagcggcgtgatggggttggaggggaagatgtcgatgatggtctgcatcagcgactggcccgccgggggttcataggccaggccggaggtctccatggccgcaaagatgtgcatccccttggccgcgctggccagcaccagggccaacaccacggcaaaagcggtggtgcacatgtaatacacgatcgtcttgcctcccaccgagcccacccggccgatgtcctgcatagagatgacaccggaggcgatggaaaacagcacgatgggcaccacgatgaatttcagcaggttcaggaagatcgtgccccagggcagaatgtagtttttcgcgatgtccagtccgttgggcaccatcatcagggccaggcccactgcgatgccgaccaccagcccgatgaagatccaaaatgcaaggggaagtttcttcttgttcattgacagctctcctttccgtccatgcagccctttcctcactttgggccgcatctgtttacagctccctctctgactgctctctttcagtatatatgatatggaggaaacttacaaggtctttctttcctttttctccccctgcaatttcccgggccaagcccttcttttttcaacttttccactggattttccacaactgcgacagaatccaactttctttttatttttttatggtaaaatatggatatcaagacaagctgttttataacagcggaaggatcaaagggggtatccagaatgcagctgctgcgaaagaagggattgctggacagtccccgggtgctgttcctccctgtagacgccatctcacccaatcccaatcagccccgccgggtttttggcacccaggaactggaggagctggctggttccatccaggctctggggctgctccagcccctgactgtgcgccgtcgggcagacggctgggagctggtagccggggaacggcggctccgggccgccaagctggcaggactggaagaggtcccctgcatctctctccagatcgacgaccagcgctcctccctgctggctctggtagagaacttgcagcgcaaggacctggacttctgggaggaggctctggctctggaccggttgatctctgtctaccatctctcccaggaggaggctgcccggcgcatcggcaagagccagtccgccgtggccaacaagctgcgcctgctgaagctgccggaggacactctccgggccctgcgggacggcggctgcactgagcgccatgcccgggccctgcttcggctggaggaccccagcctgcgccagaaggccctggagcagatcctgtcccggcagctcaccgtggcccagacagacgccttggtagatcagcttctctcccctcctccccgcaccagaaccaaacgcacctttgtggtgaaggatgtccgcctttttcttaacactctgactcggagcatggccctaatgcggtccgccggggtggatgcccgctgtgaccgccaggataaggatggagagatcctgctcaccatccgtattccccaggccattcggtaaaaatgtttcacgtgaaacattctcttttcctatctcccctttcctccccatcgcctgccgaagccagatcgcctggaggcaggcccggtctcggctctctccctctgtctgcacctctccccttgcggcgggccgcccctgtgcggtccgccgccttttctcgctaccaggccggaaaaacgggaaaaagagttgaaatgcgttccctcggttgatataataaagctctgcggaagtctgctgtacacccgtccgccatttcgactcaggaggcaccccatggccaagatcatcgctatcgtcaatcaaaagggaggcgtgggcaagaccactaccaccgtcaacctcaccgccgccctggccgcgctgggaaagcgggtactgctgtgcgacttcgacccccaagccaacgccacctccggtatgggagtggacaagaacaccgcctccccaaatgtctacgacgtgctcatcaatggggccgatccccgccgcggcgtagtcactacccactacggggacgtgcttccctccaacaaggcgctggccggagcgggcgtggagatgatcgccctgccggaccgggagcatctgctccgaaaggccctagaggtcctctctcccggctacgacttcatctttgtggactgccccccctctctggagctgctgacagtgaacgccctgtgcgccgccgactccctgctggtcccggtccagtgtgagtactacgccctggaggggctgagcgatctgctctctaccgtccgcttggtcaaacgctcactgaatccccggctggtgttagagggcgtgctgctcaccatgtttgacagccgcaccaatctctctcttcaagtggcggaggaagttaaacgtcactttcccggtcaggtctacgccacggtcatcccccgcaatgtgcgcttatccgaggcccccagccacgggaagcccgtcaccgcctacgacccctactcccggggggcggaggcctaccggctgctggcggaggagatcgcagccaagcaccccacggcggcccctgtctgagttctcccccgctttttcgccggggccgtaagtctggccccgacggctgaattttgatctccactgttatttttataaggaaggagctactatggcaaagcgaaccaaagagctgggcctgggccgggggctgaacgccctgctgggcgacccggacctgcaagcgcagggagagggctccgtctccctccccatttcccaggtacagcccggcctgaatcagccccggaagcgctttgaccaggatgccctggccgatctggcagagtctatccgggtccacggcatcatccagccgctgacagtgcgccgtctgtcctccggctactaccagatcatcgccggtgagcgccgctggcgggccgccaagctggccggcctggcggaggtgccggcagtcatcatcgaggcggatgaccgcaaagtgatggagctgggcctgatcgagaacctccagcgagaggacctgaacccggccgaagaggcccggggctatcaggtgctgatggaggaatacggcctcacccaggaacaggtggcggatcggatgggaaaatcccggcctgccatcaccaataccctgcggctgctggccctcccggaggacctcttgaagctggtggaggaggaacagctctccgccggccacgcccgtgccctgctgggcgcccccacggcggagctccagcggcaggccgccaagaaggtcattgctgacgggctctccgtccgccagacggaggcactggtcaaggccctccagcgggaaaagaaggccccgcctaagcaggcgggggacagtctggccctctacctcggggaggcggaaaagaatctctccggccggttgggccggaaggtccacatcgcccaccgaggcaaaaaaggcaggatcgagttggaatactacaacagccaggatctggagcttctgctggaggctctggagcggctgaacgccggggaggtgcagggccatggctgatccccagaagccggcgcagaacgccccccaggcaggcggtcctcccaaggaggagcgtcctggccagcagcggcggcgcaggcagtcggtggtgctctacatcactatcctctttgcagcggcctttgccctgctgctgatgacctacgccatggaccagcgccgcagcaatgagacgctgggggacctgacctcctcagtctctgatctgaaggactccctctccgggatgcagaccgcccagagcgccctggaggagaacggcgccctgaaaaatgagatccaagacctccaggaacagatcgacaccctgctggggaccatcgacagcctgaccgccgccggggagcagcagggacaggtcctggagcgcaccaaggaggccatggactacttctggcagatcgatgaggcctatgtgcggggccgctactccctctgccgtgatctgatcgcggtactggaggacacctcctccggagaggcccccctgaagagctatcttccccaggagagctacaccgataacggccgcttctcccctgctgaccggtatcaggagatctgggacgccctgtactgaccggctttaggccggatggcaggacatctccgccggccaggtttcacgtgaaacatttttattttcgcccaatttccccacaggagctcatcccattctgttaagataaaaaaggagtgcgatccccatgctggatatcaaatttattcgtgaaaaccccgatgcagtgcgggaaaacatcaagaaaaagtttcaggatgccaaactgcccctggtggaccaggtactggcattggacgaggagaaccgggccgctgtcagcgaagccaatgagctgagagccaaccggaacgccctgtccaagcaggtaggtatgctgatgggccaggccaaaaaggacccctccaagctggaggaggccgaggccgtcaaggcccaggtcaaggccaacgccgaccggctggctgagctggagaccaaagagactgaactggcgcagcagatccgtcacatcatgctacagatccccaatatcattgatccctccgtccccatcggccctgacgacagctgcaatgtggaagtccagcgcttcggtgagcctgtggtccctgactttgagatcccctaccacacccagatcatggagtccttcaacggcatcgacatggacgctgccggccgggtctccggcaacggcttctactacctcatgggggatattgcccggctccatgaagcggtgctggcctatgcgcgagactttatgatcaacaagggcttcaccttctgtattccccccttcatgatccacggcaacgtggtggagggcgtcatgtcccagaccgagatggacgccatgatgtacaagatcgagggcgaggacctctatcttatcggcaccagcgagcactccatgatcggcaaattcatcgaccagatcatccccgaggagtccctgccccagacccttacctcctactccccctgcttccgcaaggagaagggggcccacggcatcgaggagcggggcgtctaccgcatccaccagtttgagaagcaggaaatggtggtggtgtgcaagccggaggactccatgaagtggtacgagcagatgtggcgctactcggtagagctgttccgctccctggatatcccggtccgccagctggagtgctgctccggcgacctggctgacctgaaggtaaagtcctgtgacatcgaggcctggtccccccgccagcagaagtattttgaggtctgctcctgctccaacctgggcgatgctcaggcccgccgcctgaagatgcgggtcaagggggagaagggcacctacctgccccacaccctgaacaacactgtggtcgccccgccccggatgctcattgctttcctggagaataacctccaggcggacggcactgtgaagatccccgccgtcctccagccctacatgggcggcacccagatgctgacccccaagcagtgaccccagctcttctctccggctatatcgcgtgtccgtgccccaatggggccgatgactgcctttaaaatttcgttttgtaatttttttaaggaatataacgatttgttttacccgtctccagcggacagcgcatccccgcccctggctttggatcattttcgcccctggaaatcgctccagaacggtctgcacccggaaacccttgcgccgcaagggtttccgggtgcaaagaggcagaggctttccccctctcccccgccctctccggctgctccctatctcagagcctcaagaaatagaaaggaagctttttgcttatgagagccttcatccaagagttcaagtcctttatcgcccggggcaatgtgatggacctggccgtaggcgtcatcatcggcggcgccttcagcaacatcaccacctccctggtcaacgatattctcaaccccattctgggcatcatcgccggaaacaacaccgccctggccgccatggccgtagaactgcccgggggcggtgccctgatggtcggcaatttcatcaacgccatcttgaactttctcatcatggcctttgcggtgttctgcctcgtgaaagccctcaaccgcctccaccggaaaaaggaggagacccccgcacctcccccggcgccctcccaggaagagctgctgctcacagagatccgggacctgctgaaagagaggacctgatggaagaaaaaaagatccccccgcaggaggagcaagacgccccagcaccctatacccccgcctccccggtgaagcggaccatggcctggatcggtgtggtctatatggtgatcctggtggccatgatgacctattactactttaccggctccatgctggtgaacatggcccctctcctggccgtccccggcctgatcggcctgggtatcctggctttggtcagctggcgcaccaccggccgccccggcaaatggcccgccatcgccctggctgcggtgtgcttcctggcggcgctggccaccctccccctgggcatcgtgggcctgctgtccaatttcagcctggtgggcgtcttcgtcaccggggcgccctgatttttggaggaacgagccatgcgtgacatcattgccgccggtctggcggatctgggcctgctggaccgggtgccggagcaggcccccagccagctggcggaatacggccatctcctgctggagaagaaccaggtgatgaacctgactgctatcaccgacccggtaaaggtggcccagctccatatgctggactgcgctgccctgctcacctgcgccgactttgagaacagggccctcctggacgtgggcaccggggccggctttccgggtctgcccctgaagatcctggtcccctccctccaggtcactctgctggacagtttgaacaagcgggtggactggctggctcaggtcagcgcccagctctccctcaccggcatccgggtcatccatgcccgtgcggaggagcaggctctggagaagggcttccgggacagctttgatctggtcactgcccgggcggtggccgagctccgcctgctgtgtgagctgtgcctgccctatgtcaaggtagggggcgcttttctggccatgaagtcggtggactgcggccgggagctggaggaggccgcccactgcatcaagctgctgggtgcccgtctggaggagtgccgggactacaccattcccggcaccgacgtcattcaccgtctggtagtcctgcggaaggtggccccaaccctgaagggctatccccggcggtgggccaagatccagaaagccccgctgtgagaccggagcgatgtctccgccagccccccaggatcgataccctcagtgtacagagggtagggctttacctggattttcggctccatttttcaaaatttctcataaacccattgacgtgggtgggatttgtgatacacttaaaatggtgtgatgggaggtctgcgcacacatgggaaccgcaattgtcgtcacctccgggaagggcggcaccggaaaaacctccattaccgggggtgtggccggcagtctggcccgcctggggcacagcgtgctgtgcatcgacatggacatcggcctgcgcaacctggacatctccctgggcctcagcgaccgggccctgatggacttctccgatgtggcggagggacgctgccctctggtccgcgcggcggtgaaccaccccgatctgccgggtctggccctgctcaccgcgcccatgaccctctcccctgccctgacggaggaggctgtccgccgcatgctggataccgcccgatccctgtatgactatgtcctcatcgactcccccgcgggcctgggcgccggcttccggatggcctgctgcggggccgaccgggccatcgtcgtctccaccaacgacgcttcttcccttcgggacgcccagcgcaccgtgggtgagctggactttctgcggcagattcatctggtgatgaaccgcatccagcccaagctgctgcgtcagctgcgcaccaccattgacgacgccatggacaccgccggcctgccactgctgggcgtagtgccggaggacccccaggtgatgctgtccgccaacctggggcggcccttgatcctgggcggacggcagggggcggccaacgcctgcctgaacattgccaagcgtctggaggggcgccgggtccctatcatgcggatccgctgaactcccttccggcatctgtataaaggaggtttgccacaccatgaacatcgcactgatgagccacgaccataagaaggaactgatggtccaattctgcactgcttactgcggcgtcctgtccaagcacaccgtatgcgccaccaacaccaccggccgcatggtcgcggaggccaccggtcttcctgtcaatctgttcctgtcccacgcccacggcggcatcgagcagatcggtcagcgcatcatctacaacgagatcgacatggtgctgttcttcaacgacccccgctccggagagctggacgacagcgtgctgtccatctccaagctgtgtgaccagcactccgtccccatggccaccaacgtggccaccgctgagctgctgatccacggtctggcccggggagacttggactggcgcgaggtgatgaaccccaaccgcatccccttcgccatctgagggagacgttctccccattcccccggcccgcccccgcgcgggctgcggacagcgtccaccgccaagacggcgcatgagtatccgggacaccgccggacagagagaggtccctcggctgaaaggaccttacggagacggccccggagaagacagcgccaccagcgggcccggagacgggcgcggtccccctgccgcaacacagggtcaaaggggcgtgtccgcacgcctgaatttgggtggcaccacgaagtgtttgaaacgctctcgtcccaatcacaggggacgggagcgcgtttttgtcccccgctccccttccccgccggagaggaggtccagcatcagcagggcccccaggcggaagccccggaggaagcattcctcccggccagcggcccccgctgacagcgccgcgtcccagatgtcctccgcctcctggggcgggaaacgctggcagagccggtcaaaatagggctcaccggcctcaccggctgcggtctcctccggcgtggcccagggcgggacaaaggcttcatacagtttttcatatatctgctccattatgtcaaccccctaaaagtagcattttaaactacttttagtatggtggtttcatttgctactgtcaagcaaaaattgggaggaactatggccaatttcgcagagcggatccgagccctccgcaaagaaaaaggactctctcaggaagaggtcggcagcgtcatcgggctgaaaaaatatgcggtctactcctatgaaaagggccgggcctgtcccgatatgcggggcctcatcgccttggcggactacttcaacgtctccatggactacttggccggccgcaccgacaaccccgacatcaaccgctgaccctgcaccctgatctgttgtttgactcccccaaccattccaaaaaggagaatcgatatggcaaacgtacaaccccgcaccctgtccggctttatggagctgctccccgcccggcaggtccagttcgaccggatggtctccatcctgcgggagacctactccctctacggcttcacccccctggacacccccctcatcgaggccagcgaggtcctgctggccaagggcggcggcgagacggagaagcagatctaccgctttctcaagggagacaccgacctgtccctccgctttgacctcaccgtccccctggccaagtatgtggcgctgaactacggccagctcaccttccccttccgtcgcttccagatcggcaaggtctaccggggagagcgggcccagcggggccgcttccgggagttctatcaggcggacatcgacgtcatcggagacggcgccctggacatcagcaacgaggcggagatcccctccatcatctatcgggccttcaccgccctggggctgaagcgcttccagatccgggtgaacaaccggaagatcctcaacggcttttacgccatgctgggtctttcccagcagtccggcgagatcatgcgcacggtggacaagctggacaagatcggcccggacaaggtggccgagctgctggtgcagtccggcctctctccggagcaggcccgggagatcctcagctttacctccatcactggcaccaacgaggaggtcctgaccgccctggagggctaccggggccggaacgaggtctttgacctgggcctggatgagctgaacgcggtgacaaaatatctggctgccttcggcgtgcctgagactcacttcgccgtggacctgaccatcgcccggggactggactactacaccggcaccgtctatgagaccaccatgctggaccatccggagatcggctccatctgttccggcggccgctatgacaacttagcggaatattacacgaataaacaactccctggagtgggcatttccatcggtttgacccgcctgttcttcgttctggaggaccagggctatctcaacgacgccctgaacaccgcccccgccgacgcccttatcctccccatgaccgaggacctggcccctgccatctccctggccacccagctacgccaggcaggcatccgcacccagatccaggcggagcggaagaagttcaagcagaagctctcctatgcggacaagctccgcatcccctacgccgtcatcctgggagaggacgagatccgggagggcctcgccgccgtcaaggacctggccaccggggagcaggtgaagcttgctcccggccaggctgccgcccacatcctggccgggctggacaggctgaaccaggggacgccgatcctggacagggtgtaagtccgatttcccatccacgctttggctgtgcaggagccgatatccccaccgggccgtcccacgccgtatagatggaattcccgggccagctgtctctgatatagaaagagaaaagctcatgaagaaaaatgccaaacgctttttactgcttttaatcgtttgtcttttggtgtggacggtatttccccggccccttgcctggatcattcctcagcggatggtaaatgtctcaggagaaagaccggaaatctgcgccgagacagaattcaccgcttctctcagctttggcattgaccaagaagtcttggatgccttttatgatctccatagtgagatggaaggcgtccggttcctggccgatcccctctccctcctgcctttcctccaccagccccgggagccggtcaaggtgaaaatcgattacttccaggagggctgttcttccactggcgactgccagaccaccctgctgtgggatggtacaaccctgtgggtaaactggctgggcggccactacctgggttatcggcccaccgatcccgccggatttgaggcagccatccaacggctggccctggaatacggcggaactgcaatcatcacctcgtagggacggcacatctggtccgtctgtccttcccagaataataagcctctaaaaatttgacaacacgcaaagcggctttccctttggccgcgcggctactacgaccatgtcatccgcaaccaacaggaccttgacgagaccgccgggtacatcctgggcaatcccgcccggcggctggagcgggagggatccttgtgaagaaaaaattgagcttttgtctggtcgttttggtgctcctggccgtcggggtgctgcactattgggcggcccccaccttcgaccatgccttccagtgcaacggcataggtccgcccgcaaaacccgggggttcttttaaggtgctgcgcgagggcacctatcccggcctcagtgacgctcctgtcacctttgatgaggggcggacttaccgtgagctgctggccgccctccgggggcagaggtatctccgcctccccgccctgctgggggcccccgacggcgggaccgccttctataccgcatccggctgtacccccgagtgcatggcctactgggacggcacctttctctggctggcctcgaactcctctcattggcgccgctttctcccccttccccccggcggcctgggggagaagctggagctcatttttatggacgagccggaggaaaacatttactacccttcctcttaggcgcatgtcctttgacccgccctgccggtaaaaagcaaggaggtgcgccccatgaaaaaaagagccctgctctccctggtcttgattttagcccttctggccgctctatacctgtggtacacccggcctatttctttaagacaagcgctcccacaactggattggaaccagattaccgcctgctatactgtccttgtgcccaccaataccaacaacgcaattgaagatgtggaaatcccgctggacggaagcggctattcccaactgtgggacctcctgaacaacgagaaattttctcgccaagtgggtccagtttctgatgcccagcgcattaccctggagcctcagtacgcccacctctccttccgacagagtgagactctaattaccctcaccttttacggccctcaggtgatagcggaggtaagcaccccgaccgggagccgaggtatggcccttcgcccccagggcggagaagaatttcaggcctcggtggtagatctgttggcctccctcgcccccggcgcaaaggcgtgagcagcgggacatcaaaccggttccgaaccagaaggaggaatgttagtgaaaaagaaaattgctattggtgcggtcttgattgcccttcttctggcaggcggtgttctgtggtacacccggccccggagctttttggcgatcactgggacctcagagaacgccgtctgctccgccgccctgcttctgttagagtcctgggtggatgacggccaagcaggacaggatatctgggagcttcaggacctttcccccggcacccccgcctttgatgccctccttcccctcctggaaaaaagccgctggcgggccagtctgaaaaacctgttggggctggatgctggttctttcagcggcttctccagcagccttcagggcgtcctgggactggagggaaacgagggggtctttttcaccgctgtggacacagggcagctccgtctctcccttcccagctccccccactcccttctgtttaccgccgctgatggatcgacctatcaggcgctggcggaatatttgaaggagtatgggacctttcgggaatgacaacagcccaagtttttaatactaatcactataattagataaaatagtacaaaatggagttgattttatggacaatctgaaaaatttccgccgcaccaactactgcggtgacctgcgtctgggcgacacgggcaagacggtctctctgtgcggctgggtccagcgccagcgtgacctgggcggtctgatcttcgtggacctgcgggaccgtaccggcctcgtccagctctccttcgacgacggcaccgaccaggccgtctttgaaaaggcgtcctctctccgctcggaatacgtcattgctgccaccggcactgtgcgggagcgggagtccaagacggacaagatcgccaccggcgccatcgaggtatatgtcaccgagctgcgcctgctggccaaggcggagaccccccccttcgagatcgtggagcactccaaggccaacgatatgctgcgcctgaagtaccgctatctggacctgcgccgccccgacatgcagaagatgatcgccacccgccacaaggttacgaaaatcgcccgggactacttcgacgagcagggcttctacgagatcgagacccccatgctcaccaagtccacccccgagggcgcccgggactatctggtcccctcccgggtccaccccggcaagttctacgccctgccccagtcccctcagcagtataagcagctgctgatgctctccggctttgaccgctatatgcagatcgcccgctgcttccgggatgaggacctgcgggcagaccgccagcccgagttcacccagatcgacctggagatgtcctttgtcaacgaggacgacgtgatggacatacaggagggcttcctgaagcgggtgttcaaagaggtgctggatgtggacgtccagacccccttcctccgcctgccctggcgggaggctatggaccgcttcggctccgacaagccggacatgcgcttcggctttgaactgaaggatatcagcgacattgtgaaggactgctccttccaggtcttctccgctcctgtggcggcggggggctccgtgcgcctcatcaacgtggagggcggcggcgagcacttcccccggaagaagatcgataagctggccgagttcgtcaagacctacaaggccaaggggctggcctggacccgcctgcacggcggggaggtcaccagctcctatcagaagttcctcaccgaggaggagaaccgggccatcctggagcgggccggggcaaaggacggcgacctggtcctcatcgtgggtgatgccaaggacgaggtggtctttgccgccctgggcgccctgcggtgtgagtgcgccaagcagctgggcatcctggaccccatggatttcaagttcctgtgggtgacggagttccccatgttcgagtacagcgaggaggagggccgctatgtggccatgcaccaccccttcaccgcgcctatggacgaggacttcgacaagctggagaccgacaagaaaaactgtcgggccaaggcctacgacatcgtgctcaacggcactgagctgggcggcggctccatccgcatctccgtccctgagacccaggaggccatgttccgggccctgggcttctccgacgaggatgccatggagcgcttcggccacctcatcaacgctttcaaattcggcgctccccctcacggcggcttggcctacggcctggaccggctggtcatgctcatggccggggccgactccatccgggacgtcatcgctttccccaaggttcagaacgccagcgagcccatgacccagtgcccggacttcgtggacgataaacagttggaggagctctccatcaatgtcaccagaaaagaagcgcccgaagagaacgcctgatcccacgccgttcagacagaaatatagaggcacccgctgaagcgggtgcctctatgcgttgccgatcacggacggatgatattctctgagatctcactcagagccttggccgcctccatgtcaaaagcctgacacttcgccaggtcgcccagggacacgatccccacaatcttcccgccctctgtgactggcagacgccggacctgctgggccgccatcagacgggtggcttctctgcagtcatcccccggggagaccgtggcgcagttgcgggtcatgatatcccgcaccggcacctgggccgggtcctcctccgccgctacacaccgcagcacgatatcccggtccgtcacgatcccccgcagacgtccgtccccgccgcacacaggaagagctcccacattgtgccggctgatcagccgggccgccagggccgccgaggagctgggctccactgtcaccacagcggggttcatcaattcacgcacttgcacaccaaaaaccgcctttctgtcaaagctcttgtatgccccagttttccctaaaacaggcggttttattcaaaagcccggagcgcagagcgcactccggggcttttttacgggttttcttcattttccaggaaataagacgcctccatgtccgctgtggctaaggcgaaggcgagcggatatttttgaaacgcctgccccacagtgcgggcgtcctccgggccggagaagcccatgtgccagcggatcgccatggcctcctcccgggtcagccggatgaagccgttgacgatgtacacgctcttttccccgtgtccatagggcagagggtcatcaaaagtaaaggtggggacccgctcccactgtccagtggcatcgttcttcacgttccgaaagctctttttatagcagcccaccttgcacagatcatggagcagggccaccactgccacactctcctcactgtactccaggccatacagctcctggacccgttcccgggccagatagtccaccagacagtggtagacattcaggctgtggtcacacagcccgcccgcataggccccgtggtatcgggcggaggcgggggcggtaaaaaagtcgctcttgttctccagatagtccagcagggcgtctgcccctgggcgagtgatcttctctcgaaagatctcgataaattcctctttgcctgacatcatatccctccatctgcctaactgaactgcccggcagcccagcacatttttaacagtaaagcacattgtagcatagaggtgaaaaaaaagccatagtagatagatctctatctctacttacaaaaatttttatcatccaataaatgtaattaaatccaaaaaatccacaaaaaatctgccgtctatttgtgaattctgaggaatttttgaaaatatgttgcattgaacggattgatcgcacataataggcccataggaactcaaccagttcccccgggcacctgtatgagggttcttagcggggcataggaaaagaaggacattatggagaatggaaatgcaaaagagcgccgtatcgctcaagaactggaacttctaaagcaatatcaacgggtctctgtaaaagatttggccgctacactcgaagtctctgagatgaccatccgacgggatctggatctcctgcggaaaaaccatgtattggaacggagctatggctatgcgactctcgccaaaggcggcgatggctatgcctatgatggagaagtttatgaccttcgtctggcccgaattcaaaacctcagcgaaaaagaccgtattgccaaatacgccgccacgctgattgagccaggagactggatttttttggataatggcaccactgtggggcgcattacctcatatctccccacagattttgaatttacagtcttatgttataattttacgatcctcgcggaactgcttaagcgtccaaatatcaaaatcatttttcccggcggctattaccatccggaggattacaattttacctctccggaagctgtggattttattcgccggcaccgtgccaacaaatcctttatttctgtctcagggatccatcgcagtctgggcattacctgtatcaatgctcatattgtggatagtaaaagagcattgatcgattcttccgcacaaaatatcatgctggcagattccagtaaatttgatttggtaaaagccaatcattttgctgaacttcatgatatggatatgctgattacagataataaactttctctggattggcgggatttcttaaacaacgcccaaataaacttaaaattggtgtagttacatattgtgaaagaagatctccggcaaagtaccacatgagttggtattttgctcggagattttttgtttgatcaaacatatattttgtgaaattattttgctaaatgaacaaaaatagctaaattgaactagataatacgccaaaaaagtgtttaatatattgacttcgcacattttaggtagtattatcaaacaaaaacaaagattatttcttcttatttatgttcaaataaacgttttaaagggagaaggaacaccatgcgctttacagaaatcacagatgatctgacaggtgcggccgactccggcagctacttcactgcccggaggcagcagctgaaaatctgtacctcaggagaaagcagtttaaacagatcagataatgaacttctatctgtcaatctgtgttctcgaaacgtggaaggcgaagtggcccgcagagtccacagtgcgctgttgaaaagactttcaaaagagactggccatatttatatgaaaaaaatcggcactggttttcgaggcaacgattcctatgaactggaaggacttctgcaggcctggcccgactacctcgtctttctcattgacaacgcgccggatctgggtacctttaccctctatgggcatcagtactgcgagggagagatcctccccaaatccctgtatgctaaggatcccattttccctcccaaggaatcctatattccagatattctttcccacgggacaaagctccccattgggcttgtggacattgatactgtgaaaggcggcgatcttgcgggcgctgttcagcagcagataagtaggggctgccggattctggtctttgacgccattaccaaacgggacacgctgcatattattcgtacgctacagcctctctatccaaaggtcttttggaccggttctctcgggcttgcggatggtctggccgaatatctctatgggccggaacagcccctccctccggccgcagtccgccaagtgcgctgcctcggcttctgtgcctccgcatatgaaattgcgaaaaaacagcttgcgtattctcagtcccgggggcttacagtggttcctgtggaaatagacgcctatatagagggagatcaaactgtcccccatcaggcggcggcagcggctctggatgctttggcgcacggcaacgtgatccttgcccctgcggttgagcggtactcctatcagcctggtaccagtgtcaggatcatggagtgtttcggaactctcgccccccttgtctgcgaatcggctgtatttgaccggctcatcattgtaggcggtgagacctcccaggccatctttcgccacctgcatgtaaatcatctggaactaggtcgggccttggagcccggcgttgctcaaggcaggattctggacggcgctctcactggcagagaatttgccctgaagggcggcagtatgggcagtgttccggttcttgaaaaaatgatgtgccgctgggaggacgtccaatgaactggaaggaatcttactccgatcaaatagaaaatctgatctcctactccaaactgatctatcagcgcggactggtcagcgctgccggcggaaacatcagcgcccggtgcggccgacatgtgctgatcacgggaagcaatatccctctgcgtgctgttacgccggaggggctggtgctctgtgatgaaaacggcactgttctggatgccccccctcatctgcgtccctccaaggagtctgcttttcatcttggcatctaccgaatccgcccctctgcacaatatgttctgcatgctcaccctgtgttttccacaatttggtccatgcaaaatcaggagcttcctctctacacagaatccgccaaattaaaacttgtccatgtccccctaatcccagatggacaaccggggtctgttgatctggcggagaaggtgctcacagcggtctctcacacctcggaagataccacagcttttctgatggaagctcatggcgttctgatccttggagaaactatggagaactgctttcatcaggctgaactgctggaggacagcgccaaaattgccgtctttcagaaactactccacccctaagcgctgttcaccgctcacaggcagagcgggtcagataagaagagtaaaatgaacacactgaaaggagaaccagaaatgaaacaattcaaaaaacttgccgctcctctgcttgccgccgcccttctgatgggtaccgccgcctgcggtggtggaggcgccacatcttccgcaggcacatcttcgcctgactcctcctccccttctgcagacgctgtaacctttactgttacggcagatgtcaccggggaccgggctccctatgtggagcgctttgctcagctggttgaagaaaaaacggaaggccgttacactgcttccattattgcagctggttctctgggcactggctctgatatggcccagatgcttcagatgggcacgctggatgtgctgatgagcgatgacatgaccatggacggtgtactggacggtgcgctgggctttgcttggctccccggactggtggcggattatgaggaagctgacgcctactataataatggctggattgcggacaaggtagcggagattatggcggagaacggcctgattcgaatctcctccttctgcaacggcttccgccaggtaggcaacattgtccgcccggtcactgaaatgtccgatctggcgggactgaaaatccgcaccccctccgtagaatctgtggtggaattttacgagaagtgcggtgccctgcctgtgatgatctccggctctgaggtgctgaatgccctgcagaccggtacagtggacgggctggataacgccgtgtttaactacaccaaccaaggcatcactgatgtgatcacccacatcactgagctgaattactgctattccggcggctgctttatcgccggttcccccttctgggacaagctcagcgatgaggacaaggccatttttgcggaatgtgctcaactcgcttctgatgagtttaccaccttcttccgggaaaagacggagtccatgactcaggagggcctggaaagcggtcaatggaccgtggatcagccttctgacgatatgaaggctgccatgcaggagatttccgaggaaatctgggaggagagccgggagaaatatggtgatgaaatcatggatgtcatcatcagcggcgagtatagaacactgtctgaaagttgattttctataatcctggattgatacactaaaacggagcctgaggttttctgcgggagagcttcaggctccctcttccaataacttttcaactgcaaaggagggagtttccccatgaaatcacaaagcaccctgtttcagggagccaagcggctcaacaatgttctgctggggattgagaccttttttatggccctcatcaccatcgcattggtggcggcaatttttattgaggtaatctgccgttactttctgtttatctccgctgcttgggctgaggaactcacccggtatctgtttatctggctcacctatattggctctgcctatgcggtctatgagggcagccatacagaaattgatgtcctcaagcaggtagttgcaaatttcaaagaacccgctcgaaggcaggggctcaggctgctggagttgtttgccattttgtccacctttcttttccttttggtgtttggcaagctgttttttgattacatgatgaccatttgggccacgacccagacctcccccaccatgaggatccccatgggcctggtctatctgcctgtatttatcggcgtagtgctttgtgctcttcatgaggtctatctgtttatggagtggatggtccggggccgtgagggcggtgagccccaggccaccgcacaatgacttgaaagaggtgaaattatgtctgcccttaccgcacttctcgtctttctgatttctttcgcattggtcgcggtgttgttccgaatgccggtatcctttgctctgggcacctcttccctgctggttctggcctatgccggcttccagctggtcacggtcccccagtttgctttctccggtctcgacagcttcgcgcttctggcgattcccttctacatttttgccggtgttatcatggaatacagtggcatctccaaaatgctgatcgactgggtaaagtcctttgtaggccgggtccggggtgccactggcattattacgacctgtgcctgcatggcctttggcgttcttactggctcagctatggccaccatcagcgccattggaaaaatgatggtgcctgaactggagaaagaggggtatccccacggctattcctctgctctgctggccgctacctgttttcttgggatcctgattccccccagtgtccccggaatcatgtatgcgctggcctccggagccaagatcacccccgtatggatgtccaccatcggccctgcttttatttttgccattggctattttatcatcaactatttccgaatcggccgccaccaagccaggccggaaaaagttgaatttcatcccacagccaaactgctggagattggaaagtccactatttacgccatccccgctctgctgatgcccattatcatctacggctgtatttacggcgggctgtgcacggttaccgaagctggtgctgtcagctgcgtctatggaatcttatatttctttgttctgaagattatcgataaaaagaaaatccaaattaccttctggcgctgctgtgccattgccggcgcctccactgccgtgatcggtctgctgaacgccttctctgctgtcgcaggcaaagtaatgactttggcgggcatttccaactttctctccaacctgattaccgaaaatatcagcagccgcgttggttttcttttgatgatcaatgtcatcttcctgttcatgggaacctttatggatatcaatgccaccatcctgattatgacccctcttctgctgccagtggcacagacctatggaattgaccccatccactttggtgccatcatgctggtgaatatgtgcgtcggctttctgactcctccctttgctgttggaatctttgtcagcactaaaattgctcattctacatttggagatactgtgcgtgaggcagttcctttcatcggtgtcggcttaattgccattgttattaccaccttctgtcctgaatatataaatttctttgtcaacctattttcataactgttcgttaagctctgtagtcaaaagaaaagaggaaattctttatgattggaaaggaaatacgcctgaagcgcctgattccaggcacggatggaaaatattttggtttaactgtggaccacgccattgcccgcggtgtcatgcctggccttgatacgatagatgacaccctgagcaagatggtcgccggaggtcccaatgccatcactatgcataagggcattgcagaaaaatgctttgcgccctatgcgggcaaggtcgccctcgtgctgaagctcaccaccttcggcgtgtatcactttgacgaagatgtccaggtagccgatgtggaggagggacttctcatgggggccgatgcggtctctgccggctgcattgtgggcggtgacaatcaggaccagcagctcagaatgctcggccgcatcagcaaagaggccctgagagcggaaatgcctctgatctgtcatatctatcccagaggaaatcatatcactggggctgaccagtacagtgtggaaaatgtcacctatgcggcccgggctgccgcggaactcggagtagatctgatcaagaccaactataccggtgacttggacagtttttccaaagtggtccaggcggttccggcccgcgtcgccattgcaggcggattgaagtgtgaaaccgtaaaggaatatttgcagatgacccgaaatgttatggacgcaggggctgcaggggttacatatggccggtttgtcttccgctaccgggacataaccgcgttggtcaagaccttgagccaggtaattcataacggcatctctgttcaagaggggctggagctgctggaatatttggagcgggaacatcagaagggcggggaaccatgtacctgaacattgattccggaaagttgcgggatgtggtcgcatttgggcgtgccaccatcgacctctacgccaatgagattgggcccatggaggacgcggtcactttccataaatatgtgggcggctctccggccaataccgctgtggccatgtccaggctcggcctttctgtcggatacatcggtaaagtttctgatgaccagtttggacgatttattacccgctatctggcaaaacagggggtggatgtctcccatatcgcgctggctggccccggcattcgttccggggtgaccatgggtgaaattctgcctgaccggtgcagctacctgatgtaccgaacaaactgcgcggatctgcacatcgactgcgcccaactggacgagtcctatctcgccagccacaagctgcttctgatctctggcacatctctctcccattccccggcacgggaggcagtgtttcacgccatctctttggcacggcgcaatcatgtggcagtagcctttgatctggattaccgggaggatacctgggacaccgttgaggaagccagcctctatctcttccttgccgcagaaaaagccgatctggtcctgggaacccgggatgaatttgatgtaatggagcatcttctccacaccggaaatcaggacgacgccaaaagcgctgcttggcttctggaaaaaggcgtgtctgtggtctccattaaaaaagggaaaaaaggttcccatgtttttacgaaggaaggaaaaaccgtgggtggcatctatccagcacaggtgttgaaaacctttggcgccggtgactcctattcctccgccttcttatttggtctgcttcacaatatggagttgaaggattctctgcgctacgccgctgccgcttcctccatcaccatctcaggccacagctgttctgactccatgcctactttggaacaggtagaggactatattgcccaccacgaatatgtcctgccggatacaccttaaagtccggctataaaccagagccacagtgccctgccggacggcttttcagaaaaaaggagcctgatattatgacagttcaggagaaacgagccaattttaagtcccagatgatggattcctcccggatgaaggtgctctgcggagccttcgacggcattacagcccgggccgcccaggcggctgacttttttgacggctgttacatgggcggtcaggcagcagcagccagcctgctgggtgtgccggatctgggtcttgtctgcggatgtgaacagacaaagcacgcccaggaccttgcctcctgtgtggatctgccctttcttatcgacgcggacacaggctatgggaatgagctgaatgtccgccgcactatgcgggacctggaggccgccggaatctgcggcgcgcatttcgaggaccaggtcacgccaaagcgatgcggcggcatgaagggcgtccaaattgaaactgcccaagtctttattcgaaaaatagagaccgctctgacctttcggagagatcccaactttttagttattgcccgctctgatgccgccgaggtggaaggagaggatgaggctatccggcgtctcaatctggcagcagaggccggagcagacatgggttttctcttctcctcaaagggggtctttgagactctggattctgtcaaacgggcctgcgatcaaataaaggttcccattctgtactgcctgatggaattttgccctgaggtctgttttactctggaagagctgcgtcaggcaggggttcgggccgtcatatggccaaatggtcttctgatgcgctggtgcaaagccgcctccgacctgattcagcagtttaaggagacaggggactgcaaaaccttttttgatcagctcatgcctattgaccagtgcaatcaactgctggggattcgggactggaacccgtccggtatgttttgatttctcctcagacaccaggccagcgccgtatttggcgctgacctggtgtttttttctgatcgtccttattttctaccgccgcactctccggttgtcaaattatctttttttcttgttccttccattcgaaccaggtatgatagttccagccgcctgggccatgacagagggattcccggattgaagctgtcccaaatttcatataatcttaaggaaattttttatttcctttaaaacgcccctgataggatagtaccatcaagaattgggaggaatcaccatgcgctttgccaagaccgttaccgctctcgctctggcctgttctctggccctggccattcccacttttgccgcccctgcggcggaggagcaggctggcaggcaggaagacctggagctgctctatcagaccatccgggatcgccaccccggccccttcaccaatacgccggagcaggagttccttgcccgcatcgctcagatcgaggcccggatagacacagaggacagcatgagttttgggctggatctccagtctctggcagccctcattggggattcccacaccaccacaaatcttaactctattctcagcagcggacatatgtttcccgtgtctgtgaagtggatggacggggactgggtgctctaccaggtggacgcctcccaccagggtgctcttggccagcaggtgacctccgtcaacggcttctccatggatcaggtacaggagaaaatggcccctctgatctccgcggacaacgagatcaagctgcgccggcagctctcccaggtgttcggccatcaggaaatcatggtctactgcggactgctcaagcccgaggaggatctgaccctcaccttggaaaacggcacgtctatcaccctctcccctctctccatgcaggaccagtccggctggccggagatcaatggcctgtcccagcagcgccagggcagcgcccccactgattaccagaaggggacctactatttctctctgcccctggacagccgcacctactatatccaatacaaccagtgcatggaggacccggagctgcccatggagaccttcactgctcaggtcatggccgacctggagcaggggagctattccgtccttcttttggatctgcggaacaacggcggcggctccgacggggtcatcatccccctgctgatggagctggcccccctggtccgcagcggggagctggagctgtgggggctggtgggggaggccaccttctcctccgccagcatcaacgccctggagatccgggagatgggcggcgggctggccggtgagcccaccagcggcagcgtggaccacttcggttccaccggctccttcaccctccccaacacgggggtccgggtgtccatgtccaccaaatttattgacacaggcacccttctggagtgcgccgccgggctgggagtggagcccatccagcccgacgtgaccgtctatcagactctggaagactacctggcgggccaggataccttggtggacgccctgtgcgcccgcacagagcccttccagccccaggagcggcccgatgccccgctcagccggggccggctgaccgagctgctccggcaggctgcggaacaggccggcctggacactcaggcccccatgcagagtctgtctgatctgctcccctgtgcctggtatgccccgggcgtctgctgggctctctcctcgggggtggcctccggcaccggggaggccatgttccaagcctcccgtccggtcacccgccaggagggagctgccatggtctggcagaccgcccggctcctggggatggccccctccggcaccgccgagctgacggacgccggctccatcgcctcctgggcgctggacgccgcccaatgggcggtatccgccggcggcttggacactcaaaacggcgcctttcatccccaggataccctgacccgggcggagggggaggcccttctctctcttctcccctgaccccggccctcttgtgtcacccctgcctctcccagagcagcaccgcgtctccggcctgcgcctggaaggaggcctcgtccagatcctccagctcctccaggtccccggccagataccagacctgatccgccccgccgtcgaaggggagggggatcaccgtcccgtgtctggtgtccaggacgatgccgttgttgatccccacactttcgtggtatggggagccgggagagagataccgggtccacaggctgccggtatagcagagatagacccttcggatgatctccccgccctcctccgtcacccggaacaggacctccaggccggcgtaatcccggcccagatattccatgtggaaagccggctccacctcctggatgcggatatcctgtgaatagggaatgggtgtctggaagcgaaagaccaacagccagaccgccacgcccagggctgccgcaccggccagcacccgagcggagaaacacagctttttccttctcagctgcctttttaccccggccagcacccgggccttcgactgctcccggtcctgctctggcgggggcagcgggtcttcccggcgcagctcctccagccgggcacggcagaggggacagttctccacatgctcctccaccgcccggcggctctcctggctgcagatctggtccacgtacaggggcagcagatcctggatcatgggacagggctgattcatcataatgcctccttgatttttagtctggcccggtgaaaagtgacccgggcccagctctccgtcttatggaacagtgctcctatctcccggaaggacagctcccccagcacccgcagggcaaagacctcccgatagggctcgggcaggctgtggagtacctggtggacttccatggcagtctccttctccgccagccgctcctccggcccctcctcccggagctccggctccggctcccgccttctctgcctgcggcagtgggtcagccaggcgtgcttggcgatctggcacagccagacccgcagggtgcactccccccggaactggccgatatgctccagcgcccggaaaaaggtctcctgggtcagctcctccgccagtaccgggtcccggcacagggccagagaaaatcggtagacgtcctccagatagtcctggtaaacttcttcaaaatcgatcacgccctcacctccctttccacagataagacggcatctcccccttttcgttacaaaagatccaccgccattttttggcggtggatctttctctttccaatatttttaatatcgctgctccaggatctccacgatatccccgatcacgccgtcgtcgcagtgacacaggatatgggctccccagtccttcacctcctgggcacagttggcaggggcaaaggggacggcggacagtgccatcatggggatgtcgttctggttgtctcccacgcagtagatattttctcgggcgatccccagcatctgggccagccgggccaccattccccccttgttgcacccatggtcggtgatctccaggtacacgtggttggaaaaaatagcctcataccggcgggggaagcgcttcagaagccagctctgcacctccttcagcaccccgtggtcctgctggaggatggctttggtccagggcgtaggcatctcccgaatgggacagacggtgtagtcggtgcccacctttttcatgtgcaggtctgtgatccagttgggtcggaacacatagatatcctccccgtggtaggcctccatccccagctgtggaaatgcctccatcaccccatccaagtcctgaggcgcactgggagacagataggtctgcaccagaaattcgtctttttggaagtcatagatggccgacccgttggagaggaccaccggggcattgacgggggccagatggacatagggagcgaaggtccggtgggcgcggccggtggccacggtaaaacgccccccctgggcgaggaagcggtccagggcctccaaattccgccggggcacctgacagtggctgtcatacagcgtgtcgtcaaaatcactgaccagcaggacaccgtcgaattttcccaaagaaaaaacctcaattctgtttcgtcagcagcttctgccgcagagcggggacggactgaaagatccccagaacgatcaggttgaccacagtcacgagaacgatcagcacgccgttaaagatcatggagtagacccaggggtccaccatgggcagtcccaaaaattcctccggcatatacatataccacagcaggccgccggacagggtgagagatacccaccgtcccagcccggccaggatggtgccccacagccagcccagcttcttccccgcggcaaagccgcagaggaacaccagcgtataagccaccacatagtccagcagcatggactgccaggatagagcgatccctccgcccaggaagaactggagcacaccgttgacaaagcagcagctcaggctccaggccgggccccagcgcaggcagtagatcaggatgggcaccatggcaaagtccacagaccccccctggggaaagcggtacagccggaagtagcccaggatggtggccagcgcgatcatcagcgcggcctccacaagggcgcgggtagagcgggaatgtcggttcatcgtcgtttcctcctgaaatcaagataccgcagcacatccgaacgggtgcgtgcggtatgaagaggacgacatatggatcgttcactccctacgccggcattacccggatcaggtcaagggactggagctgcgattcgcttccatctcagccgggaatagctcccagcgcccctgtgttcgattgtctgcggtcaaagttattgtatcccaaagggacgggccttgtcaagcgtgctcttttctttatccactcccctcttgtatgtgccctttgaatgggtccatgactggatactattagacacctgccgccctgcgtggtatcctgaagacgatttcttgtacactttacacaatccgtcaggaggtctctctatgaaaaagctgcaattcgcaatggtcgggggcgggaacggcgccctgatcggagatatccaccgcatcggggcccagttcgacgacctggccgaactgaaggcgggctgtttctcccgccactgggataaaaatctggaggccggagagaaatggggggtggagcccggccgcatctatcccgactaccacaccatgctggaggaggaagccaagcgcaccggggaggaccggctggactttgtggtggtggccacccccaacaacacccactacgagatcgtcaaggacatcattgcccacggcttccacattgtctgcgacaaacccgtcaccttcaccagccgggagtcggaggagctgaaggccctggcccaggaaaaagatcttctgttcggcgtgtcttacagttatgcccactacgccattctggagcaggccaaaaagatgatcgctgacggggtgctgggaaagatccacaccatcgccgccgagtatccccaggagtgggtggggctgaacactgccctccggggaaaggacggcctgacctggcgggtcgatccggccatctgcggcccctctggagtgatcgcggacatcggcacccatgtggagtatctcatcagcaaggtcaccggcctcaagcccgtgcgggtgctggcccgcctgcgctccatcccggattatgtgccggtggagagcgacgcccaggtgctcatcgactacgacaacggggcagcgggcatcttctggacctccttcgccatggtgggcaagagctgctgcatgaaggtgcgcatctacggcgacaaagggggcatggagtggaacgcccacgatttcatggagctccgggtggacatcgccggacagcccacccagatctggtcggccaattatgactactgtgatccccaggcccggaagtcctgccgcctccccaaggggatgccggaggccttccactccctgttcgccaacttctaccggggttactgttcccatctgctgtcccggaaggagggcaaagatgagcggcccttcccctactccgatatcgatgacggcatccaggggctgaaatttatcgaggcctgcctgaagagccaggaggacgggaacgtctggacccaggtgtgagcaaaggatatcaaaaacagggcccgggaaaaccgcagggttttcccgggccctcttctgaccctagaaaattttccacaggagcccggtggtccctgtggaatggtcgatgtgaaacggcgggcgcacaatgcgcgcccctacgcaaagaccgaaggggacaccgtaggggcggcttccagccgcccgaaaagccttccccccacagggggggaaggtgtcacggcatatgccgtgacggatgaggggtctttctacccctgtccctgtcccagaggggttctgtcctgcggggcggaacccctttcgggcatccttcggatgaaaacgggcgggggcaagacccgcccctacgtaaagaccagggccgctcgtgaaaaatggcgggcgcacaatgcgcacccctacgcaaagactgaaggggaccccgtaggggcggcttccagccgcccgaaaagccttccccccacaggggggaaggtgtcacggcatatgccgtgacggatgaggggtctttctacccccgtccctgtcccagaggggttctgtcctgcggggcggaacccctttcgggaatccttcggatgaaaacgggcgggggcaagacccgtccctacgtaaagaccagggccactcgtgggaaacggcgggcgcgctttgcgcgcccgctggtctctcaccggccgcccctattctgccagggcaggcgcgataccctcgtggggtatgcccgccaattcaacacaccagcggcggcagcacaaacggggggattgggtgtcgtcctccacccgcgccggacacgggcgccatgccaaaggcccgcgtctcccgtatcgggggtccggggtgggtgtggcctgggggacctaggcgaagccgtagtcacaccggacacactcccccggcggcgctttgcctgctttgccgccaggggcaaagtaggccgccccgcagggcggaatccccccgacaaatcctatgactgagacggagacaggggtaagaagacccctcatccgtcgcggcatacgccgcgacaccttcccccctgtggggggaaggctttatgttggcccaccgcatattttgtagagcccatcacgatgaaaaaataaaatcataacgcctgcctaaaagagggcagactaaggaagacccctcatccgtcgcggcatacgccgcgacaccttcccccctgtggggggaaggctttatgttggcccgccgtatattttgtagagtccatcacgatgaaaaaataaaatcataacgcctgcctaaaagagggcagacgttgatttttacacactatattccgaaacagtatattctaatattttacacaccacaatattgtacaataaaccagagccctttcatctggggtgtggatctctgcaattcgtccgccccagtaaataatccacacttgtatgatagaaatccgccaatgcggtcaacgtaggaatggagatttcaagttcaccattttcatagcgggaataggtcgcttgactgacatgtaaaaacttcgcaatctctttctgtgaaaggtcgctgtcctcccgcaaatcccgaatccgtaatggcatggtctcacctcgccattatcatagattatgcaaaaagcgtattttgaaatttatactaaattggtataaaagaaatttggaggtcgctttatgccaatcacagacgaagattattttgaaaaaatcaaaaaaatagacgtcctggcggatgagctggagacagagatcaccgcctccatgcagacctgtctgatccgcttcggggagatcgtccagatccagaacgccatgatccagaagatgcatgccctgtctgatgaaatttttcagctccgggcgcaggctggtctggaaaacgtgatatgccgggcctccgggcagaaggaggcatcaaaagagtgggatgaagcagacccctccattccggaaccataaaaacagccctctgggataaaaatttatcccagagggctgtttttgaactgttctaaggggcggcacggggccgtcttatttgtatttccggctctccgccaccgccagctcgtcacagcggttgttgtatgggttgctggcgtggccctttacccagtggagcttcacctggtgccggtcgcacaggtccagcaggcgggcccacaggtccggattcagggcgggctttttgtcccccttcacccagccccgggcccgccatcccttggcccagcccttttccagggcatcgatgacgtacttggagtcggagtacagctccaccacacagggctcattgagggcctccagcgcggtgatgacgccggtgagctccatacggttgttggtggtctggggctctcccccggacatctcttttttgtgggggccatacatcaggatggccccccagccgccggggcccggattgccggagcaggccccgtcggtgtagatggtgactgttttcatgttcgcctcctgtccgtgtagccttccccccacaggggggaaggtgcccccggagggggcggatgagggggacctccgttccaccgcccggcggattgtgaggcagaccccctcaaaattctgttttacatccaaattcgtaaaacgcagcacttcgatttgaaaatttgtctgcaaaaaatgggaccgcatctggtcatactcaagtgcatccttttcgtaatgctgtgctccatctaattcgatccccagccttgcctgagcacagtaaaagtccaaaatatatggtccaaatgggacctgtctgcgaaattggactggatgctgctttaaaaattcataccacagccgccgttcctccggcgtagcttctctgcggagtttttgggaaaaggctttgatctctgggtgcatcttacgcttctccctctcatccatcacggcttttccgtgccatcttcccccctgtggggagaaggttttttgatcccctaacccacccgcgtggaatcggcgtccggtcatcaatacaaatcgtaataatacccctgtaactgtaccgggcattatcataaattgggagtcgaacccaacgaatggccccgctcgttgccaaatctgtgtgcccaatggctccggcactgagagcttgacgcccgccttccgcgctgccaaatcgccgggagagggcgctcttccccctcccggcagctcttttttacagctccaccagctcggtggtccagtttttctcctgaatggtctcgtccagctcccggagtgccttggcgtcccggtccacctgcttctgcagctctcgcacattgaccgcgctcctgatgcggatctcacccaccgtccggcggttgaccacggcgctggcgctgttcaggaagtcccgcaggatgcgcagccggcctgtcatgcactcccggcgggccagcaggtcagagagggtcctcccctcccccgcctctgtggtgctgttggtccggttgatccgggcaatgagctcctccagctggacatagtcctcctccagctctctcagcagctccatggggtcctctgcgggagactccccctcctggaccagggcgttgttgtccagccggctctccagctgccggatgcgggtctggagctccgagcgcagggacagcgcgttggccagtttcatggcattgtcctcctttttccgtcacaggcggctcaaaatctcacgccgcttttcctgatactcctcctgggtgatgagcccggcctttttcagatcctccagctgcttcagccgctctcccgcatccagggcggtggaagggatgtggtcgtgggtcccggcggaggggcggtccgttttgtccacatcctccatcagaccggcgatggtctcctcttcgatcccggtctccacgtcatagcccacccggtggggcagtccgtttttcccaacggcgctcaggacccccatcaccacagccagagcgcccatggccaggaaaggcagggaaaagaggggcgacagcggcatgatctgggtgaccgccactaccacaaagacaaggccaaaaatgacctgtaccactcctgccatgcggcggactgcccgggtggccccggtaggctggctctggacggtgatccgtccccgtcttctccggctcatgccctctcctcctatcctaattgtattttatatcctggttattcctcttcggactggttttcttccgaaatgggggcctcctccgccctctccccggcggggtctccctcctccgtctcctgggtgccggcggtctcctcccggtcggtgagggcaagggagatgacctggtctccctcctccttgaagcgcatgacgatgacgccctgggtagcccggccggcggtgcggatgttgtccacaggggtgcggatcaggatgccgctctgggtgaccagcagcaggtcctcgctgccgtccaccaccttgatgcccaccacgctccctgtcttctcagtgaccatatagttcttgatgccgatgccgccacggttggtgacccggtactcctccacgggggtgcgcttcccatagcccttctcggtgatggacagcacctcatggtccgccttggcccgggcggcgcccaccacgtagtcgccctcccgcaggcggatgccccggacgcccacggcctcccggcccataggccgcacgtcgttctcgtcaaagcacaccgccatgccgtcgtgggtggcgatgaggatgcgctgctgtccatcggtctcccgcacggcgatcagctggtccccctcatccatgcgcagggcgcggattccgttgttccgcaggtttttcagggtgttggcgggcaggcgcttcacggtgccgcttcgggtgaccatgaagaggaagcggccgtcgtcctcgatggaccgggtgtggatcatggtctggacccgctctcccgactccacctggaggatattgatgatattggtgcccttggccgtcttgccagattccgggatctgatagcccttcttccggtagaccttgcccgtgtcggtaaagaagaggatatagtcatgggtggaggcggtgaacacgtccaccacgtagtcctcctcccgggtggtgatccccttcttgcccatgccccccttggactgggcggcatactcactgaccggggtgcgcttgatgtagcccgcctgggtcagggtgaagacgcactgctcctcctcgatcagatcctcgatgtcgatctcgtcctccacatcctggatctcggtgaagcgctcgtccccatacttgtcccggatggcggagagctcgtccttcagcacgccccggagcatggactcgtcagccagaagttggttatagtaggcgatgcgcttctccagttcagcgtactccgcctccagcttctctttctccaggccctggagccgcttgagctgcatgtccaggatggcctgggcctgcacctcgtccaagccgaagcgggccatcaggttctccctggcgtcgtcgtagctctcccggatggtcttgatgaccgcgtcgatgttgtcctccgcgatgagcagcccttccagcaggtgagcccgctcctgggccttcttcaggtcaaagcgggtgcggcggatgaggacctgctcctgataggcgatgtactcgtccagaatgtggcgcagggagaggatgcggggctgaagcttcccgttgacctccaccagggccagcatgttgatggcaaaggtggtctggagctgggtctgggcgaacagccggttgagcaccacctggggattggcgtcccgcttgagctcgatgacgatgcgcataccgttgcggtcggactcgtcccggatgtcggagatgccctccaggcgcttgtcctccacctggtcggccatgttcttgatgagcatccgcttgttcacctggtatgggatctcagtgatgacgatgcgcacccggtccttgccgaactcctcgaattcgtggcgggcccggaccatcagccggccccggccggtggcgtaggcagagcggatgccgctgcggcccatgatgatgccccgggtgggaaaatcggggcccttgatgtgctccatcaggtcggagagctgggcctccggatcatccagcacgcagatgacggcattgatgacctcccgcagattgtggggcgggatgttagtggccatgcccacggcgatgccgctggagccgttgaccagcaggtttgggaaccgggagggaagcaccttgggctccttccgggtctcgtcaaagttggggtcccaatccacggtgtccttctcaatgtcccgcagcatctcgtcggccagcttggacatgcgggcctcggtgtaacggtaggccgcggggggatcgccgtcgatggaaccgaagttgccgtggccgtccaccagcatgtagcgcatggagaagtcctgggccaagcggaccaaggcgtcgtagacgctctgatccccgtggggatggtagcgtcccagcacgtcgcccacgcaggtggccgacttcttgaagggcttgtccgcggtgaggccgtcctcatacatggcgtagaggatgcggcggtggaccggcttcagtccgtcccgcacgtcgggcagggcccggcccacgatgacggacatggcatattcaatataggaactctccatctcgggtaccagaggggatatctcgatcttctggtccgggaaacggatctcctcaggatcatattggggttttttgctcatatcttaactttcctccaccttcatggattcaacctgtacgatcagtgcggagccgccgcggtcaaagtgtggagacaggccgcccggcgtccgctcttctcagtaatccaggtttactgcgtacttggcgttgcgctcgatgaactccttccggggctccaccttttcgcccatcaggacggtgaacacctcatctgcccggacggcgtcgtccagctcgatgcggcgcagggtgcgcttctccgggtccatagtggtctcccacagctcatgggggttcatctcacccagacccttgaagcggctgatatccaccttggcgttgggattgtcccctctcagctcggcggagatcttatcccgctcttcttcactgaaggccaggcggatctgcttgccccgggtcagcttgaacagagggggcactgcggagtagacatatccattctcgatgagggggcgcatgaaccggaagaagaaggtgagcagcagggtgcggatatgagcaccgtccacatccgcatcggccatgatgatgaccttgtgatagcgcagcttgttcaggtcgaactcgtctccgatgcctgcccccagggcggtgatgacgggggtgagcttgtcgttgccgtacaccttgtccgcccgggccttctccacgttgagcatcttgccccacagggggaggatggcctggaaccgggagtcccggccctgggtggcggagcctcctgcggagtcgccctctacgatgtagagctcggtgagctcggggttggcctcgttgcagtcccgcagcttgtccggcatagcggccccgcccagagcggtcttgcggcggatggactccctggccttccgggcggcctcccgggcccggttggcggtgagggccttgtccaggatggcccggcccaccgccgggttctcctccagatagatctccagcttctcactgacaatggcgttcaccagggtgcggatctcgctgttgcccagtttggccttggtctgtccctcgaactgggcgtcggtgagcttgacagaaatgacgcaggtgagaccctcccggcagtcgtcgccggagactttgtcatcgtttttcagcacgccgatcttcttgccgtaggcgttgagcacgttggtgagggcacgtttgaagccctcctcatgcatgccgccctccggagtatggacgttgttggcgaaggagacgatgacctcgttatagctgtcattgtactggagggccacctcagccatggagtcctcccggttgccggacatatagatcacgtcagggtgcagcgggtccttgcttcggttgatgaaggtgacgaattcccggatgcccccctcgtagcacatatcgtcctcctgctcccggccggggcgcaggtccacggtctggatgcgcaggccagcattgaggaaggcctcctccctcatccgggtgtggagagtgtcatagttgtactccagagtctcgaacatctccgggtctggcttgaaggtgacggtcgtgcccgtatggtcggtctttcccaccaccttcatctcctgggtgatctttccccgggaaaacttcatctcatagatctggccgttcttgtgtacctggacctccagccactcagacagggcgttgaccacgctggcgcccacgccatggaggccgccggacaccttgtagcccccaccgccgaacttgccgccggcatggaggacagagaacaccacctccagcgcgggacgcccggtttggggctggatatccacagggatgccgcggccgttgtcagtgacagtgatggtgttcccgggattgatggtcaccgtgatgtcggtgcagtagcccgccagggcctcgtcaatggagttgtccacgatctcatagaccaggtggtgcagacctgactccgaggtggagccgatatacatgcccggccgcttgcgcaccgcttccagtccctccagcacctggatctccgaggcgccgtactcgtgctccacctgggtggagttcagttccaattcttctgccataataacctccatatcgaaatgcagaaggcagaatacagaagctggagagatgaggctctctccgctggtccctgccgttccgatatccacttgttccgcccggaggaccgggcttcttcactctgcattctgcattccatcattctgcatgattcaaagcaaattgctctccgcccgccgcagcagtgcggcggaggacagctgagagatgtagactgtggccgtccccttctcctcccctaccaggacaaaggagcggggcaggtcatcgcacaccgagatgactcggccctcctgttccgcccgctccaggaattcccgggtcttataggcccagctggcgttgtccaggtcaaagatgcccaaaatctcccgatggggcactgccaccgactggcccaggtgcagatacataagcgcctctcactttctttttttgatccaggacaggagccatgccccagcacatcccaaaaggactgcccccgcggtccaaaggagcaggaccacattcccaccccatccaaacaagagcccatctggccgggcagctgtataatagatcattccagagacaggaatcatctccatcagggcagcacccagaagccgtagagacagctgctccgtggccgagagaacgagaagctgaatgacaaaggagagcgccaggacaatcagcaaaaattccatctgttctctcctctcacatcagccgcccgccctggatatggaaactctttccattctccagtccctctaatttttcctcctcacagcaggaaataaacacctgcccgccctggatgcggttgaggacgaaggcctgccgccggtggtccagctcggagagtacgtcatccagcagcagcaccggccactcgccggtctcctgaaaaaagatttcccgctgagccagcttcagggagagggccgccgtgcgggtctgcccctgggagccgtaggtcttggccgggttcccgtcgatctccactgccaagtcgtccttatgggggccggacagacactgacggctgtccagctccgcctgccgatgggcctgctggtgctccagcagctggggcaggatggttttggctccggccagggggtctgtgacggtggagacggtctcataccgcagagagagctcctcctttcccccggaaaaatcccggtggatggcaggggcgctctcctgaaggcgcctgatgaagtgagcccggtagtgaacgatcagcgccccggtctgggccatacggagattgaagtcgtccagggtggacagcagggacaggttctcctgccagtcccggagtatgcgcaccttgtggtcatagaggcggttatactcgctgagtgcctgctcataccggggccgcagctggcagatggcgctgtccagaaagcggcgccgggccgcccctccctcccggatgagatacaggtcctccgggcagaaaagcacggtattcaaaatgccggacagctcccccgccgtcttcagccgcaccccgttggaccacagctggcgccgggccccccggttcagccgggcctccagagtgaagtcccgggcccgggagcgcacctctcccttgacaaaggccccatccactcccagcatgatcatctcccggtcgtaccgggcccggtgggaccgagcggtggacagataggccaccgcttccagcaggttggtcttgccctgggcgttgtctccatagatcaggttcacccgtggatcaaagacggcctccagatggacatagttgcggaaaaagtccagctccagcgacttgacgatcattggacaaccagttccgtctcatcgtcaatgaccgcccggtctcccggacgcagcttcttcccccgcatggtgcacacctcaccgttgaccgccacccgtccctcctggatgatgagcttggcgtctcccccggtctccaccgcaccggcgaatttcagcaggtcctggagcttgatgaattcggtgtggatctgaatggtctcgctctgcatcaaaatcttcctctcagtttgccttcagccgcaccggcagcaccatatagacgaaattctcctccccctcggcgggcaggatgacacagggggccacgccggaggtgaactccaggcgcaggcggtctgctggggcggccttcagtgcgtccatcaggtacttgttgttgaagccgatctccagcccctggccgtcccccgtgatggggcactggtcggcggcatccccgatgcccgtcttggtggtgatggacagcatcccatccccgaagacacagcgcagggggctcttcagtttgtcactgatgatcagggagacgcgctcgatggactggagcagggtgcgggcatccccctcgatcttgatggtgttgttccgggggatggcattcttataggccaggaactccccctccagccggcggcagaccagcaccgtgtcccccgcctggaactggatgtgccgggccccctgggccacggagacagcatcctccccggcgcagatcttttccacctcgctgagggcggagccaggcaccacgaaggagaaggggagcaccccctggctgctgtccacaggctcgtgccgaagggcgagccggtagccgtccacagacacgacggtcaggccgctctcgtccacctcgaacagggagccggtgtggacggggcggctctcgttgtcgctcaccgcgaacagggtctgggcgatcatagagcgcagcaccggctggccgatggtcagcccgttctgctcctccaccgagggcagttcgggaaattcttccgggtccgtccccaggatgttgaattccgacaggccgcacttgatgttgaccatatagttctccgaggtgaataccaccacgtcatccggcatcttccggatgatctcgccaaacagccgggcggagaggaccaatgagcccttctcccggatctcagccggaacagcggcccggatgccggtctccaggttgtagccggtgagcctcagctgttctccggcttcaatgaggatgccttccagggcaggaatggagcttttgaccgccaccgcccgggacgccgtggacacggctcccaggagcagtgccttctcacaggaaaatttcatgggggacctccttctgactcccgcctctttctgggaaaggacaggatttttgtcgtaatagtagcccgtaggcaaaaaaaatgtggaaaaccgctgtaagccttacggccccatgggtttggccctccacaggggatgtgaacgaatctggagggttttccacatggggcaaaaaacctaaaaatcatccacagggagttttccacatatccacaaaattcggtggaatggtggagaaaactttattcgtagcgaatgttgatgttggcggtgatgtccttaatgatctcggcggtctccgggctctccttcaccatcttttcaatgcgctcgatggagtggagcacggtggtgtggtcccggccctcaaactcccggccgatctccttcagggagaggttggtcatgcggcggatctgatacatggcgatctgccgggccagggagatgtccttggtgcggccctgtccccgaagggaatcgggctcgatgttatagaatttgcacacctcatcaatgatcacgtcggcggtggggacgatgtcggatttgtccttgaacatgtccttcaccgcccggacgacggtgtccttatccactgtgtcccccatcaggtcctgataggccatgatcttattcacagtaccttcgatctggcgcacgttggcggtaatgttttctgcgatgagctggagcaggaactcgggcagctcgatgcccatgcggatggacttgtttttgatgatggccatgcgggtctcgtagtctgggggctgaatatcggccagcaggccccattcgaaccgggtcttcagacggtcatccagccgcagcatctctttgggcggccggtcggaggtgaaaacgatctggcgcttggcctcatacagcgtgttgaaggtatggaacatctcctcctgggtggaagcccgtccggccacgaattgcacgtcatccatgaggaagatgtcggcggagcggtacttgtcccggaactcctggttgcgtccctcccgaatggcctggatcagctcgttggtgaaggtatcccctttcacgtagaccaccgacaggccgggtttgttctgatggatagagttggcgatggcgtagagcaggtgggtcttgcccagaccggactccccgtagatgtagagggggttatagctgtgccctggattatcggccaccgcccgggcggcggcatgggcaaatttgttggaggagcccaccacgaagcgctcaaaggtgtactcctccgttccagggatcaaatcgttttttttcggctgctggtatcggtcaagctccccctcggtgagcacagtcacctgaaattcggcggagaacagctcccgcagggcattctggatggcgggaagataccggctggcgatgatatcccgtttgaagggggtgggggagtagaggacgaagcggtccccctccagttccaccgcagtggtgtcgtcaaaccaggtgttgatggtggtggtggtcatctcgttctgcatcagggccagtactttggcccagatatcagcggctgggttcatggaactcctccattcctgtggattgagatccggcgccggaaaacagggccgggagagggcgggcccgccggagagcggccccctgggaaggagccggcggcattaaaaaacagcggatcgcattacactttattatatcaaaaaagggaccaaatcgcaaggttttggcccatattttatttataagagtatctgtgagttgtggatatgggaaagaaaatacacaagatattgtgaataaacgggagttgaaaaaaataaggaggattttgcgcaaaaattcattgacacagctggatttcttagtctataataagtgacgctgtcctgtgagagcgggtctttctgcccttttttgcgggactgtttgtgtacagaccgcagccgaaaggctgttgctggaccggaacgccggtctgaatgcgccgtccaatggacggtgtctgaacttgaacgaggaggtgtcccccatgcttcgtacctatcagcctaagaagcgccagcgctctaaggagcacggcttccgcaagcgtatggccaccgcgaatggccgcaaggtcctggcccgccgccgtgccaggggccgtgctcgtctgacccactgatgtggggaaaggggaggcattccgcctctccggacgaggatcgagatctcctatgagatacggcagcgaggacacaatcgaccgatatgcagcttgaggggcgtgggagaaattcccccgcccctgcggtgcatatgggaaaaagcggggcatcgatgccctattggaccgggtcggtgcccgggtggagggatgaccgtgaagcataccgtggcattgaaacagaatcacgagttccgccgcctgtacagcaagggccgcagtgcggtcagcccctattttgtcctctactgccggcccaaccgccggtcatacagccgcctgggcatcaccaccggcgtcaaactgggcaacgcagtcaagcgcaaccgggcacgccgccgaatccgggagctctaccgggtggaggagcaggctctgcttcccggctatgacattgtagtggtggcccgcacccgggtgatctatggcaaatacgccgaccttcagcgcagctttcggagattgacagaaaagctggagctgcgccagggccgggaggcgggtgaagcgctgtgaagcgtatcctcatcggactgatccgattttatcagaaggccatatcccccatgcggccgccctgctgccgctttatccccacctgctcggcctatgccgtggaggcggtggagaagtacggcgcgtggaagggcggctggctggccctgcgccgggtccttcggtgcaatcccttccatcggcagaagtccatccaatacgaccctgtcccgtgagaggggctcccacgaaagaatttgagacggaggcacatcatcaatgggcgttatgtactacatcctgtcccctttcagctggctgctgaactttttttacagctttaccgacagctacggtatttccctgatcctttttgcactggtcatcaagatcatcctcttccccctgaccatcaagggcaaaaagggtatgatccagatgaacctgctctccggcaagatgcagcagctgcagaagcagtacggcaaggaccgggagcgctacaatatggaggtccagcgcctctatgagcgggagaaggtcaaccccatgagcgggtgtctgtggtccttccttcccattctgatcctgctgcccctgtatgccatcatccgccagcctctgctctacctgatggggctggacagcaatcagatcgcccaagtggccgcctccgtggactggcagacgctggccgtgaaccacggctgggttactgccgatgccatggccaagctggtggagcagttcaacgcgggggagatcgccaccgtgttccagaatgtgggctataaccagctgtatctggcctctctggtcaatgagaacaccctgcccaccatcaccgccgccctgggagagggcacccgggtatttgtgatgaactttgattttctgggactggatctggctatgctgcccacctggaagatctgggagcacctgaactggcagtacatcggcgccttcctgctcatcgtgatatccgctttctccagcatcttcatgtccaaaatctccatgaagaccaaccagatgaacaaccagagcggcaacgagcaggtggaaaagaccaatcggatcatgatgtggaccatgcctttgatgtccctgtggatcggctttatgatgccggtggccatgtgtgtctactggatcgccaacagcctgttctccgtcatccaggagctcattgcaggaaagatactgaaaaaggactatgaggccgcccgagccgccgccgccgagcgggagcgccaggagaaagaagaggagaagcgccgcaaggaggaggcccgcctggagcgtcagcgccgcctggaagaggagaagaaaaaccgtggcaaaaagaagcccggccagaagaagagcgactccgatcagcctggcatccgaaagagcgacagccgggtggggatgcggacctatgcccggggccgtgcctatgatcccaaccgcttcggcggcgtgactccctaccacgaccccaacgccccggagatcccggaggatgcggtggaacaggcgcgcagggagaagggagaagaggcggaaaacgccctggccggagaggagctggcctccgcccttccagagaccagcccgattgaggaagagaaggagaccgccgccctggagtccgtcagtgaggctatagacggctctgaagaggaactgtccggggaagaagcggaagaggctgagcaggatgagtccggggaggagcccgacgaggacaagtccaaggatcaggccgaataaggagggttctgacaatgttgaaatggattgagaccaccggccgttcggaggaggacgccattgctgcggccctgtttcagctgggcatggaccgggatgacgtctcggtggaagtgatcgagcgggccaaatccggctttttgggatttggcggaaaccccgccaaggtccgggtgagctatgaggtcccggacgaggagcagaccgcccccgcggccgcggaggagacggttcaggaggccgccgcccccgcagcggaggagcaggagccggctcccgcaccccagagggaggatgccaaccgtctcctgcccggggatgaggtgctgatcgccgctgaggagcccgcccctgttcaaggggatgacgggaaggcggagcagatccggactttcctcactgggctgatggaacacctccatgtgcaggccgtccctgagatcactctgatccctgagggaagctataaggtggtccttcagggccagggcctgggggctatcattggccgccggggcgagactctggatgccattcagcagctgaccaattactctgtgaaccacggccagtctaagcgggtgcgcatccatgtggatgccgagggctatcgggccaagcgggaggagtctctccagcggctggcggtaaaggtggctggcaaggtggtcaaataccggaagaatgtgaccctggagcccatgaacgcctacgagcgccatgtgatccacaccgcactccaggatcaccccaacgtgaccacctactccaccgggaccgagcccaaccgccgcacggtcgtggcctatgcccccggacagaaaaagtagagactcacaggcgcggcgggatttcattcccgccgcgccttcttacaccggaaaggagaccagtcatgcccacaccgctctatgatgccctgagaggatacgctgcaaaagctcccctccgcttccatatgcccggccacaagggagcctttcttccctgccccgagctggcccccctggcgcggctggatgtgacagagatcccgcctacagggaatctgtatgaggatctctctcctatccgggaggcccaggccctgtgggcccgccgcatgggagcggagtactgccagtttctcaccggcggctccaccatgggtatccataccgctctgaccctgtgctgtcccccggggagccgggtgctggtggaccggagctgccaccgctccaccttccacgccctggctcttctggatctggacccgatatttcttccacgcccctggctggcggaagagggggtggccggcccgttttcccccctggatgtgaaaaaaatgctggatcaagatccaactatcaaaactgtttgtattacatcaccaacttattgcggattgttgtcggatattcccgccattgcgggagtagtccacgcccacggtggaaaactggtggtggacggtgcccacggagcccatctgaaatttttggggatggatgcctaccggggagcggacgcggtggtggtgagcgcccacaagaccctgcccgccatggggcaggcggccctgctgttcaccaacggcatcgacccggaacaggtgcggcgaactgccgccatctacggcacctccagcccctcctaccccatcctggcctccctggacacggctcgtgagtggctggagggaccgggtgccggagagtatgggcgggtggcccggcggaccgccgccctgcggtgccggttcccatccctgtgccctcccctgcccctggaccccacccgctttactctgaaggtgaagaacgggccggccttcaccgggcagctggagagccgatgcaatatctggccggagatggaggacgggggccatgtggtctttatcctcaccgcctgcgacggggaagaggctctggaccgcctggagtccgtcctggaagggatggaggagcagatgggggacagtgcgcccctgccgccccctcccctgccggagcgggtgctctccccccggcaggcccagttcgccccagcggaggtccttcctctggagcggacagaggggcgggtatgcacctgccagctggccccctatcccccaggtgtgccggtggtggcccccggggaacgaattgggaaaaaagagctggcctatttcagacaaataggctataataatcgggaagtaaccgtcgcggccatgccatgaaaagggggcggcggcgcaagtgaggaagcgaccatggaattgacagccctggcgggcaatgcccagatcaaggcccagctggcccaccgggagggggacctggcccacgcctatatcgtcgccggcccggcgggcagcggccggcataccctggccgcccagatggcggcggccctggtgtgctccgcccagcctcagctccggccctgcggccgttgttcccattgcagaaaggccgccgggggcatccatcccgacatcaccgtgatcgctggcagcggcggaaaacccattaccgtggatcaggtccgtgccctgcgcaccgacgcctatgtccgtccaaacgaggcggagcggaaggtgtacctgctggagcgggcagaccggatgaacgccagcgcccagaacgccatgctcaagctgctggaggacggccccgcctatgcggtctttttccttctggcggagaacggctccgccctgctgcccacggtgcgctcccgatgtgagaccctggagctggcccccgtctccccggctcaggcggaggagtggctggccaaggcatttcccgggagaacggcggaggaaatccgccgggccgctctggagtgccagggcatcctgggccgggccgcggcgctgctggagggcggtcaggaggaggacggactggaggagaccgcccgctccctgtccgccgctctggagggggaagatgagctggccctcttcgaggccacccaggccctggacaaactgagccgggaggagcttaccgctgtactggaccggacattgatccagatcggggcccgcctgcccggctcccagcggccccgccgtctgctggcggccgccgagctgctgcgccgcctgcgggacggggcggacctgaacgccaacccgggccaggtggccggatggctgtgcgcagggatgtttctgcgcccgtgactccctcgcgccggggtgccgttcccaccccgtgcgatccccaatatagcaacaggaggaccttatggtagagatcatcggcgtccgcttcaaaagcggcggaaagcaatattattttgaccccgccgggctggaggtgcagcctggacagggagtgatcgtggagacctcccggggcctggaatacggagagtgtgctcaggggaacacccaggtggaggaggagactgtggtccagcccctgcgcccactggtacgcatcgccacggaggaagacgagaagacggtggaaaaaaaccgggagaaggaggcaaaggccttccagatctgtcaggagaagatcgccgcccacggcctggagatgaagctggtggaggcggagtacagctttgagggaaacaaggtgctcttcttcttcacggcggaaggccgggtggacttccgggccctggtgaaggacctggccagcaccatccatgcccgcatcgagctgcggcagatcggtgtgcgggacgaggccaagatgctgggcggcctgggcatctgcggccggcccttctgctgtgcccagttcctggacgagttccaaccggtatccattaagatggcaaagacccagaacctctccctcaatcccaccaagatctccggcacctgcgggcggctgatgtgctgcctgaagtatgaacaggaggcctatgaggacctggtaaagcatacccctaagcaggagtcctttgtggagacgccggacggggcggggacagtttcctcggtgaacctgctgcgccagcaggtccaggtccggctggactccgcgcccgatacccccaagtgctaccacaactgcgagatctgcgtagtgcgcaatggaaagggcaagcgccccgagggctatgtggagccgccgctggaggagctggccaagctgcgccgggcgcctgaaccggaggccgccccagagcccacttcctccaacccactggccgccgccctggaggcggtgttcaacggggagcgtcccccggagccggagggagagcgtcccagaggcgagggcgaggggcgccgccgccgccgcagaggcggccggagcgagggtgcgtccggcggggagagccgttcccagggtgagggccagcagcgctccagaagagagtgggagcgccggctggagaagccgagggacaaggagcccgggacagcggaggcggagggcgtccaggagggcggagagcggaagcccagccgccgccggcgccgccggcccagagggaaccggcccgctccgggaccagaggggaatggctgaaagagaaaaaaagccccggacatcataggagagaggatgtccggggctgacccatcttggatcgataaagtgaggtgtcccggatgctgggagaatttttaaatgcggtctccgccgtggtggtcctgctgatgcttatggcggtgggctattttatggggaccaagggctggatgaaagcggaggagaaaaagttcctgagcaagtacatcatcaacatcgcggtcccctgcaactgcatcaacggcctgctgaacaatctggaccagagcatgctggcccaggcggggctgatgctggtatccgccatcattggagtggtcatcaccatcctgctgggcatggggctggccaccctgctgcgcctgcccaaaaaccggtggggcgtctttgccgccatggtgggggtgtccaacaccctgttcgtcgggctgcccctgtcaacccagctgttcggggacgtgtgcgtcccctacgtcatgatctactatctggccaacaccatcttcacccagtcggtaattctgatgctggtggagcggtcgggcaccgcctcccacagccggggaatcaagggctttttgaaggatgtgttcaccaaaccccccatcctcactgtgatcgcctcggtgctgatgctgatagtgggcttccgtcctcccgaggtgttcatgagctttgccaagtacatcagcggctccgtctcccccctggcgctgatctactgcggcttcatcatctatgaactggggctgagcaacctgcggcccagccagctgcggcagatgaagggcctgccaaccatgctggcggcccggctggtgatctcaccgctgatctgtgcaggcatgtgccgcctgttcggcattaccggcctggcctatcaggtctttgtagtggagagcgccctgccggtggtcagtcaggtgaccgtaatggcgggggacttcggggcggacgacaagtatgccgccaccggtgccaccctgtccaccctggcctgctttatcaccatccctgtgctgatggtgctgatggggtgagtggatgggatggacacttttgaccgtggccgccgcggcggggggcggcctgctgctgatgaggctgcgggtccccggcgggatgctggtaggtgccatcctgggcgcggtactggtgaacctgactacaggacaggcgtacatctggcctcagacccgggtggtggcccaagtgctgaccggggcctacatcggctgtctggtgactacgaaggacctgagacatctgccccgggtcattcggccctatctggcggtgatgtccacctttctcgccctgaatctggcggtgggatttttcatctggcgggtaacagacctggatctgctcacttccctgttttgtgccgctcccggcggtatgacggacaccccgctcatcgccctggacatgggggcggacgcctccatggtggcggtgatgcagttcgtgcggatggtattcggcatggcctgtctgccctccatcattgtcctggccgaccggaagatagagggggaccagatggtgccggaggagggtcagggaacgcactccctggaaagaaaaaaggcgcatgtcagcctgcggaagtttcttcctaccttcgctgtggcgctggcagcgggcatcctgggcaagctgtccggtgtgccggcgggtaccctcagtgcctctctgatcgcagtgatcgtgctgaaatttgcgggcagcgcgcccccaatgcccatgtgggtgcggcggctggcccaggtggtgtcgggctgctgcatcggtgccggaatcacccgggatcagatcttccagctgcgccagctgatcctgcccgccctggtgctgatcgccgggtatatcctggtctgtgtggggatgggccgggcgatctccagggcgtttcggatggacttgaaggagtccatgctctccctctcccccgcaggagccacggagatggccctcattgccgccgacctgggggtccacagcaccaatctggtggtgctccagatctgccgcctgcttggagtgacggtcatctttccccagatcttcgccctgctctccaatttgataggataaaatatgctgtgcccgcctcctatggaggcgggcacagtttttccgcggagcaaaaggacaggcccgtcataaatctccccatctgggcataggatgcttcaggcttgcttacaaaaggagtgatcgcatgggcggtaagaggagggagagcggactgcgcgctctgcgccggggagcggccctggggctggcgctgacggcactgtggatctttggattgacggcagatctgtccggggcctgggacgccctggggcggctgggacagaccccctccttcgttctgggcgcgctgagtcaggaactggagggggccccagcgggggacgggctctctcccgacctggaccgatggggccggctgctgctggcccagtccgccctgctctccggcggccgcccggcggtggacgcctttctggcagagcaggcgcaggcggaggagccgcccgccgagcccatcgaccaggaggagaacgaccaggaggagccggagctctccccggtccagcacggcgaggtggtggagtacaccaatctggggaaggacgacggcagctacctcaccaccgaccagatctatgtgaagaacagcacccagggccaggaggtggacgtggctgccctggccagccagccggtggacctgaaactgggggcggggccccagatcctgatcgtccacacccacggcagcgaggcctatactcaggacgaacaggacgtctatgtggagagcgacccctaccgcaccaccgactgcaccaaaaacgtggtccgggtgggagaagagatggcccaggtgttccgaagccagggctttgaggtggtccacgacaccaccctgtacgactaccccgcctataacggggcctatgagcgctcctgcgcaggggtggagaagtggctggagcagtatcccacgatcaaacttgttttggatgtccaccgggacgccctggtgtcggcggacggggcggcctataagctggtgagcgaggtggaggggcagaaggtagcccaggtgatgctggtggtgggcagcaacgactccgggatggagcaccccaactggcgggaaaatctggccctggccgtcaagctccagctggagctcacccgggactggggacagctagcccggcccatcaccctccgctccagccgctacaaccagcacctctccccaggttcccttctggtagaggtggggggacatggaaatacgctccaggaggccatcgccggggcacgcctcttcgcccagagcatagggcaggtgctcaaaaccatggaggagccgtaaaaagggctgagggcccccgcttaatggcgggggccctcagcatgtcaaaaaagttacagactcccgcgccctgggtttgcccgccgcaggcgtacaaaccctgcgcacgcgaactctgtgaggcttattccacaagctaaaggccgcctactccggggggcggccccttgctttaatccctgggggcccggtagaaccggccggccacctggtccgtgcgcatcacgttgacgaaggcgtgggggtcagtctggcgcacccggtggatcagggcccgcacctggttgccccccaccacggagtagagcatcacccgctcctcaccgtcatagaggccggtgccctggaacagcgtggcgctgtggtgggtgtcccggatctgctgccagaccgcctgggcggtctcccgccgggtgacgatgaagagggtggcccgccggccgctggggtccagcagcttgatcacctgggtggaggcaaactgaaagaggatggaatacagggccttgtcccagccgaacagagcgcctgagacggccagcatcaccacgttgcccataaatatataattccaggcatccacatcgtactgctgggagagggcgatggagatgaagtcggtgcccccgctggtggctctcccccggaggcacaggctgatggcgaagccgttgatgaggccgccgaagatgcagatgagcagcacatcgtcggtaatgggcataggggggatcagatcggtgagcaggctggtgcacaggatgaccacgcaggagaacagggtgaaccgcttgccgatgagtttgaagctgatgacggcgggcaccgcgttgagcaggaagttgatggcggagaaggggacggacaggccccagaaccgcagcgccacccgctggatcagcagggtcaggccgttgaagcctcccggcaccaggtccccggcctggacaaaactcttcaggttgacggccatgatgacagaggccagcaccatcagggccagccgccccaggtcgtccaggagctgggatttggagtaagagacagtttttttcatggcgtgacctcctgcgtgtttcccggggaatgtgctcccattgtatccgctcccggtccctttggcaagggggaagggcggaaaagaccgggaatgtgggaagtatccgacatcccccctcccccgcagagagggagcagccgctccgcatccccggacggggagatgtggggtggagggaaatgtggaaaaatcagcaggagcggttctccttggcggcggcgatgaaggcgcggaacagggggtgtgccttattgggccgggatttcagctccgggtggaactgtacccccacgaaccaggggtggccgggcagctccacgatctccaccagccgcccgtcgggggacaggccggccagctccagccccgcctgggtcagggcatcccggtattcgttgttgaactcgtagcggtgacggtgccgctcggagatctcctcggctccataggcctgataggtgcgggagccgcggctgaccactttgcaggggtaggcccccaggcgcatggtaccgcccttggcggtgaccccccgctggtcgggcatcaggtcgatcaccggatgggtggtggcggggtccagttcgctggagtgggcgtcggcccagccgcacacgtgacgggcatactccaccaccgccatctgcatgcccaggcagatgcccaggaaggggacccggctctcccgggcccagcgcacggcggcgatcttcccctcaatgccccggctgccgaagcctccagggaccaggacgccgtccgccccgtccagcagttccgccgtgttcccgtcggtgacggtctccgagtccacccagcggatgttcaccttcacgtcgttctcgatgcccccgtgggtcagggcctccgccaccgacagataggcgtcgtggagggccacatatttgccaaccagggcgatctccacactgccctgtggatgcttggcacggtggaccatggtggcccactccgtcaggtcgggcatgtggcagatcagccccagccggcggaccaccacgtcggccagcccctcccgttccagcatcagggggacctcgtacagcaccggggcggtgaggttggggatggcgttctccaccgggatgttgcagaacagggagatcttctccaaaatatcccggggcaccggcgcgtcgctgcggcagatgatgacatcgggctggatgcccagggagagcagctctttggcggagtgctgggtgggcttgctcttcagctccccggtgccggggatggatacgatgagggagacatggagaaacatgacgttgtggcgtccccgctcggcggctatctggcggatggactccaggaagggctgggactcgatatcgcccacggtgccgccgatctccacaatggccacgtcagtgtccggggtgtccagagagtaaatgttccgcttgatctcattggtgatgtgggggatgatctggaccgtggctcccagatagtccccggtccgctcccggttgagcacgttccagtagaccttccccgaggagacggaggagtggacggtgaggttttcgtcgataaagcgctcatagtggcccaggtccaggtcggtctcggccccatcgtcggtgacgaagacctccccgtgctggtaggggctcatggtgcccgggtccacgttcaggtacgggtccagcttctggacctttacccgcaggccccgctgcttcagcaggcggcccagagaggccgccgtgatgcccttgcccaggccggaaaccacgccgccggtgacaaaaatgtacttcactgccatgttgatccctccatcaaagtttgatcctgttgaaaaaaataccggtttattttatgcttgtctggggtgcgagtcaagaaaaaaatcggacagatgggcgaaaaatgggtgcggtccacagccccggcgggggcggcctctgtgctccggtggacacggcgggctttttgtggaaaacatcggaacgcatcgtcccggacctcctctcctcccccatatctcggggatcgtttgggcaagatcagaaaaatgatgctcggcaaaaacagatgtgacaaatgggcgctgccgggcgttttacaggcagagagaaaaacgaagggaagggggacacccattgggtacgcgggaactctttgagcggtatggagacgcggtgttccggctggcgtggagctgcacgggctcccggcaggacgcggaggacgtgacccagaccgtctttttgaaggtgctggagcgccggccggacctggagccgggaaaggagcgggcctggctgttccgggtggcggtgaacgagtgccgcagcctctggcggcggctgaagttgcgccggaccgcgccccaggaggagccggtcctgcggcaggtgatggagctgaaggccggggagcgggagatcctctatctcatttactacgagggcttctccacccgggagacggcgtctctgctggggatcagccagacggcggtcaccacccgcctccagcgggccagaaagaagctgagggaacggctggaagaggaggggcggccatgaaacaggaatatcatcgcgccttggagcagatctgcctttccgaagaggcaagggcgcggatcatcagtgtgctggaacagaaggagcgagggctgaaacggcctaggaggagaatagggaggctgattctagtgtgtgccgtgctcatcctgctccttctggggacaggggccgctgtcgtgtcgcgggtcggcgtgctggagctcttttttcagggggataccagccagctggaaccatttgttcagacgggggcgagtgcgcaggataaaaattatcgtctgaccctagacagcagcatctgtgacggtgataccctgtatgtggtcatcaccgtggaggggctgcatgagcaggcggtggaaaatctgaagaacaatcaggtcgttgcggactgctatcgggcggcctggggccgagagatgccggagaatctgatggagcaggggcagggagacatctccgtgtttcaattccagatggaggccgggaaccatatgtccagcttcggatttgaagagttgcccgccccctcggagaccagccgctcctggcagctccagctcacgctgaccgggctggagcatcctcagacggagcccatcggcctgcgcctgggattcatggaggagagctgtgtgctccagatccccgtggaccagatgccccaggtggtccgggtctccattgcgcgggagctctctgtggactggaatggcggagaagaggtatttgtggaccatgtggagattggccccacacggttcacctatgtaggaaaatatccggatactgcctcctctctagcccccttggtgttcttccggatgaaagacggccagatcctcaccagaaagcagatgggactggagctggagatgcgggatatcccgggaccggcaaatgtatttggaaaagagctggcagagatcgtttatacctctcggtctgtgatggacttgaccgaaattgcatctgtgattctggggacagccgagttttctctaaatggagaaccgcttggagaggtgcagatgaaggaacagctgtatcccttttccatcgaggtgggagagggcggcgcagagtacgcgggcccctatgccgcaagcatggaagagctgtgcaagaaattgggagctgaatatcagtgggatgaaataaacaaaagagcgacgggagtgtaccagggaatttccctctccctgacggccggagaatcccttgcgctggtcaatggggagagaaaggaaatagagacacgggtacggggaaaagatggggtattcacacaagttcccatgccggcggtggaataccatggtgggatctccgcggccatcctcttttttggggaggtctggggcttagaatttcaggtcctcgatggggaaatcatcgttgttccctaaaggagccgagacagcccagaggtctgcgcatataaggacggtctctggcagatagtttgttccattctttttctcaaaaaaggacaagcgcccctgggagatccttctcccgggggcgcctctttgcgcttatcggtgatagagcttgttggtctgatacttgggctcgcaggtgagctggatgcccagcttgcggtaagtcccctcgtcggcgggggataggatgacggagcagtgggcctgacagccctgaagatgggccagggcctccagcgcccgggcggccttggggtccagattggcggaggcggccagggcgatgagcacctcgtcgctgtgcagcctggggttgtttgaccccagatactggaccttgacagtctggatgggctggatggcggactgggcgatcagatgcacgccatggccccccagcccggccagggacttcagagcgttgagcagggcggcggcggagcagcccatcagctcggaggtcttgccggtgaccatcctgccgtcgggcagttggatggccatggcaggctcgccggtctcctcctccagccggttggcctggtccactacggggcggatagcgggggtgatgccggcctgctgcatcaacagctccagtttatagaccgggtcgtcccctcccctgccctgccggcggtcggagagcacatcatagtagcgccggacgatctcctgacaggcagcctcccggcaggcaccgtcgtcggtgatgcagttgcccgccatgttcactcccatgtcggtgggggactgataggggcagctgccggtgatcttctcaaaggtagcagccaggacgggaaagacctccacgtcccggttgtagttgacggtggtctcgccgtaggcctggagatggaaggggtcgatcatgttcacgtcgtccaggtcggcggtggctgcctcgtaggccagattgaccgggtgcttcagggggaggttccagatggggaaggtctcgaacttggcgtagcccgccgtcaccccccggcggtagtggtgatagagctggctgaggcaggtggccatcttgccgctgccggggccgggtgcggtgaccaccaccagagggcgggaggtctcgatatagtcgttcttgccgtacccctcgtcgctgacgatgtgggcgatgttgtgggggtagccctggatggagtagtggcggtagacccgcacccccagcttctccagccgcaggcggaaggaatcggcggcggcctgcccggtgtactgggtgactaccacgctgcccacatacaggcccttggagcggaaagcgtcgatgaggcgaaggacgtcgctgtcataggtgatgcccaggtcgccccgcaccttgttcttctcgatgtcgccggcgttaatgacgatgatgatctcggccttgtccttcagctgctccagcatgcggatcttgctgtccggctgaaagccgggcagcacccggctggcatggaagtcgtcgaacagcttgccgccgaactccagatacagcttaccgccgaactggtcgatgcggtcccggatgtgctgggactgcatggtcaaatatttctgattgtcaaacccttccctggccacgacggccactcccctctcacaacacaataccaatttattttacaaaggtttaggcggcacgtcaagggagagggtaaagaaaattggagaactttgacgggcgggacggaagatcttgtccgctccatgtggattccaggcagaagctgtggtacaatagtcaggcggccacaggccgggaacaggagagatgaacatggaatgggacgagctgatccgcatctggatcattgtctgtccgctggtctttctgggcggactgatcgacgcggtggccggcggcggggggctgatcaccctgcccgcctatctgctggcaggactgcccccgcacctggcctccggcaccaacaagtgcggcaacttcttcggcacactgatagccaccgggcgttttctgaagcggggggacgtgcatctgccctccgccctggccgggggcgccggggcgctggtgggtgcttggctgggggcgcgtttgaacatgatcatgccggagcaggccctctactacctgatgctggctgtagtgccggtgatggcggttttcctgctgtttaaacgggacttcgggacggaggaccggtccggggagctgggagtggggaagctggtgcctctctctctggccatcggtctggtgatcgggtgctacgatggattttttggtccgggggctgggacctttctcaccctggcctttaccggcctgtgccggttcgacctgcttaccgctgcgggcaataccaaggtggccaacgccacctccaacctggccagcctggtgaccttcgccctgggggggaaggtgctgtgggcggtgggcatccccgccgccctgttcggcatcgcggggggctatgtgggggccgggctggccctgaagggcggcgcaaaagtgatccgccccatgttcttcgtggtgctcaccctgctggtcgtccggctggtctgggacctgctggcgtgataaaaaacagtggaaaaagagagggaagggatatgaatcgcatctcgctggtaggccggctgcgcacccagaagctgctggggaggaccgtcctcatcctgctggccttctccctgctcacggtggggggctcctacctctttgtccggggagagatggtgtcccgctaccgggagcaggggatggagggcaccatgtccatgctccagcggaccagcacctccctggaccggaccatccaggccttggagcttcagatccagaccttctggaaggacgatgacgtctccagcctgctggtggcaccggaaaagccggatttctccaggacctcaggggcagccgcccagatccaggggctgcgggaggggaacgagctgatcgaacggtgctggctttacctctatcaaagtgggcagatcctcacagaccggcagctgctgctggaggcgggagacccggagcggcctgggcagctggaacggtggtccgcggcggcggagagcgggacctcctccctgtggtgtgaggacggaaagatatatctgttggtcgccttcccacagcccaaaaagctggggctgctcatcgtccagctcagcgccagagacctgtttgaacagttccaggagggctggagcggcctgtccggagacccggtgtacgtctatgacggggcgggagagcccgtctttcccaaccggatgacctacccggagcgggaggagctgatggtgaccggggaatctccccgggaaggcgtgtacgctttgagcggacagagagacactgtagtttgtgtggctaggtcccagacggccgggtggtactgcctgacctattggaacagcggggactggctgccctctccccaggagatcctcaccgccttcctccctgcggcggcggtgctgctcctgctgatcctgatcctgtccctggtgatcctccaggtgatctaccggccaatccagcggatcgtggaatccatgctcacagggcaggagacggaggcgggccaggacgaggccgggctcatcagcgccgccctggcccggggacagcgggagaaccagcggctgaccggactgctctccgatgtgcgcccggcgctggcccagcggttcttccagtccctgctggaggggggccagacggagccggaggaggtgtccaggatgctggctgctctggagagcccctttcccctggaggggacttacctggtgctggcggtggaggcggtgccggagaggagcgcctcggcggtggagggggagatctacacccggagcctgtggagaagcctgaagcggttttgggagggacgctgccttgcccagatccagcccgccccgggcggagggctgtcggcggtgctgtgcgcttccccaccggtcccaggcggattcgccatccccctggaggactgccggcaggcgctggagcgggagacccgggacttcccattctctgccgcggtgggggccagccaggccagaggaagcctgctggagctctccgccgcctggcaggaggccagacaggacctgaattaccggaaatattgctgcggggaggccgggcagcccggccccggtccggtaggtgcgggcgtatatgatgcccaggtgcgggagatgctccagaaggcgctgagcggagagctggagggggccagggcccagctggcggacctgcgtcaggcagtaggacgcgctcagtccccggtgcagatgcgctctatgctgcggggctgcgtgctgacccaggtgctgaaggtccagcgggaactgggggagcgatactccgccgcctgcgctgcggactccccagacttctggcaggagcaggagcggctgctggctgagctggacgagtggggacacaacagccagcgtggctatatggaccgggcccgggactacatcgccgcccacttctcggacagcgggctgtccctcaacgaggtgagcggccacgtggggctgagtgtgtcctatctgtccagcctgttcagcaaataccagccgccgggcttctcccactacctgcggcagtaccgggtggagcaggcccgcctgctgctggagtccaccgacgccagtgtgacggagatcggctaccagacgggattcaactcctccaacagcttcatccggaccttcaagagtctggtgggcgagacgccgggcaggtatcgggagcgctgtcagggcggaaaatatgaaaacggaaaggatgatgatacatgaaaaaggtggacagatgggcggcgctgacagcggcgctgctgctgacggtctccctggcacccgcctcccaggcggcggaggcgggagagaagatcgtgatcctccacaccaacgacgtccactgtgccctggacgacgccatcggctatgccggcctggcggcctatgccggggcgctggaggagcagtacggggcggaccgggtgaccctggtggacgcgggagatgccatccagggccaggcggtgggcaccctctcccagggggagtacatcatctccctgatgaacgcggcgggctatgacctggcggtgccgggcaaccacgagttcgactatggggtggaccggctgatggagctggcggccggggcggagttcccctatctcagctgcaacttcaccggcctggcggcgggcgaaccggtgttccagccctatgctctcctggactacggggacaccaccgtaggctatgtggggatctgtaccccggagagcctgaccaagaccgaccccacttacttccgggacgaggccggggaggcggtgtacggcttccggcagggaggagacggacaggagctgtatgactgcgtccaggccgcagtggaccaggcccgggccgagggcgcggactatgtggtggcggtgggccatctgggtaatgagggcatctctgcccagtggtcctcccaggctgtcattgcccacaccaccggcatcgacgtgtccctagacggccactcccatgagcagtatgagcggacactgcccaaccgggaggggaaggacgtggtgctggcccagacgggcaccggcctgaccgccatcggccaggtgatcttggaccccgtcaccggggagatccaggcggagctggtggccggctatgccggcagggacccggaaatggaggaggagatcgccgctgtccaagcccagtatgaggagcagctgagccaagtggtgggcagcacggacgtggccctggtcaccaccgacccggccaccggggaatactgggttcggagccgggagaccaacctgggggacttctgcgccgacgcctaccgggcggtgatgggggcggatatcgcctttgtcaacggcggcggcatccgggcggagctggcgccgggggaggtcacttatggggacatcctggacctgcacccctatggcaacgccctgtgcctggtggaggccaccggacagcagatcctggacgccttggagatgggggcacggaagtatccccagaccagcggaggtttcctccaggtgtccggcctgacctataccattgacgccgctgtcccctcctccgtagtggtggacgagaacggggccttccagtctgtggacggcccccgccgggtgaccggtgtgaaggtgggagggcagccgctggagctggaccgggtctataccctggcctcccacaactatatgctcaaaagcggcggggacggctacaccatgtttcagggctgcaccctgctgaaggatgagacggtgctggacaatcaggcactgatccgttacctgggccagatcctggagggggacctgagcgcctactccgctcctgggggacagggccgcatccagatcgcggagacggcggaggagaccggcggggcacctgcggagccggaagagcccgcggccggggcgcggatctatgtggttcagcccggggactgcctgtggaccatcgcccggcaggagctgggcggcggcctgcggtgggtagagatctatgacgccaaccgggaccagatccaggacccggaccgcatccaggcgggaatggagctggagctccccgcctgaggaggagcggggcgcgccccgcagttgtgagatggaccagagcggcaggagggccggagctcgtcacgagctccggccctcctgtgatcatgatatagacgggagctacgatccgggtactcagctttttggatgggattcatttttttgaattttgaaaccggtgtagacagcagagaaatcagaggatggacaggtattccgccccctgttaagctgaaaacagcacagaatgggagcaaaatacagaacagctcccggtgcgggaatctgcaaaaggaggatcacatcatgcgcagcaagtctatccgcctgccgctggctgcggcggcactgtctctggccatgctcacatcctgcggtgcgcccggaggggcaggctccagcgtctcttcggcatccagctccgggagcggggcacagtccgcccctgcggccgttcaggtggagcccctgaccgttcaggacttcccctgttccaccacagaggagtttacggcgctgttccagaagatggtgcaggagacaccggaccagatctactatcacccctacaccggcctgttccaggaggcggtggaggcggacgggctctctcagggccggaagctctacacctatattccggaggagacggggcactgcgcctccagcgtgttcgtggccctgccctccggggagaaggcggaggagttcctggtgagcagcggctggaccgcggtggccgaccagtataaattcctgctccacgccctgacccctgccgacagccagtgggggggcgaggaggagctggactatctgagcgccgcctttgccctggggagcaagacgatccattacagcccatacaccggaaactactactttgtgggctacgccgacggaggccgcctgctggagcagtgggtcatggccaatccggacaactgctccgggctggcagtgctggacggcggagccatcgacgaggcttatctgacccagatgggccagacccccgccgtggacccggaaaagaccgtgaatgaggtcaatgtgccggtgtggctgatcgagaaggagatgaccgacggggtccaggccgtggccgattactggaagggggccaacgattgcactgagacggcctatatcaaccaggacgttcccctggagaccacggtgtatcagcagaacatgctttcccatgacacctttatcaatgcctatcccctggggaaggtacagctcacccaggcagaggtgagttacaccgacccggagctgagcaggactctgtgggagaccttcctgtgcaaggcccagcgctaccgctccctggccggaaacgacctgcgtcccgccattgactttgaggcgctgggctttaccaaggaggagcggaccatcgacggttactcccgttactggctggagtatgtgccccagtccgtcaaggatgaccccagccaggcggtgccgctggtgatggccctccacggcgcaggacagtgcgccgaggcctacgccccctattctgagtggttcaaggtggccgaggaggcgggcttcatcgtggtgttccccacagcatacccctatgcggagaacaacggcatggcccggcccatccacaacgactgctgggaccccacccggcctgacgacatctccttctggcggcagctgatccaggatgtgtcggagcgctattccatcgacgagagccggatctatgccaccgggcattccaacggaggcaactccagcgccatgatcgccggtgagatgtccgatgtggtggccgccgtggccatcagtgccggccgctatcggaatgtggaccagcaggtgactgaggatgtggccaccctccaccctatggccagcaccaaccgggtccccgtgatccagctggtgggcaccaaggatgccggcgcctaccagagccccagcctgacctctaccatgatgtactggctggagcggaacggctgtgaggacctgaacgcccccctgatgtatcagaccagcggataccataaccagatctggtgcgacggggacggcgtgccgatggtccgcttcgccgtgatcgaggacaagccccacaccaccaccccctccgagtcccggctcttctggtatgacttcctctgccactactccagaggcgaggacggcagcgtacagtatatgcaggacgacaccattatccgcaactaaaagaaggagcggggcccgccagcggcgggccccgctccttcttttagggcggcaggagatcgtacatgcggacaccctcagctcccctgctccggggcggcggagagggcgtccagcacctgctgatagacatcagcgccatacagggagagcagatattcctccaccagcgggcagaccttctcccgggcgcgggcccgctcctcctctgacacagggcggacctccatgccctcccgctgaaagatatcctggcactcctccagatagcgggcagttacctccaccatctcccggcaggtatcctccgcggcctgccggagcagggcctgctgctcctccgtcaggctgcggcacacctccagattgagataaatggtctccagatataccttaaagttgatggggatcaggtatttctgctgctggtggaagttgtagctgcgcaccaaatagatggggttctcctgggcatcggccagcccctgctggagggccaggtagaggtcctggatggggatctctaccgtctgcgcccccagagcctcccaaaaccgccggtccagggaggaagaggggatgacgcggaccatcaggccgtccagctggctcaggtcctccactggccggctggaggtgagcacccggctggaggatggcagcacccccaggacgagggtgtcgcccgcctgctggcagatcagatcccacaggggctgacctgggcgcagagcctggctcacctcatcgggagtgcagccggtgagagtggggagccaggtggcgatggaggagacatcgctggggccggccccgatgcgcatgtccaccgccccgttctcaaagtaccaccgcccgtcgtccaaattgcccaaggagtcttcagggtagatctggatctggagctggccctcggaggcctcctccaccttctccttcaggagctgggcagcctgatcggtgaggctgcccgcgggcgaggagtgggtcaggatcagactgcgaggctctggctctccgggcgttccgccggatgcgggggcgaggcggtcaaagagataggtcccctctcccccgccggcacagccggccagtatggaaaaactcagtacagccgtcactaagacggaccagcgtttcatacctctccccctcccctgccggcccattcggtcgaaaattccgggaaaagggcggcgggcacaagcccgccgcccccgcctgccggaccgggccccgggcggtcagcccccggggacgccggtgtccggctcagcacttctcaaagatggtggcgacacccatgccgccgccgatgcacagggtggccaggccgcgcttggcctcgggccgcttctgcatctcgtggagcagagtgacgatgatgcgggcaccggaggcccccacggggtggccgatggagatggcgccgccgttgacattcaccttgctcatgtcgaagcccagctcccgggccacggccacggactgggcggcaaaggcctcattggcctccaccaggtcgatgtcctcgatcttcaggccggccttgctcatggcctggcgggaggcgggcaccgggcccacgcccatgatcttggggtccacgccgccctggccccagctgaccagcttggccatgggcttcaggccgtacttttccaccgcctcgccggaggcgagcacgatggcggcggcgccgtcgttgatgccggaggcgttggcggcggtgacccgctggacgtgcttgcgggtatcggcctcgtggatctgggtgagctcaaaggtatggacgatctcgtcctccactccctcggggcccacagggaaagcgcccttcagcttggagatgccctcggcggtgacgccggggcgggggaactcgtccaccttgaactccaccagctctttcttcttcttcaccatgacggggacgatctcgtcctcgaagcggccggtcttctgggcggcctcggccttctgctgggaggcggcggcgaactcgtccagctcctggcgggtgatgccccacacgtcgcagatgttctcagcagtagtgcccatgtggtagttgttgtaggcgtcccacagtccgtcccggatcatggtgtccaccaccttcttgtcccccatgcgggcgccccagcgctcgtcaggcagggcgtagggggcggcggacatattctcggtgccgccggccacgatgatgtcggcgtccccggccaggatggcccgggcaccctcgatgaccgacttcatgcccgagccgcacaccatgcccacggtgtaggcggggacggagtagggcaggccggccttgacgcccacctggcgggcggggttctggccctgggcagcagtgaggatgcagccgaacatcagctcgtccacctgctccggctccacgccggcccgggacagggcctccttcaccactacggcacccagctcgggggcgggggtgtccttcaggcttccgccgaaggagcccacggcggtgcggcagcaattgacaacatagatctctttcattgggatcgttgacctccattctttcatcaggcgcgccggagcggcggccgggatctcgggatcttcatgctccattatagcgaacttttccgggaacgcaaaggggtttcttgcgaaatgaggcggaaatttcggcaaatcttagcttgtttgtacatcctccgccccggggagggacagcagtcccagctggagcttccagcgcagcacccgcagcaccgactgatccagccggtcccaggtcagcgccccggtctccaccgcctccagcaccgaggggatgcccccctggggatcgctggtgaggaccaggtcagccccggcctggagggccatcaccggggcggtgccctcctccacatacttctgtaccgcatccatgtccaggtcgtcggtcatggccactccttcaaagcccagctcctcccgcagcacttggtaggaggctggggacagggaggcgggcagctccgggtccaggcaggtgacgatgttgtgggagaccagcacaccgccggccccggcgtcgatgcctgcctggaagggcaggaagtcggactggcggaactgctccagggggcgctggtccaccgcaatgccggtgtgggtgtcccggttgctgccgtagcccgggaagtgcttgagcaccgagccgatgcccgcctcccccatggcggagaccaccgtgtccgcatactccgccgtagcctgggcgtcttggccgaaggcgcgggcatagatgaagtcagcggggtcggtggacacgtcgcacaccggagccaggtttacgttaaggcccagatccagcagaaaggcggacttgtccagggcgtcggcccggacggcctccagccctccggcagcgaagagggcctggggggagcggaacttctccgcccggaaggcggggtagtagctggcccggaccaccgtgcccccctcctcatctacccccaggagcagggggatgggggaggtctcctggagggaggcgagcagagtgcgcagctcctccggggtgcggtttttgaagtcccggccgaagaggagaaagcccccggggtgccactcccgggccagctcatcccagccggtctccgggaaacggacccagaacagctggcccgctttctcctccggcgtcatggtgtccaccatggcttggagcagctcctcctgggtggggggctcgggctccggggcgggctgaggctgggcggaagtgccggcctccggcgccggggccatggcggactggctgggctcctggccgctcccctcccctgctggcgcccccgccggtgcgcagccggccagcagaaaggacaggagcagcgcccaaaggaccccccgcctcacggctttttggggagccggtggcgggtgccgtccggctcctggatgagggtgttgtccagctgggcctccagattagcccgcacagcggccacatactcctgacggagggcggcgcgctctgctgtctcctccgccgtcaggccctccggggtcttggccttccgggccagggcgttgatgcggtcaattttttcctgtgtgatcatagcgtatctccttctcagatataccgttccagaaccagcatgaagcggccctttttagactggcccagcacctctttcaccacgcacttgcccagaccccggcaggagagcacgtcgccctcccccaccgtccggtccgccttggcgcactcccggtggtttactgacacccggccggcggagaccaggtccgccgccttggaccgggaggtggagaagccggcggcaagcaccgcgtccagccgcagggcggccaccgtatcccgaatggtcttcacctggggcggcttcgcctccagctgttccagggggatctcccgcagcttcatcttccagcggccggcagactcccactgggagaggaggatgggcagggcatcccgcaggaccagcacctgacagcggccatggtctaacagaatgtcccccagcttttcccgggtgatgcccagtcccatcagggcacccaggatgtctcggtgagacagctccgcgtccgcggggaaggcggcctccagcgcggccaccggcccctccgggtcggcgagaaagtcggattcctcctgccagtcgggcagaaaggcgcacaccgcccgctccgccccctcatatccgccgaaaaacaggtggcgggggcggccccaggcgttgagcagatcggtgacggaggcctgctctcccggggagagaaatggggtgcaggcggggacagagcggttctgggccagctccagcttatccagggcgcgagccagcagcacccgctcctccccgctgcgggcacatttgttcaacagttcggtcttgttcatggaggcctccttttctggtgggtgtagtatatcccatccggccggtggtgtcaacgaggggccgctgctccggtcttgacagggcgcggaaagaagggcagacaggccgcccgccgcgtcccctcccgccagtatgccccagcgggcggctcctttttactctttgagctgatgtaggatataaaaaacctcccgcagtcaaaataagaaataacggagggaggcagatctctgatgacggccttatataaagaaggacggaaccaggagacgtgcaaaatgatcagagatcacaaagaccacatcccggcggctggacaagccagcaaaccgaggtgtggtctttctattgctgagggtgtttttactgtcaaagcgaaggtggaaaaacagagagtatctgtcgctttttgtgattggatattcatctgatggttttaaatttatattcttttatccaatcgattaagttcgaagaaacagtaacggttatcaatgagaaaacaatacgcattatgggaatataggtaagggataatagcagcactacagtatccgtgaacaaataagaacgggataacttccagtgggagacgtgagaaattgttaaagccaaggcgtcatctccaccactggaacctccctgacgaacaattaagccgacgcctacacccacaaaaataccgcctaacacagcggcgatcaacggatgtgcggacaaatcggggagcattggcggaagcagctcccagatcttataaaatacagaaacaaacagtgttgaaataattgagattttgataaagttcccacccaggaatttgaatgcgagcaaataacaagcagcatccagcataggggtaatataagccggagaaattttcagccaatgctcgactaaaagcattaagccaatcacaccgccttctgtgatgttcgtccgctggtgaatgttgtggatcccaaaggtgcagatcatggctccgagtaatatcagcagtattttcttgaaagtcaggccatccgcaagctttttacaaatggcagtcatacggggtatcaatttgagcagcctccttgataagttcatattttcatgctaaaataataaactatatagtaactataaggtcaaggggcttatatgaaaaatttattttccatcggtgaactttccaaactgcaaaacatttctcgccagactttgattttctacgataaaatcggacttttccgtcctgcatatactgatcctgataacggttaccgctattacagttccagccagcttgactatttggatacgatttgcatcatgaaaagaatcggcttttccctcaatgagattaaagcacacatgaaaagttttaggattgaaaattctatcgctgcgctgcgcaaacagctctctaccatcaatcatcagattgaggagctgcaaatgataaaaaaccgcgttgaacatcggtgtctgcagttagagcattctatttccattcgtgattgtagcgatatcgtttccatagaggaagtaagcccccaatacattttgcttcaaaaggtcacggaaccttatacgttggaaatgctcagcattgctacaaaggaatgttttgttcggtcatccaaggagcaacttccaattttctttcagagcggtgcgatcgtgccgtatgaacgtattctgcggggaagatataccgaagcatcgtttgcctttctgtcgattgaaaagtctgataatatcgacggcgttctggaacttcccaaagggcggtgcgtatttacctatcacacaggggactatctttccatcggaagatcctacgaacgcattttagaatactgccgaacccatcacttcaatattgtttctgattcatatgagttcgccatcaatgactacctttccacggccgacgagagcgaatatataacgaaaattttgttctatattgcgtaacagcatactttttcaaacagcagtcaataaagaatagatcttaattcatagagctgaaagaggggacttgaccgcccatcggcgtatcatgtccctgcttgttttccagcggactcctttccaacggtcgtttcgctctgccaatgtagcaggtggtgcaaaccatcctttatacagcaactcccaggtcagcgagctggagggcggacgaggccggagttgacaagcggggggctttctgcaataatattggtgtaaaattggaggtccgcgcccacggcgcgtatcatggaaggagaccgctatggcgaagatcctgtttttgaccgattccgccgccgatatccccaagtccctgcgggaagagctggggatcagggtcatgcccttccccatcgccatgggggagcgggaactgcgggatggggaggatttcaccccgcaggagttctatcaggcgctggcggaggagcccaagatcccgacacatgcccagctcacggcgtaccagttccagcagtgctatgaggagacctggaaagcagggtacacagacctgatctacacatccatcaattccgagggcagcgccacctaccagaacgccgtccaggcccggggggagttctttgaggaccacccggaggcccgggatgccttctccatccgggtcatcgacagccacacctataccatgtgctacggctacccagtggcagagggggcgcggatggctgccgcaggcgcctctgtggaggagatcgccgcctatatccaggactgggtggatcatgtgcgggtgctctttgtctcctttgatctgaagtttgccaaaaagtccgggagggtctccgccgccgcggcttttgtgggagaggccctggggctcaagcccatcatgacctttgagaatggagcctccaaagtggtgaccaaggtgcggggggagaagaacgtgatccccaccatcctggagctggcgcagaaggagcgggagccggggacgccctatctgatcatccgggccgcccggcccgaccaggcggagctgctgaccgagtcctgccgtcaggcctttgggcaggagccggccatggactgcttcattggcggcgttatcgccatcaacgccggacctaatctggtgggacttatctaccggaagaaataaaactggccgcgccgcgggacccgggtcctgcggcgcgccttattttgtcctcccggcccgggcggggcgggaggaggaaagaaagcggggaagagatccccgggatttacatattattcatcctttttgtgataggctggactatgctatggaaaactgaaggtatcgatgtgatactgtgaaggagtggtcgttgtggagagagaacagctgtcctggcaggagcgggggcagttgtggctgcggctgatcatccgcctggtgctggcagcagcggcggtggtgctggtggccaagctggggcctcccctgctgtccctgttcgcccccttcgtggcggcgctgatcgtggcggccctgctcaacccggcggtgcgctggctccagcgcagactgggctggagcaggaagctgctgtccctgctgctggtggtggtcatcttcggggtgatcggcggctgtctgggcatcctgacctatgccgcggccaacgaactggtctccctggcgcagaattggagcgggatgctgacccaggtggagggctttttcgatcagatggaggccctgtttgcccgggcgatggacctgctgcccctgtcggtggtggggacggtggaggacaccgtcaacgccctcatccagcgcctccaggcggtggaccccaccgccctgctgagtgcggccaaggcggccaccgactgggccatgcgggtgccggagttcctgctggccctggtggtctttgtgatggcctcctatttcctcaccgcggactacccctatcaccgcacgcgggcggtccagcacctggacgagagcctgctccgcttcctccagcaggtgaaggccaccgccctggccgccttcggcggctacctgcgggcggagctgctgctgtcggtgggggtgttcttcattctgctggggggattcctgctggtggggcagaactacgccctgctgctggccctggggctggccattctggactttatccccatcatcgggtcgggcaccgttatggtgccctgggcggtggtggccctgtttacccgggatttctccaccgctgtctatctgatggtgatctggggggtggtggccatgttccgccgggtggcggagccacggttcgtgggcgaccagaccggcctgtcccctatcctgtccctggtgggcatctacgtgggcatgaaggtggccggagtggctggcatgatcctgggacccatcctcatcctggtggtgctgaacctggtagggctggggatctttcagggcttttggatggatgtgacggcggcggcccgggacatcacggcgatcctttcccagcggccggagcggaaatgagagggtctgtcaaagttttttcgggaattgttcaaaaaatcccccctctttcttcatgctttcttcatatttagaccgtatccttatttttgtcagaaggggaaagagaggcgctccccccggacacagttcaaatcggcaaggagtgtttgaaatggcaaatcaggacaatgagttcaatttctataatagtgagaatgacgggtaccggggcggcttcggcgggtacaccgattccaaccccaaccagagccagggcgggccggaggccccccaggggccccagaagcacaggggatccggcaggcgcattgcggcgctgatcctggcctgcgcggtagtgggcggcggagcgggcgtgggcggcgcagccctgtactccagcgtcttcgcgtcccagcccagcgtgatctatcagaacacccagcccatctccacccaggcggaccctgtggccagctccagcggccaggccatgaccccggagcagctgtacgccgccaatgtggacgcctgcgtgggcatcacggtgtccaccaccatgaccaacatcttcggctataccagcacgtcggccgcctccggttccggcttcgtcatcaccgccgacgggtacatcgtcaccaactaccacgtcattgaggacgcggtgaaggacagctcggtgagcatcaccgtctcctttcacgacggcagcagctaccccgctaccctggtggggggcgaggaggacaacgatgtggccgtgctgaagatcgaggcctccgggctccagaccgtgaccctgggcgactccgaccagctgaaggtgggccaggccgtgatggccatcggcaaccccctgggcgagctgacatactccctcaccgacggcctcatctccgctctggaccggctcattaccaccggctccggcaatgactccaccacgatgaacatgcttcagaccaactgcgccatcaacccgggcaactccggcggccccctgttcaacagctacggggaggtcatcggcatcaccaccgccaaatacagcacctccagctccggcaccaatgtggagggcctgggcttcgccatccccatcaacgatgtgaagaacatcatctccgacctgatccagtacggctatgttaccggaaagccctacatgggcattaccggcgtgaccatgtcggcctctgtagcgcagcagtacggcgtcaccaacgcggtgctgggtgtctatgtggccacagtggaggacggctcctgctccgccaaggcgggactgcagcctggggacatcatcaccgccatggatgaggacgacgtggtcactttccaggacttggaggctgccaaggccacccatcaggcgggggataccgtgacgctgacggtgttccgtaacggagagaagctggagctgtcccttaccctggacgagcagccccgggagacagtcaccgatacttcctcccagcagcaacagcagcctcagcagaacaaccagtattacggctggcccttcgggggatttttctcctgagcggggagcggccccatactgggaacagaatggtccgggtccggcagccaacggctgccgggcccgtttgctgcatcaaaaaaaccaccggcctggccggtggttttctgatcttgtgagaggcgggcagcgctattctatgtcctccggctggtacagagaggaggggaggacgtcggacagctccaccagcaggggagataggccgccgctccgctccggggcaggggtgctcagggtcagatccatggagagggggccggtgggcagagagacggtggcggccaggccgcctggctcccggcgctccaggagcagcgtgccgccgtggagagcgacgatgtgccggatgatgggcaggcccattcccgccccctctccgggctccgggagcaggtggggggaggccccctccaacagagcggagagctgtccgtcgtccggagtggagccgctgttggtacaggtcaggacggcccggtctccccaacggcgcagggtgagcaggacggtcccgctgggggccgccttagccgcgttggacagcaggcccagcagcatacgggagagcagggccgcgtcgccggggatcagaagtccttcggtgctcgactgatagcgcagctggatgccggcctgagcgagcaggggggcagtgtcctccgctgtgtggcggcacaggccggccagatccatggtcaccggggaaaaggccaccccggactgggacttggtatcccgcaggaactccaggttgttgaccaggcggagcatttgataaaagttgcggttgatggaggccagccgccggtcggtgggagagccggtgccgctcaggtcctgggagaggagctgaaggttgttcagcagcccccccatctgctcgcggagctggcgggcaaagccgtccatctgctggggggagagggcggagtcaggggcggggcggaacaggagcagcacccctccgggggaagagaccttggaaaagacgaacaggccgccgccgccggtgaaagctcccgcagtctgagcactgtccagcggggcagccaggtactggggcggctggtcccccacggccagctctggcaggtgactgagggcggcggagttgagcgcggtgatctttccgtcccgcacctctaccgccgcctgggggagctgctccaaaaagctctgttcttcagacatcccgatcctcctctccgctccaaaaccggcgcagcgcttccgcaataggatttgcggggcggctgattttagaaatggaaaatttcgctgggccggggcgtgagcccggcccggacaggacctagtatatcagaaattcgctgcatcaacaagaacatgggcgcagattctggcgaactgtgtaaatccatggggaaaaagaacagaaggcagggcctactatgcccggaggtggctaatttccacggagaaacagagaaaaaactatgcaaaacacagactaccaaaatcagaaaaaaagggatataatagtggagcgcaaccaaaacttgataaaggagacagttacaatgagcattaaagttggcatcaatggctttggccgcattggccgcatggtctttcgggccagcctggaccaccccgagatcgagatcgtgggcatcaacgacctgtgccctgccgagtatctggcctatatgctgaagtatgacaccatgcacggcatctgcaaggctgagatcggcagcactgagaacgccatcgtggtcaacggcaaggagatccccgtctccgccgagcggaaccccgccgacctgccctgggccaagctgggcgcggagtatgtggtggagtccaccggtctgttcctgacgaaggagaaggcccagggacacctggatgccggtgccaagaaggtcatcatgtccgccccctccaaggatgacacgcccatgttcgtgtgcggcgtcaacctggacaagtacaccactgacatgaacttcgtgtccaacgcctcctgtaccaccaactgcctggcccccatcgccaaggtgctgaatgacaactggggcatcactgagggcctgatgaccaccgtgcactccgtcactgccacccagaagactgtggacggcccctctttgaaggactggcgcggcggccgtgctgccaccggcaacatcattccctcctccaccggcgctgccaaggccgtgggcaaggtcatccccgagctcaacggcaagctgaccggcatgtccatgcgcgtccccactctggacgtgtccgtggtggacctgactgtcaacctggccaagcccgccaagtatgaggagatctgtgccgccatgaaggccgcctctgagggtgagctgaagggtgtgctgggctacaccgacgaggccgtggtgtccagcgacttcctgggtgacacccgtacctccatcttcgacgccgatgcaggcattgccctgaccgacactttcgtaaaggtcgtctcctggtacgacaacgagatcggctactccaacaaggtcctggagctgatcgagcacatgtacagcgtggaccacaagtaagcactgtcctgtttcagggcgccgccatctagcggcgccctgttttttaaaaagagcaggcgcctcacggatgcgccgccccagacagaacagaaaggcgcccgctccccatagggggagcgggcgcctttctgcatcttccgctgtgatttcctacaaaggggccggcgaggagtttgccccctcagcgcgcccgcttaccggggtggcagatgggcgacacggtgggcaagcacccagggggccagagtggaaggaggcccgggctgcggggcaccgctgtatataggctccacctccaccacataagggatcccgtctactgtaatgcggtaaaattccttttttggcatcgcttttgcctcctccgctgtgctgtactggtcgtttgcactattgtatcagagaaaacaataaaattccattcatctttttgaaataatccataatatcaaagttatgaaaatgggatcggtgggctagggactgaatttttgcttcagaaagtcggcgaactgtcgggaggcgcggttcaaataccgtcctttccgatggaccatcacaatgtcacgggtgtgatgcacgtcctcgatatccagaaaacgaatattctcgctgaacagatgccgaaaggaggcagactgggaagcgatggtgacgccggcgttggcgttgatcagctcccgccggagcagatggtcgcactccatgatgtagtggggcgtgatgcccaggtctgcaaagatccggtcggtctgagcgcggaagggcagtcccttcagaagcatgatgaagcgctggtcggtgagctcctccagacggacacttttccgctgtgccaaggggttgtccttatggacagccagcttgaagatgtcccgaagcagcagggtggattcaaatacctccccataaatgcccggggaggtgaccgccagatcgatttgaccccggttgagcagcgcagcgatctccttgttttctgcgacccgctgattccacttgtagttggggtgctggtacatgaaggcgtgcatcccctgaagaaactgagaggaggagaccgccagggaaatggagttgtccccctcatcggcaatgtcctggagctccctctttgagttctccacctccatcaggatatggttgacccgctggagaaaccgctgtccattctggttcaagatgatagaccgtccattgtggtcaaagagcggaactcccagctccttctccagtctggaaatcatcgtactcagggcaggctgggagatattgagttcttctgccgcccgggagatatgctggtaataggccgcggtctgaaaatagcggagctgggtcagttccatgatatgtccctccagatccataatttttatcttatactaatataaaaaatcgataattgcaatatgcgttaaaacagattaacctaaagaaaaaagaaaaatatttgatttttgttggattgtgaccaaaggcgcagcagagaggaggaccttgtcgtgggcgaaaaaacaaagcttcaagagatgcttgagaaaaaggaaaagatcagacagggagggggagaaaaaaaggtcgcgaagcagcacggcgcgggtaagctgacagcccgggagcgcatcgacctgctgtttgatcccggtactttccaggagtacaacatttttatgaagcaccgctgccatgactttgggatggagaaggtagacacaccggcggaaggggtggtgacgggatacggattgattcatgggagaggggcctttgcctttgcccacgactttacggtcctgggcggcgccatgggggagatgcagggcatgaaggtcaagcggattcaggagctggccatggacgccggcgtgccgctgatcggcctgaatgactcggggggcgggcggatccaggaggggcctgccacttcctatggggccatcttcttcaacaacgtgatggcttctggggtgatcccccagatctcagccatcatggggccctgcgccggcgggaccgtgtattcccccgcgctgaccgacttcattttttccgtggacaagaccagccgctcctttatcaccggaccgcaggtcatcaagaacgtgaccggggaggtggtggatgcggagaagctgggaggagcgcggacccataatacggtgtcaggcgtgtctcactttttctgtgcggacgaccgggactgcattgagaagatcaagaccctgctgagctacctgcccccaaactgccgggagatgccgcccatcatgccctgcggcgactctccggaccgccgctgtgagatgctcaacaccttcattccggataacctgaaaaaggcctacgatatcaaggatgttatccgggagatcgcggatgggcacgagttttttgagacccaggccatgtatgccaccaatatggtcaccggatttatccgcatgaacggccggtcggtgggggtggtggccaaccagcccaaggcgatggcaggctgtatcgacatcaacgcttcggacaaggcggcccgttttatccgcacctgcgactgcttcaatgtgcccctgctgtccattgttgatgtgcccggatacatgcccggcaccaatcaggagtacggagggatcatccggcacggggcaaagatgatctacgcctgggcagaggccacagtcccgaagatcgtgatggcggtgggaaaggtcgtgggcggcgcccggcctgcaatgtgctcctgggagcttcggccggacttcattttcgcctggcccacggcgcagatggtagtcgtgggggcagagggggctgtggacatctgccggaagcacgagctgaagcgggctgaggagagcggtgaggatgtggctgccctccgtgcccactacatcgaggagtacaaggaagaattttttaacccgtataaggcggcggaatatgggaagtttgaggacgtgatcgagcctgcggagtcacggcgggtcatcatccggactctggagctgtttcagaacaaacaggtggtcctgccagccaaaaaacacgggaatatgccggtctgacggcggcgcggaaaggagcttggttcaatatggcggttggatacggccccctgagcggggtaacagtggtggacctgacgcagtttttgtccggtcccctggccacgatgatcatggcggacctgggggcggatgtgatcaaggtggagcggccggaccggcccaaggccagcggcccgtttctcaacggggagcgggtctacgacctgtcggtccagcgcagtaagaagagcatcaccctgaacctgaaggcggagacagataagaaggtgctgctggagctggtgaaaaaagcggacgttctggtggaaaatttcaaacccggcacgatggagcgcatgggcctgggttatgatatcattgccgcagccaatcccaggatcatttatatggcggtctccggctttggctatacggggccataccgttccagaggcgcgctggatatgatcgttcaggggatgagcggactgatgagcctgaccggtgagccggatggcccggccatgcgctgcgggacctcggccagcgacgtgtttaccgggctgtatgccttcggtgccatctcggcggccctgtatgaccgggaaaagaccggaaagggacagtttatcgatgtggcgatgctggatgccaccttctcctgcctggaaaacgcggtgatcaatacctgtgtctttggcaccgatccccagagggtgggcaacagccaccccaccagcgtccccttcgggacgttccccacctccgatggagagatcattatcacctgctcccgggatcctgcattttacagtctgtgccgcgccctgggacgggaggatatggtggaggacccgcgcttctccaaggcggaggccagacgccagcacaaggcggagctgactgaggagatctccagatttacccgggcccgcacactggatgaatgcgagcggatctttgaggctcacggggtgcccaatggccgcatcaacaccatgaagatgatctgtgcggaccctcagatcgcggcccgcaatatgattgtagaggtggagcacccggtggctggaacgtatcggatggcgggcagcccgctgaaattcggaaattacccggataccacctatgagcccgcccccaccctgggacagcatacccgggaggtcctggcggagtacttaaaaatgccggaggaggagatcgaaaccatgctgaaggagcagaaggagctggtgcatacataagatggcgggcggagcgcgggacaggggaccggcctgtggaatggaagattttgttttgtgcctgacgtgcggaatctggtataatccgatgcgtattttgtggataaaagcaaaaggaggtatcgagctctgagctgtgcggaccagcaaagatcatagataagactagagggaggatactatgaagataaaagccaaaaccggagatctcgcactggggatcttttcgattctgggcggaatcatcatcctgatcctgacaaaggtgcagggacttcagctgataaagagcggacagatggggcccggttttttccccacaatctgcgggatcgccatcgcgatctgcggggccatggtccttctggaggcggcgcgccggatcgcccgcgccaaaacggcccaggcggagaaggaagaactggagacaaatatcctgaacctgacagagctgaagaatctgttgctttttatgctgctggggactggggtactgctgctctccgactatctggggctgctgacctgcctgggactgagtgtgatcgcctatttgaaaatatggggccgagaaaagtggatcaagtcgatcgtgatcggtgtatgtatggtggcgttcctgtacggggtctttgtcctgttcctgcatgtgccggtccccaaaggtccgctgggcttttaaggaggaggtacacatatggacttgctgcataaccttgcgctgggcttctcagtcctggctgatcccatgaccattgtgtactccctgatcggcgtagtgtgcggtgttatcatcggtgcgctgcccggtctggggccttcggtgggcatcgcagtgctcctgcccatgtgctacggacttgatccggcctgtgccctgtgcatgctgtgcgggatctactacggggccatgtacggtggttccattacctccatcctgatcaatacgcccggtgactctgccgccattatgacgaccctggacggatatcccatggcgcggcagggaaaagcagggaaggccctgggcatgtcctgtctggcatcggtcatcggcgggacgatatctgtggtgttgttcatgtctctggcacctgtggtatccaattttgctacaaagttcgggccgtccgaatatttcgccctgatggtgctggggcttacctctattgcgggcatgacagggaaatctcctgcaaagggttttttggctgcgtttatcggcctgtttgtggcggggatcgggattgacctgatctttggtactacaaagttcgtattcggcaatgtaaacctctactccggcattgactttgtgccggtggccatgggcttgtttgggatcgcagagatcgtatgcaactattctgacaataatcttaaagtggataaggggagcctgaaggtcaaaaatctgctgcccagcagacatgagtggaagctgtccctgccccacatcggccgggggacgattttaggctttattgtggggatgctgccaggggcgggtgctacgatcgcttcttttctctcctacgacatggcaaagcgcacctcaaagcggggagaggagttcggcaccggtgtgatcgagggtgtggcggccccggagtgtgccaacaacgctgcctccatgggggccatggttcctatgctgaccttgggcgtccccggttcgggcgcgacggccatcatgatgggtgcgctgatgatgctgggcatctcacctggtccctccttctttgtgaatgaggctgacgttgcctggggactgatcgcctccatgtatctgggaaatgtcattctggtgtgcattggtctcggcgcgctctccctgttcgtgcgcatcctgaatgtaaagacctccaccctgaacgcgctgatctttgcattcattctggtgggcgcctatgcgctggagaactccatgttcactgtgggagtgactcttttcttcggcctgctgggttatatcctgaaaaaggtgggggtccctgcggcacccatggtgctggcgctggtgctgggtgcgatcactgagaccaatttgagacaggcgctgatcattgacaacaacaattttggagcggtcatctcccatcccatttccgcggtcatcctggtgctggcggtcctgctggcgttcggcacccccatcaaatccctgatcacaaaactgtgggcaaaaaagaaagcgtgaccggcgttgaccttatgtatgatcgggcggtgcccggttatataaaatgaaaaaaggagaaaaagaaatgaaaaaattgcttgctctgattttggcggccgcaatgtcgctctctcttgcggcgtgtggaaacggtagcacctcctctggcggagggagcacatcggagcccgccggaactcccgcggcatcttcaggggaggagaccggatgggtccccacagaggacattgaatttgtgatccccttcggcgcgggcggcggaaatgacgttatggtccgaaaaatcctggagatcgttgaaaaatacgatatgtgtccggtgaatatcgtcccggtgaacaaagaaggtggttccggagtggtaggctatacctatctcacctccaagggcgccgggtatgagtacgcgctggcctccacatccgccagcttttacacccagccgctgacgggaaattctccctttacgccggacgaaagcacgttttccttcgtggcacatatggtaaaagaccctgtggtgctggtggcccacccctcctacggtttcacatgtatccaggatgtggtcgactatgccaaggagcaccccggtgagctgaaatggggcggtgtcggcaacgcatctgacgacgcgatcatcatgtatatgctgaacaatatcgccgggatcgatctgacctatgtgccctatgacgatgggggaatgtgccaggcggcgctgctgggcggacacatcggcctgagcaccgtctctctggcagaggcggaggagcacatggcggcaggcaacatggtggcgctggccgcctgcgcggatgagcggtttgacgcgatccccgaggtccccaccgcggcagagcagggctttgacatcggccatcagcagagccggggcatcgtgatgaacgccggcgtgcccgaagaggtgctggcctattattccgacctgttccagagagtctctgaaacagaggactggatcgagtatgcagagtccaacgccatgacggtgtcctttatgccttatcaggagttcgcagcatatgccgctgagatgctggaggactataccacctacctgggcatgatcccccaggattgatccagggctgatctacctggatctggatgcagggccggcccctctttttgatggggccggccctgccgttttgcgccgcccccttgcattgggtgcccaaatccgctacacttatttatcatccttatcatcatccgggaagggcagagggggcagagggcatggaccatgaggcatatatgcggcgggcgctggagctggccgctcaggcggcggagcagggggatgtgccggtggggtgtgtcatcgtccgggacggggagatcgtgggagagggacgcaaccgccgggaggagaatggggacgccaccgcccacgcggaactggaggccatccgggacgcctgccgccggctggggagctggaggctgcaccggtgcactatgtatgtcaccctggagccctgccccatgtgtgccgggggaatcatcaacgcccggatcggcaccgtgcgctatggggccaaggatgacaaggcgggggcctgcggatcggtgctcaacctgttcgaggagcggttcaaccaccgtcccaggctctatcggggccccatggaggcggagtgcggccgtgccctgcgggcctttttcgaggacctgcgggaaaaagacggattttcggaggagatttaatccttttgtaacatctgcgggtgacttatttaataaaaactggatattataatacttgcaaggcaagagcatcttttcattctatcctccaattcttttggaaggccgacaggggactgtcggcctttcctctttttccacggctgcgggagggaagggagaaaaaaccagtgcgatttaatggttatgtaacatttgccccttcatttcttaataactccagggtatcttgatacttgcaagagacagtttgtttcattttaatcctctttttcagcagaaagtcccgagcgctttggagcaggcgttcgggactttctgtttttctgcatagatttccagatccaagggagaatacagggggaaaggagggcgcatatggctgaacagaagcaggatggacctcacccccgccgggagcccagatttcccggtcccctgaccctggagggagtggagcagatctttgagggctgctccgactttgcagaacgcaccgcgctgctgcataacgacccacagaggcaggtgaccctctgctatatcaacggcatggtgcggggggagcggatcaacgactatctgctgcggccgctggcccaggacccgcgcctgtctgcggtatctgaggcggaggcattccagctgctgggacagggggcgctctataatttatatgtagagcgccgcaccacgctggaccaggcggcggtggatctgactatgggctggtgtgtcctgttctttcccgggcggatggacgcactctctttcttcgtagggacagaggaaaagcgggcggtggggcagtcggagaacgagcccgccctgaagggggcccgggactcctttgtggagtccatcctcaccaacacctccctggtccgccgccgcctgcgggcgccggagctgaaggtccggcagcatgtggtcggacggcagtccctcaccccggccatggtggtctatctggacgggatcgccgacccggacacggtgaagcgggtagaggagaagctggacgccatcgacatcgacggggtggagtcggcagggaacctggaggagtacctcaccgatgcgtcccggaccccctttcccctgatgccgttcacccagcggccggaccggttctgcgccgggctgctggaggggcgggtggggctgctgtgtgacggcctccccttcggctatctgctgccgggcaccatggaccagttcttccggaccagccaggaccgggccttcaactggatgactgcctctatgctgctcctgctgcgctatttctgcatggcggccaccctgcttatccccgggctctatatcgccctggtgaccttccacccggaggccatcccggtgaagctggccctgtccatcgtggcggccaagcaggaggtccccttctctactgtctttgaggtactgattatgctggtagccttcgaggtgctccaggaggcggggctgaggctgccctctcctatcggagctactgtgtccatcctgggcggcctggtggtgggcaacgccgcagtggaggcccacatcgtctctccggcggtgctcatcgcggtggccattgcaggggtggcgggatacaccatgcccagccaggacatggcggccgccctgcggctgtggcgcttcctgctggccatcctggccagcctggggggactgttcggcctggcgatgggctgtgcggccctgatctgccatctggccgggctggagagcttcggcgtgccctatttggcgccgtttacgtccgcagcaggacaggagcgggggagccctgatctgatccggctgcccctgccctggatgaagtggcggaacggtgcggcgcggtcggccaaccggaggaatcagcgatgaaaaaagttttagcagcggccctgtgcggcgcggtgatgttcctgctcccaggatgcggcggggagcggcttccctatgcccgggagatgggggacatggccctgatgcgcaccatgggagtggacacgggggagggcggagcggagcagctccatgttacggtgtccagcggccgccgggccagaggcttgcagggggaggcggagccgcccctggtcctctctgcggagcgggagtccatcagcagcgcctgcctggccatgcaggggctgagtgacagctatgtgttttacggacatgtggaccaactgctgctgggggaggagctgtcccgccggggcatcctggagaccctccagtacttcagccaggaccaggagctggggatggggacccaggtctggatcgtccggggaggtacggcggcggaggccatctccgccgagcaggagcggggggtggagagccgcctgtccaccatccaaacggacagtgaaatggggatggcggggatgaccaggaccgtgggggagaccctgacgtccctgatggaggacggttccgcctatctgcccgggctggtccccggggaggacggcgcactgctggaggcgggatacggagtggtgaaggacggcatgctggcgggctggctcaccggagagcaggcccggggcctggagctggcggccgggcaggtcggggcggacatcctggagctggaaaccaggggaggaggcgccgcagtccgggtgacagcggtatcggtgagctgtgtgccggagttttccggcgagaggctgactgggctggagctggcctgccgactctctctgcgggcggaagagagctggggggaaccggagccggcagagctgtgtgcggcggcggaggagcgggaagcggcccggatctcagcggcgctggagcagctgaagggctggaacgcggactgcctgggcctggccaggcgggcgggccagacggagagcgcccgctggaacgccctccgggcccagtggccggaggtgtttccggaactggagatccaggtgacagtacaggcttcgctgctggcggcctgaggagggaaaagggattgaaacaggagaaggtctcgttccggcagttgatggcgctgctctgggccgggctgctggggccggcggcggagtggctgccttccatggtcacagagcgggcagggccggccgggtggctggtacccctgctggccctgccggtgctgctggccgccgggtggctggcgggctccctgagcaggggagcaggggggctgagccagggactgatggacagcttcggacccggggcagggagagcggtgctcacgatctatattatatggatggaactgttgctggccctgcggctgcgtctgtctgcccagagaatgatggcggcgggggagagggacggcgcactctggtttttcctgccggtgctggtcctgatggccctctggatcagctgggggaaggcggggcggctggcccggaccggggagctgtttttcctcctgctggccgctgccgccgccgcagtggtggggttggccctgttccaggtaaagggagaaaacctcctgcccctgtggacagagcccgccgcgcagaccttgtatgccgccctcccggtgtcaggggtgctgggatacggactgtatgccgccttcctatatacgcctgaggagggggggagagagggcgggcgctgggtccggtggtgtgcggggggctgtctggccctgtgcgggacccagctggtcatcctgggggtattcggccccgcactcacggcggagctggaaagcccgttttttcaaatggccaagagcgtaggggtggagggggcgttccagcgggtggagagcctggtggccgccgtgtggagcttcagcgacttgatcctgctggcggggctgctccagggcatgaagcggatcgtgggggtcctcctccccaaggcgagcccccacgcagccgccgtgatgctgctggcctccgccggggtagtggggctggcggctttccctaacagtgcgattccagaagcgctggggagaggagctgtgctgtgggggaaccttctgctggcccttgctctccctctcctggcagtcgtggtgaaatggtttcggcactgagtcaggatgcacctacatcttgtaggttaaatgaaggaaaaatccgaagatatagtaccgtaaaagaaagaggaaaaaataaggaagaaaatcgaaaaaaggtgttgacatttggcgctgggtttgctatagtaagcaagcgctttgcgagacagcttttttgtagagaggctggacggcggaagtgcggttatcacaagggaagcgaagctgaggactttgaaatcgactgagaagttcgaaaaaagttcttgacaaagcgagaaagatgtggtaacatatcaaagttgccgaaaggcggcgggcgcacagcgctgcggatgagagaacaaaagagcttgaaaaaactcgaaaaaagttcttgacaaagtgaatgagatgtgctaaaatttaaaaccgccgctgaaaagcgagcgggccgcgcaaaaacaagttaaaaagaatttgaaaaaagttcttgacaaacgagtttgagtgtggtaaaattaaaacccgccgatgaacggcgtgcaccttgtaaattaaacaacgtaacgaaaacacgaagcaccagatttggatttggttgttcaaacaagcttgagcttgaaggacgaccgttaaatttctttgaagctggaatgagcttcaataaagtgatttgaagagcctcggctctttagataccattttattgagagtttgatcctggctcaggatgaacgctggcggcgtgcttaacacatgcaagtcgaacggagtgccttagaaagaggattcgtccaattgataaggttacttagtggcggacgggtgagtaacgcgtgaggaacctgccttggagtggggaataacagaccgaaaggcctgctaataccgcatgatgcagttggaccgcatggtcctgactgccaaagatttatcgctctgagatggcctcgcgtctgattagcttgttggcggggtaatggcccaccaaggcgacgatcagtagccggactgagaggttggccggccacattgggactgagacacggcccagactcctacgggaggcagcagtggggaatattgggcaatgggcgcaagcctgacccagcaacgccgcgtgaaggaagaaggctttcgggttgtaaacttcttttctcagggacgaacaaatgacggtacctgaggaataagccacggctaactacgtgccagcagccgcggtaatacgtaggtggcaagcgttatccggatttactgggtgtaaagggcgtgtaggcgggaaggcaagtcagatgtgaaaactatgggctcaacccatagcctgcatttgaaactgtttttcttgagtgctggagaggcaatcggaattccgtgtgtagcggtgaaatgcgtagatatacggaggaacaccagtggcgaaggcggattgctggacagtaactgacgctgaggcgcgaaagcgtggggagcaaacaggattagataccctggtagtccacgctgtaaacgatggatactaggtgtggggggtctgaccccctccgtgccgcagttaacacaataagtatcccacctggggagtacgatcgcaaggttgaaactcaaaggaattgacgggggcccgcacaagcggtggagtatgtggtttaattcgaagcaacgcgaagaaccttaccagggcttgacatcctactaacgaagcagagatgcattaggtgcccttcggggaaagtagagacaggtggtgcatggttgtcgtcagctcgtgtcgtgagatgttgggttaagtcccgcaacgagcgcaacccttattgttagttgctacgcaagagcactctagcgagactgccgttgacaaaacggaggaaggcggggacgacgtcaaatcatcatgccccttatgtcctgggctacacacgtactacaatggtggtaaacagagggaagcaagaccgcgaggtggagcaaatccctaaaagccatcccagttcggattgcaggctgaaacccgcctgtatgaagttggaatcgctagtaatcgcggatcagcatgccgcggtgaatacgttcccgggccttgtacacaccgcccgtcacaccatgagagtcgggaacacccgaagtccgtagtctaaccgcaagggggacgcggccgaaggtgggttcgataattggggtgaagtcgtaacaaggtagccgtatcggaaggtgcggctggatcacctcctttctaaggagaactcagcagacgatagtttgctgcagtgtcctaggtcagtaatggtggagcgtaaagtcgttacgttgtttaatttagagggcgcacgctggagggcggcgaaccttacgggcccatagctcagctggctagagcgcacgactgataatcgtgaggtcggtggttcgagtccacttgggcccaccactaaaaagctctgaggtatgggggtatagctcagctgggagagcgcctgccttgcaagcaggaggccagcggttcgatcccgcttatctccaccaagatcggattgaagtgtttgggcaatggtccgagcatttcaatctgaccttgaaaaaggttggaagcctgcaccttgaaaactgaacagtgaagcaagcaagaaattgcgagcaagcaacagagaggtaacaaagtaaaatttgtggacttttaaataaagggtaacacaaactacaatgaaccaaatctgaagcctgcataattctaaaatgacgatagagaacagctgaaaggttgttctacgaaggtcaagctagaaagagcgcaaggggaatgccttggcatcaggagccgatgaaggacgtgacaagctgcgataagtctgggggagctgcacataagcattgatcccggaatttccgaatggggaaacccggcggagcaatactccgtcaacctgcgttgaacaaaataggcgtaggtagggaaccgcctgaactgaaacatctaagtagggcgaggaagagaaatcaacagagattccgctagtagtggcgagcgaacgcggaagagggcaaaccggtggatttattcaccggggttgtggaccggcgcacggcagaataagttagctgaacggtatgggaaggccgaccatagcgggtgatagtcccgtaagcgaaaactgagttctgtcagctgggatccagagtaccgcaggacacgtgaaaccctgtgggaaaccggggggaccaccctccaaccctaaatactacctgatgaccgatagaggagcagtaccgtgagggaaaggtgaaaaggaccccgggaggggagtgaaatagaacctgaaaccttgtgcttacaagcactcaaagcacgttaaggtgtgatgaggtactttttgtagaacggtccggcgagttattgtatgcagcaagcttaaggtgttcagcaccggaggcgaagcgagagcgagtctgaatagggcgtatgaagttgtatgcaatagacccgaaaccaggtgacctatccatgggcaggttgaagtgggggtaaaaccccatggaggaccgaaccgacccccgttgcaatggtggcggatgacctgtggatagcggagaaattctaatcgaacttggagatagctggttctccccgaaatagctttagggctagcgttgatttagattaccggaggtaaagcactgaatgggctaggggctgataaagttactgaaccctatcaaactctgaatgccggataattgatgatcagcagtcagtctacgtgagataagtctcgtggacaaaagggaaacagcccagacccacagctaaggtcccaaagatacgctaagtggaaaacgatgtggaattgcgaaaacaaccaggatgttggcttagaagcagccactcattaaaagagtgcgtaatagctcactggtcgagtgattctgcgcggaaaatgtaacggggctaagcgtaacaccgaagcttgggatgcagcaatgcatggtaggggagcgtcgaatacggggtgaagtcgcagcgggagcagcggtggactgtattcgagtgagaatgccggaatgagtagcgagaattatgtgggaatcataatggccgaaaatctaaggtttcttggggaaggttcgtccgcccaaggtaagccgggagctaaggcgaggccgagaggcgtagtcgatgcacatacggttgaaattccgtagccaccgaaacttaagctagaaggacacttggagctatccagacccgggcgttggttgacccgggcgaaagggaccgaaaataagtagggaagctggagaatgacgaggcgagaaaagttctagtgtatgctaaggtgcccgtaccgcaaaccgacacaggtagatgaggagagaatcctaaggccaacgggagaagggttgttaaggaactcggcaaaattaccccgtaacttcgggataaggggagctccctaaggggagccgcagagaataggcccaagcgactgtttaccaaaaacacaggtctatgctaaatcgaaagatgacgtatatgggctgacgcctgcccggtgctggaaggttaagaggagggcttagcgcaagcgaaggtctgaattgaagccccagtaaacggcggccgtaactataacggtcctaaggtagcgaaattccttgtcaggtaagttctgacccgcacgaatggcgtaacgatttgggcgctgtctcaacagcccacccggcgaaattgtagtaccggtgaagatgccggttacccgcaactagacggaaagaccccatggagctttactgtagcttaatactgaggattggtaaatcatgtacaggataggtgggagacatggaagcctgggcgtcagctcaggtggagtcacccttgggataccacccttgatttactggttttctaacctgcggccgtgaatccggccgggggacactgttaggtgggcagtttgactggggcggtcgcctcctaaaaggtaacggaggcgctcaaaggttcgttcagcacggacagaaatcgtgcagtgagtgtaaacgcataaacgagcctaactgcgagaccgacgggtcgagcagtaacgaaagttggagttagtgatccggcggtatgtgagtggaaatgccgtcgctcaacggataaaagctaccctggggataacaggctgatctcccccaagcgtccacagcgacggggaggtttggcacctcgatgtcggctcgtcacatcctggggctgaattcggtcccaagggttcggctgttcgccgattaaagtggcacgcgagctgggttcagaacgtcgtgagacagttcggtccctatctgttgcgggcgtaagagatttgaagggagctgtccttagtacgagaggaccgggatggacagacctctggtgcaccagttgtcctgccaagggcacagctgggtagctacgtctggacgagataaacgctgaaagcatctaagcgtgaaactctccctaagattagatctctcatcctttatggagtaaggctcgacgtagactatgtcgttgataggtcggaggtggaagtgctgcgaggcatgtagctgaccgatactaataagccgagggcttgaccttaaggtcaaggaagaagaatgcaggcgcttgtgagcgaaggaaaagcgagtttcactgttcggttttgaaggcgcaggagatgcacctttagctcagttggtagagcaactgactcttaatcagtgggtccccggttcgaatccgtgaaggtgcaccaagtggtcctgtccaggacgctgggtgcgtcctgggcggggactgctgaaagaggagcgacgatggcccgttggtcaagcggttaagacggcggcctctcacgccgcaaacatgggttcgattcccgtacgggtcaccaaatttctcttgacaaatcaaaaatagcggatataatacttactgttgggaagacggtaaggagagaaaaggcgcaagaacttttctttgcttactttcttttcggagaaagtaaagtaggtgctgattagagcgagggtccacccgttcccattccgaacacggaagttaagctcgcttctgccgaagatacttgcctggagacgggctgggaaaataggtagtgcctacacaagggtccggtccaaccgggccggaccctttcacattcctcaatagctcagtcggtagagcatgcggctgttaaccgcagggtcgttggttcgagtccaacttggggagccaaaaatgcggcttgccgccacttgctcgtgacggcaagccgtaatttcaaaataacgtgtgaacggttaatgggcctttagctcagttggttagagcagccggctcataaccggccggtccacggttcgagcccgtgaaggcccaccatataggggtatagctcagcaggtagagcagcggtctccaaaaccgcgtgccgagggttcgattccttctgcccctgccagagagttgcagagtgatctgtttttatattgattaaatggctcggtagttcagttggttagaacgccggcctgtcacgccggaggtcgagggttcaagtcccttccgagtcgccatttaaaaatgtcaggttttgcctgttgctgatataacccccattgggggaacgtatgctgctatagctcagtcggtagagcgcatccttggtaaggatgaggtccccagttcaaatctgggtagcagctccacatcggagtaagcgatacaaagcttgctccgatttgttttatagagagcgtgctcagtcgttgcgcctccttattccagcggagtgcggtttggtttgtggtttaatgtacccgaaagaccggaattattttacgaatcggtctttcgggtaaaaatttggattttcggaagggtgtcctcaaatagaggataccctttatgtattcagcgaaaaaaacacggaaacagaaccaggaaaaacggtcagaaggaaaagaagaaggacagccgcaatgatcaggagcagaagggggagaatgtggctgcggccagacttgctggagcgatgggtgacctgaatggaaatatgagtcgtggccggagaactgggaggctcctcactctttacagaagtaagggactctttggagccctttttgagagaggaagtagggggattcataatttgagtcatcctttcctgtatcaagtaattgtctgccagtatctgaaagagtgcatcttgtctgggaggcacgcaaaacaaaataccatgaaaaaagggggaagtcaaaactaaaatttaacaaaataggggagggagtctgtgtgaccctattcatgaataagaaatctgtgcagaacgtaaaatttatttttctgatagactgaagaaatataaaggaagctttggtaaaaaactgggaaatagacacatatgagagaggcacatgttaccatcgtaatccaaggagggacaattgtcttttaaaagaaaacaaacaggggaaagcagtagttcttgtgaaaatgccgagaaacaaaaaatctggagcccgtagaaagtatattttgccggctgcgctttagaaaacaggaaatcggcagggaggggcaaggggcttcagagaaggaagatagggcttgacttggcggcaatatgccagggagcagcgtagacgcccgggcttgggcgtggtacaatagcgccaaacgggatgtagagggggacggagaccatgcggaagatcatgatcgtggaggatgacccagccatccgggaggagctggccctcctgctggagaatgagggctatcaggctctggcggtgacggattttggggacgtgccggggcaggcggggacctttgggccggatctggtcctgctggatctgggactgcccgggcgggacggtttctccctgtgcgccgagcttcggagacgatgcccggtccccatcgtggtggtgaccagccggaactcggcggcggacgagctgcgggcgctcagtctgggcggagacgactacatcaccaagccgtacagcatccccattctgcttgccaggatcaaggcggtgctgcgccgcagcggaggtccgtcggagccggacatcctggaggctgggggagtgcggctcagcctgtccagggggaccgtgtgggcaagtggacggaccgcggagctcacccggaacgagctgaagatcctggcccacctgatggcccacgccggggagatcgtgtcccgggcagacctgatcgaggcgctgtgggacagcaggatctatatcgatgacaacaccctcagtgtcaatgtgacccggctgcggaacaagctgggggagctggggctgccggagcagatcaagacccggcggggaatggggtatcagtatgacgatcgctgattttctgtccgaccggctggggcggatcgtgctccagggggggtgcgcggcggccgccgccctcttcctgctggccaccgggacacagcccggcgtggtggctctgctcctgatggggctgatcctggtctttgtgctggcgcagctctgggagtgcgtccggctccgccgccgcttggcggagctaaaggccattatggaggggctggaccagaagcagctgtttgcggagtgtgccccaaagccggaagggctctgggaacgggagctgtttgccctgatgcaccagtcgggccaggccatggtgggcgcggtgtcggaggcgcaggcggcccagcgggagtatcgggagtatgtggaacagtgggtccacgagatcaagacccccatcacggcggcccgattgatctcccggaccgtagggccggatacccggcgcaggctggagcgggaactggcccagatcgacgcccacgtggagcgggccctgttctatgccagggcggagagtccggaaaaggatctggtgatccgggagaccagcctggaggagctggcggaccaggccctccagagccacagggccctgctgatccagagcggggtgcgggtggagacccgggatctggatcagagggtctacaccgacgggaaatgggtatgcttcctgctggggcagctgctccagaacgccgcccgctaccgcagcgcccagcctgttgtcaccctgtccgcccgggcactggggaggcgggtagagctgacagtggaggacaacggtatcggcatccccgcccatgagctgccccggatctttgaccggggctttacgggcagcaacggacgcagccggggcggctccaccggaatggggctgtatctggcccggaggctggcgactgccttggaggtcgagctgcgggccgcctcggaggagggaaaggggacccggatgaccctcctctttccggcccgggagaacctttcaaaattgtaagctgaggccatagaaagccgataccagtggggccggtcttgcagtatcctgtaagggacagcaaaggaggaaatcaagatgctgcaagtacggaacatcgaaaaatactacgggagcaaaaacaatgtgaccaaggcgctggaccgggtcagctttgaagtggatgacggggaatttattgccatcatgggggcgtcgggcagcgggaagaccaccctgctcaactgcatctccaccatcgacaccgtcagcgccggggacatcctgctggacggggagagcatcgccgccctcccgccccgggagctggcccggttccgccgggagcggctgggctttgtgttccaggactttaatctgctggataccctgacactggaggaaaacatcggcctggccctcagcctgaaccacaccgacccggagacggtgcagcgccgggtgcgggagatggcggccaggctggagatcatggatgtgctggagaaattcccctatcaggtatccggcggccagaagcagcgggcggcctgcgcccgggccatggtggccggacagtccctgctgctggccgacgagcccaccggagcgctggattccaaggcatccaaaaacctgctggaaatcatgaccaggatgaaccgggacatgggggccaccatcctcatggtgacccatgacgcatacagtgccagctatgccgcccgggtcctctttctgaaggacggccggctgttccacgaactgctccgaggggagcgggggcgtccggttttttaccatgagatcctggacgtgctggctctgctggggggtgatgtcagtgacgttatataagctttcctggcgcaacgcccggcggcaggcacgggactatctggtgtatttcgtcaccattgtgatggccgccgctctgatctatgccttcaacggtctggtcttttcccgggagatcgccgatctgtcggaaaaactggcttctctgcccctgatgatcgtcctggccagcgcggccgcagtgctcatcaccggctggctggtctcctataccaccggcttcatgctctcccgccgcagccgggagctgggcacctatattttgatcgggctggagcaccgtcaggtggcccggctgttttttctggaaaacctggcggtgggcggcgcggctctgctcctggggctggcggcgggggatctgctgtttcaggcattgagggctgtgatgctggctctgttcggcgcgccctaccgggtctccctggcgttctcgcccccggcggtggggctgaccctggtctattttctgttcatctacctctttgctctcttgaaaggccggaggcgcatccgaaggatgaagatccggaagctgatctacctggaccgacggaacgaggaggaagtcatcgaaaagagccggagccgccggcggatctttgttctctcggtgatcctgggggcagtggggacccttctgctgctgatgggcgggatgctccccagcctgctgggcacggggtgcgtcatcgccttcctctacgggttctttctcagctttgcctcaggggtccccgccttttttgaaaggcgtccggcgaaaaagtacgctgggcagactctgctggtcttccgcactctcaccgccaagctggccaccatggggatcgtcatggccacggtctctctgctgttcaccgccaccctgatcgtggaggggagcgggatgaccttcagcgccatgtttcagagccggatggaaaaggcatccgcctttgatctgtacatcggcacgaaaaacgaggctcatctggatgcctatcaggaccagatccgccgctctgttccagtgacagcggtgcggcggtacgcggtctatcagggggaggacgcccaggtcaccgactatctggtggaccacgccagctaccacaagttttccagccgggacatgctgatggcattcagcgactatgccgccctccgggccatgaaggggtggcccgcagtgactctggaaactggggagtatctgatccactgccaggactatctgggaccgtccctggcggactaccggcagcccatccggatctccggccagacactggagctggcggggatagagacaggcccgctgaatcagaatctgtgggatgccaatggacacggttttgtgctggtggtgcccgacgagctggcccggaactgtccagtcagccacggcgccatagccgccatgacagagaaaccggtgagtggggaacagtttgcggggctctgtgccatccgggaccgctatgacgcggccgagggcctctacgacaccctctactccaaggcggatcaggagacagaagcggcctccatgtccgccatggtggtgtttcccctgtactatctggcgctggtcctcaccatgaccgccgctaccatcctgacagtccagcagctcagcgagacagaccgctaccggggacagttcgccctgctgcggaagctgggcatggaccggcgggagatgcggcgggcgctggggtgccagtttgccatctattacgccatgcctgcccttccgccggcgctcattgcagttccctttctcctgaacctgggcggcgcggtggagccgggaaccatgacggggatctatcaccctgcagccatcaccgccctggcgctggggctgttctgcctgatctacctgttctatatcttgatggcctataccagcctgaaacgaaatgtcctgccacaagagtgacaggggcatggacagtgggcctgccctccgctataataggggcagcaggggcccaggggcccgaaacagatgcctgtcaggaggagagcccatggagactgtgcctatgaaaatcattgcccgcatccacagtgatttcccgtccaagttcgggataccccgccagagcgggctggtggaggcgctgaaggccagagtggtctttgagccggacttccgcagcccggaggcggtgcgggggctggaggggttttctcacatctggctgatctggcagttctcccaggcggtgcgggaggactggtcccccacggtgcggccgccccggctgggaggcaatacccgcatgggggtctttgccacccgctctcccttccggcccaacgctgtcgggctgtcctccgtccgcctggagcgggtggagccccataccccccagggcccggtgctccacgtggcgggggcggacctgatggacgggacccccatctttgacatcaagccctacctcccctatggggactgccggccggaggccacagggggctttgcacccggggcggaccggctgctggaagtggagttcccggagcggtggctgtccctgctgccggaggaccggcggcaggcggccgcgggcgtgctggcccaggacccccggccctcctatcagagggacccggagcggatctacggcatggagttcgccggctgggagatccgtttccaggtgcggggagagcggctgacggtggtggaagtaaaagagaagggctgacagagaacaggaaggaccgcggcgcgtacagggccgaggttccggatagagaacggcgggcgcatgacaggcgtccgctgttttcctctccgggcccgcatctcaatgcagagcgcgccggggcacccgtttttgggaaaaacaggggtaaaaccggcagaaacacaagtttccaccagggggaaggaaactttttttgcagaaacccttgactttctaccgggggaaaggggtagggtgggcccgaaagccggccgggacaaaacgccggggccggtcggaaaaggagggataaaaatggaaggatacggaacaatgcccggggccgccatggcctgcatgacggtctctctgctgatcgcctttggcctgcccctgggactggggctgtttttccgccggagaggcgggcgctggcgggcctttcttctgggggcggcggtgtttctggtatttgccctggtgctggagcagagggcccaccagctcatcctgggcggccctgcgggcggggtcattacgggcgatctgggactctacgcactgtatgggggcctgatggcggggctgtttgaggagacggggagatttgccgcctttcagctgctgaggcggagcgggaaggggggcacgccccaggacgccctgatctacggggcgggccacggcggcatggaggcggtactgctggtggggctgaccaacgtcagcaacctgctgctctccttctggctgaacacaggcacgctggagcagcacatgggccagctggatgacgcggcggcccaggcgctggcggctgcggtggccgcgccgccccacacctatctgtggggcgggctggagcggatcgtggccgttgccatccacatctccctgtcggtgctggtctggcgggctgtggagcgccgggcgtccctgtggctcttccccgcggccattgccctccacgcgggggtggacgcctgtgccatcctggccgcggcccatatacccctggcgggggtggagctggtggcgctggtttgggctgtggccctggccgtgctggcacggtggatctggcggcagagagagaaaaaatctttatgaaatgacggaaaatgcttgaccttccccccgctggagggtataacctaaccacagagcgagggggataccgatgaagatcaacgaagtcgaggccctggtgggcatcacaaagaagaacatccgcttctatgaggagcaggggctgctgaagccgggacggaacagccagaacggctatcgggagtacggcgagccggaggtggagctcctgcggcagatcaagctgctgagaaagctgggagttcccctggaggagatccggcagatgcagacgggcagccggaccctgggggacgggatgcgccggcatctggtcacgctggagcgggagcggaagaatctggaccaggcggtccagttctgtcaggcgctgaaggaccgggaggtccggttggacagtctggacgcggggggactgctccgggagatggaacagatggagcaggagggggctacctttctggaccgccagcagggagacacccgcaggatccgatatgtggccccggtggtggtgacgctgctcaccgtgttcctgatgggggggctgatcgccctgatgctgtggggcttctccatcgatgcggaggatgcgcctccgctgcccctgctggtggtgctggtggctatcccgggcgtggtgatcctgggggtcctgctggctatgatccagcgatttcgggagatcgagaaaggagaggcggaggatgcgaagcaatactgaccgaaaacccagccggctggccccggtcctggcggcgctgggcaccattttggtggtgttcatcctggtaggcaccatgctgtgggccttcctcagcgcaggcggggcggataccatcgcggtgggcgtcatggccctgtacggcgtggtggggctggcggtggtgggaggagtgctggccgccctgatccagcggctgagggaaattaaaagaggggaggaagaggatgccaaaaaatattgacccgggccagcgcgcccagaagaaggacgccaggaagggcgcggccttttttgccctggtccagctggccatggcactgctcctgctgtggggcagatcccagctggccggactggaggggctggactggctgcggctgctcctgttgatcctggcagtgggcgacctggtgaccatcccagccgtgtggatcgtgctgaagcaacgaatgaaagaaattgaaggaggagagctggatgctgctcgtaaatattgaatatatccctggaaaagagatcgaggcactgggcatggtgaaggggactgtggtgcagtccaagaattttggaaaggacttcatggcgggtatgaagacgctggtgggcggcgagatcaccggctatacggagatgctcaacgaggcccggcaaatcgcggtgaagcggatggtggatgaggcggaggccctgggggccgacgcggtcatcaacgtgcgctacggctcctcctctgtgatgcagggggcagctgaggtcattgcctacggcacggcggtgaagtataaatgaccgatcggcccgggggcagggagatggggggatatctgctcctctcctatgggacggcgtgggggatctggctgatgtgtggaatgatgcccccgggcgctgtcactgctcagctgctcaacacggtggtgatgtggacgcctgccttggcggtgtggctgatgtggctggcggggaggcgcagaccggtgctgtctttctccatgcggcccgccctgagaaggaactggaagtggtatctggctgcctgggccctatccctggctgccgcagtcctgggtgcgctgctctattttggcgtatatccccgggattttgacagcacgcttccagccttggcgccaatgatggaacaggcggggatctctaggggcacggcggtatccctgctgctgggggtactggtctacggtccggtgatcaatctgttctttgccataggagaggagatcggctggcgggggtttctctatccggccctgcggcagaggatgtctaccctccctgcctgcctgctggtgggcgcgatttggggtttgtggcacacaccgatcaatcttatgggacacaactatggcaccagttatcccggcttcccatggctggggattctggggatgtgcctctttaccacctcggcaggcactttcctggcctggctgtcggagaggagcggttccctctggccggcggcgctggcccacgggacgatcaacgccgccgcacaggtcgctctgctgttccggggggcggaaggggcagtgcgccagatctggggtcctgccgtcaccggcatactggcggggatgcccatgctggtcctgtcggctgtccttctggtgcggaagggaagctggcggaaaagccggtaaaatcgtaaaagcccggggcggcactgatgtgccgccccgggctttggtctgacacagaactaggagggagagtcagggggaaagcagctgggcgtactcctccgccgggggcacccggcccaccgcggacagagagagctgggagaagtcaaagatctgctccgccatctgccgcagctgagggacggtgaccgcgtcataggcatccaggatgtcgtcctgctccagcacagagccatagagcagctgggaggtgcccaggtggctcatgcgggcctgaatggattccagccccatgagcacgctggccttggcctgctcccgggcccgctccagctcctcctgggtggggccgtgctccgccagctcccggagcagggcgcaggcagcatccagcgcctccccctccagctcggggctgagggcggtgtacacccccagcaggccggtgtcggcgtggtcggctacataggagtaagtggtgtagcacagcccccgcttctcccgaagctcctgaaacagccgggaggagacgccgccccccaggatggagttgagcagcagcagctggtaacggcgggggtccagatagctgaaggcggggaaggccaggatcaggtggttctgctctgtgggctttcgccggacggtgaaggcggggcggtagcgggcccccttgcagctggggacgtggccgggctccagctcggagaggatggcgcgcagctcctccacggcctggggggtgaagctgccggtgagggcggtcaccagattgccggggcggtagtgggcctcctgataggcccgaaggctctcccctgtcatcttgttcagggtggaggctttccccaggatggggcgggacaacggggaaccctggtagaccgcggcggccagccgttccgcggccaggtcctccggggtatcctcatacatcccgatctcctccagaatgaccccgcgctccagctctacgtccccctgagcaaaacgggagtggaacagcatgtcgctgagcaggtcgatggcccggtgcaggtggctgtccagacaccgggcatagtaacaggtgagctccttagtggtataggcgttgatctgcccgccgatggcgtcggtctcccgggccagagcgccagcgtccctccgctgggtccccttgaaggacatgtgctcaataaagtgggccgcgccgctctccgcggcgcgctcgtggcgggagccagtgcccacaaagaaccccagggccgcggtgcgggctccggggacgaattcggtcagcagctttgccccgttgggcagggtaatggaacggtacatagatctctccttcgaaaagattgactgcgggggaggcagccacctatcctggcaagtcttagacagtctataacagaatggtcggaaaatcaagaaaaaagacgaaaagaagggcgcgggggccgaaaattcggcctccgcgcccgggcagaaggcggtcagccccgcagggcgctgttccacaggcgcttgagtccctgcatcccggctgtctgcatgatctgcacactgggataggcattgccctcgataagcacaggaccctgggcggtgacggccacgtcccagcccacgatgatggcgttggggaccagggtcaccgcctcctctaccgtccggcgcacctgttcccactgggggacctggaagccggggatagtcaggccggtggtggggtggaggaggaagcggtgctccatcagatcggccccctgggtggtgacgatgccggtgtccacgtccaggccggcgaaaatgcctccggagcagccgttgtccacaaagccgccgcccacccccatgcgcaggacggcggagcaaagctttccccggatggtgagggcccggactgtattcaccgagctggggtggagggcggccatctccgggcactgctccagcagctcctcggcgatcatatcctgggaggtgagccgctcccacacctgatcccggttgtttggagtgatggtgcacagctccacgccgtggccgccggagtcagtgcggggcttgatgatgcagcggggatggcggtccgcaaaggcgtcgaattcctcccggctgttccggcacacccggccgatccagtcccggtgcacataggcctggaaccggtccagaaagcggtccttctcctcaaagtcggcgaaggcggtctgggggttcttgcggtggatatcccgcatgtcgtacagggtgacgaattctgcccggccccggcggttgcgctcatagaagtggtagaggaagtagtcggcgatggtgcagcggtggaccagaaaggcccccagatagctgaacatcagccatgtgcgggagtagcccagctcctggatggggtagcggcccatctcgtcgaagcggtccagcagacgtttgatctttcccatagtgcggcctcctttgcggatcaatcggcccggcgggcctggatgcggcgcatcccggcctccaccccccggtggagcaggatgcccaaaaggatattcaggaaaaaggcgaggaaatagtaggggccagtccccagagggagccagctgcgcagcagggcagtctctgagaagaggctgacgttgagcagatagatctccagactgtgctcccccaccagccgcagtccccggcgcagccatcccaggggcaggtgttcaaagcaggcgcagcccgccaggcacatggggacggtggtgaacagaaacagatggcacatggggaggtgggggacctccagccggggcagggccgcggccaggtagcacaggccggccgccagccacagggtccagaacagcagatcacgcctgcccagccggcggtcctcccacacatagagccccatcagcagtcccagaaaaaagatggggaagcggtaaaagacgtccaggtagtgccagtactcgtcctggatcagcacgtggcacacagccaccgccgcggcgccggcccctgccgtccacagcacccggtgcctggagcggcgcagccggcggaaacaccagggggtgaggacatagaagagcaggatgccggacacataccagttgaaggccccaggggtatggacccagtaggcgaggagggtggagttccacaccagggcggagaggggggcctgtccccgaagaatgaggaagagggtgtagggaaccatcaccacaaaataggcggggaggatgcgccgggcccggcgcaccagaaaggcaccgtattcctgctcccggcggctcagggagagggacagccccatggcggagagcaggatgaagatgtccaccccgccgaagcccgccgcccgaaacaggtccagcccggggatggggaaggtcagatcagcggcatggaacagcatcacccagagcatggcggcccccatcagctcagagcgatatttgcttaacacagaatagcccatagctttgtccccatcagaaaaaggcggcggagtgcccgcactccgccgccaaactcacgtgtggatagttatttcacgctctcaccggcggcctgcttggctttgatctcccgcagggcgtccttgtaggacaggttgacccggcccttgtcatcgatgtcggtgaccttgacccagatcatgtcgccaatattgaccacgtcctctaccttctccacccggcgctccgccagcttggagatgtggaccatgccgtccttgccgggggccagctccacgaaagcgccgaactggaggatgcggaccaccttgccgtaatacaactggcccacctcggggacgaagacgatggtctcgatcatcttcttggcggcgtcacaggcctcggcgttgggggaggcgatgtggatggtgccgtcatcctcgatgtccacctgagcaccggactcggcggtgatcttctggatgacggagccgcccttgccgatgacctcccggatcttgtcggggtcgatcttgatggtgatcatcttgggggcatacttgctcacctcgggccggggggcggcgatacaggggagcatgatctcgtccagaatggcgtaccgggcatcccgggtgatgtccagggcttccttgatgatctcgtgggtcaggccgtcgttcttcaggtccatctggatggcggtgatgcccgccttggtgcctgccaccttgaagtccatctcaccgtgaaagtcctccacgccctggatgtcgatgaaggtggtgaagccgccgtcatcgtcctggatcaaaccgcaggagatgccggcgacaggggccttgatgggcacgccggcgtccatgagggccagggtggagccgcagatggagccctgagaggtggagccgttggaggagagcacctcggagaccacgcggatggcataggggaactcatcctggctgggcagcacggggagcagggcccgctcggccagagcgccgtgaccgtactcccgccggttggtcgagcggggcggcttggcttcgcccacggagtagggcgggaagttgtagtggtgcatataccgcttctcggtctcttcccagatggtgtccagcttctgggaggcggccagggtgttcagggtgcacacggacaggacctgggtctgaccgcgggtgaacaggccggagccgtggacccggggcagcacgcccacctcggcggccaggggacggatctcgtttttggcgcggccatccacacggtggccctccagcagccatgccttgacgatcttcttctggaatttgtaagtgaactcctccaggtactggtccatatccggatactcctccagatacttctcgtgccagtggtcgatcatggcgttccagcgggtctcccggacattcttgtcgtcggtatccatggcggccttggcctcgtccatgaagtcggccacgatcttgtcgaacagctcctggttgaactgagcgtgctcatactccatcttgggcttgccgatctcggcaacgatctggttgatgaaggccacctgcttcttgatctcctcgtgggccttcacgatgccggcgtacatgatctcgtcggggatctcgtcggccccggcctcgatcatgaccaccttctcagcggtggcggccacagtcacgtccatgcgggaggtcttgcgctgctcctgattgggattgaggacgatctgaccgtccacatagcccacctccaggcagccgatggggccggcgaaggggatctcggaatagctcacacaggcagaggcaccgatcatggcggccacctcgggggagcagtcgtagtccacgctcatgacggtgcactggatgcacacgtcgttgcggaagtcgtaggggaacagggggcgcatgggccggtcgatcaggcggctggccagcacggcgggcagagagggacggccctcccggcgcatgaaggagccggggatgcggcccacggcgtacagcttctcctcaaagtccacggacagggggaagaagtccaccccgtcccgagggcggggggagacggtgacggccaccatgacggtggtctcgccatatttgaccatggcggaggcgctggccagctcggccaccttgcccacctcgatggtcaggggacggccgcacaggtccatggtccagctcttaaacttggggaattccttgtgcttgatgatggttgacatgtctacactcctttgttgaagttttttgtcccggaggtggaataccagccctttagcacttgaatccgggtctgaaggaaggccctcctcatgccggcgcccgcccgcttcaggcccggattcaactgctaaaaaagcggcattgccctcgggaaaagttggtctcagatgggaagaaagggtggcgcaggcgcgccaccccttattcaacaaattacttacggatgcccagcttggcaatgatagcgcggtagcgctcgatgtccttggccatcagatagtccagcatcttgcggcgcttaccgaccatcttcagcaggccgcggcgggagtggttgtcctgcttgtggaccttcaggtgctcggtgagctcgttgatacgggcagtgaggatggcgatctggacctcgggggagccggtgtccgtgggatgggtgcggttggcctcgatcacggccgtcttttcgtccttgcggatcatgggagattccacctttccaatgatttgcccaaagggctgcgtaacaggtgggtgaagccccgggctcttgtccgggccgtaccctgaaacgaagcggatgggcaggatgacgcatgattccatgctgagatactatatcatagtttggcccggctgtaaaggaaaaaatcggggtttttcggaaattttccgcggtgtgccggggagagaaaaaacaccggaggtccgggcggacctccggcggaacggttcattccgggatggagtagtgctccacgatatagtcccgcaccctctgggcagcgggagacatggggcgggagcgggaccaggagagatagaccgtgcggacaaactccttgtcctggtcagagatggggatgatggacaccttctccgtgtccatggctggaacctggggaagcactgacaccccgaatttcagggccacatactggagggcggcgttgcactcccgcacctcgaacaccacgttgggtaccgcgccccgctgggcgaagatgcggtccatctgggtgcgcaggctgctgggcttgtccagcatcacctggggctcccgggcaaagtcatcaaaggtgacggagtggcgggcagccagggggtggtcgctggggaccgccagatacaggggctgacgcatgatgatgaccgattcggcccagtcatcccggtgcatcccgaaggccatatccagctccccggccttcacctggttaaagatatcaaaggaagggccctctgtaaactggaagcggatgctccggttgtcctcctcccggtagaagccctccaccagcgcagggatcagggaggcggagatgctgtggaagtagcccagcttggctacttggggcagattgcccgccatctgttccagaacagcggccccctcgtccagcagggccagggaacgctgcacataggggagaaactgttccccataggcggtcaggctgatcttccggttctccttctcgaacagcttgacccccagttccttttccagctcgctgatggaatagctgagggagggctgggagatgtgcagctcttccgccgccctggtgtagtgcaggacacgggccaggacctgaaaatattggagctgaagcaaagtcaagaagtccacctccctgcatggtttggcgaagccggagtcgagcctgagggagtcgattcctggtgccgggtctaatttaaggacatattataaagatattctattccggggccggtgtcaagcataaccattgtcccttcgggggaaaagagaggaaaaatcatccatatgacagaaaaaaggccaaagaatgaaaaagtttttcataaaatgcctctatcattttcattgaaatgaagtattggacgggagaggaagaagtggtataatggcgacagtaaggaaagctggacggaggtccggcaaataataaggaaaaggagatcattacaatggcgaaagaagtcactcctgagcagatcgaaatgctggacgggatggtcgctaaggcccgcgctgcggcggagatcatcgccacctatgaccaggagcgcgtggaccggctgtgccaggcggtcgccgcttctgtgatcgacatgaaggtttgggcgaacctggctgacgaggcggtggacgagaccggcctgggcgacaaggtgaccaagcggaacaagcggaacaagctgaagctgatcctgcgggactgcctgcgtcagaagagcgtgggcgtgatcgaggagatccctgagaagggcatcgtgaagtatgccaagcctgtgggcgtgatcgcgtctctggtgcccaccaccaacccctgcctgacccctgccggccaggtgatctatgccatcaaggcccgtgacgtcatcatctgcagcccccatccgcgcgcgaagaagaccaccaacaagtgcattaacatcatccgtgagaccctggtgcgtgagggcgctcccgccgacatcatccagggcatcgaggagcccagcatcaccctgacccaggagctgatgaagcgctgtgacctggtcatcgccaccggcggccgtcccatggtcaagtccgcatactcctccggcgtgccggcctacggctccggcgccggcaacgcgactgtcatcatcgacaacacctgcaacacccccgagcgtcaggctgaggctgccatgaacacccggatctccaagtgctccgacttcggctccggctgctcctgcgacggcaacctgatcatccacgaggacgtgtacgacgggttcgtagccgccctggtgaaggagggcgcttacctggccaacgaggaagaggctgagaagctgaaggccgtcatgtgggacgaggctgggcaccgtctgcccaacaccgtggccatcagcccgcagaagctggcggaggccgctgggttcgagatcccggctgaccggaagttcatcgctgtgaccggcggcggcatcgagaacgtgggcaaggagcacttcttctccagcgagaagctgaccactctgctgaccctgttcaagtactacggggagtttgagaacgcgctgaccatgatgcaggccatgttcaacgtgggcggcaagggccacagctgcggcatctactccttcgacgacgaccacatccatcgtctgggcatgtgcgcccccgtgtcccgcatcatggtgcgccagcccaacaaccgcggcaactccggttcttccaccaacggcatgcctcccacgtcttccatggggtgcggcacttggggcggcaacatcgtgtccgagaacatctgcctgaagcactacatgaacaccacctgggtggcccgtcctctgcccgaggatatgcccagcaacgaggagctgttcggcgagttcaacaagccggacatggacgtggagtgatctgagagccagttctgatccattccgtgccggcccggccgggccggcacggttttccagagaggcggcgcgaggccgctgaaaggtccaaggcggaaagccgaggccggggccccgaagggggccgctgacctccgtttccatcgctacccctgtacagaaggccgccggacatgcctgccagtcggcaggccggggcccggtccccttttgtattgtctccttcttcccacaaacgcccggtccgaaaggaccgggcgtttgtggtgtttgcggaagatcggcgttgacagaaggggcagcttgcgttaaaataaagcagattcttatgcgcccgtagctcagtaggatagagcgaccgcctcctaagcggtaggtcggaggttcgactcctctcgggcgtgccacgtcggagcaagcgccatatcgcttgctccgacttttttaaagtcagagcgcactcattctgctgtttctcgcttccaaaccggactcacttcattgggcgctggtttggtgccgccctgcgggcggctatttttcctttatgacagaaatatcggtttaaccgcccttgcacggcggggcaagtgccgtatcgcctgcgcggtctttttgtgcccttgccccaaaagacggcctccgtccagtccctcacaccaacattcatgtgaccgtttattaatattgacgcgtccccttttcaaagccggtagccgcatctctctttatcgtatcagtgtccgggggcagtatgccgtccctgccagcgggagagggtgctggattacagaagaccccgctcctgacagaaagccataatatcccctacatagtcctccctgcacttaatgggaaggtcaacatggtccaccccctggtggagtaccagcttggagcctttcagggccctgagagtgcggagcatcagttcggggttgctgatgttgtcctcggtcccgcccatcataatggtggggacagtgatgcggcccagcacctgggcaagctcctcctctgtctgaacttttgcaaagggtttccggggattgagaacagcggactgggcgggcatgttggtccaaaactccacagtctgctctaccgcttttttggcctctccgccgatgacggggtcagactccagaggaacaaacgccttggcacagtaagaggcctgcttttccgcataggggacccaggtctcccggcttttcgctgcgttgatggtgtccatgcgggcagagccggttggcttgccgtccttgagatggggaccactcccgctggcaaaaaagccccgcaggcggtccgggtggttcatgcacagatgccagccaatgccggcaccgtgggagtggccggtgtaaaaaaatttttctatccccatggcatcggcaaaatccactacgtcctgagcccatacgtcataccagtcgtctcccaggtcctctgtgaccatggaggagggggcatagccccgaattcggatgatgaaggcatgaaagccgcagcggtccgccagatccttggtatagtagatatggctgttgacaaactgctgcgcctggatgagatagcggtctccctgaccgaattcttcatagtagagtgaaacatggttcagattcagaatgggcataaaaggttcctcctcagtttgcagattgacgttttccctcgatttgatgatctggatagggccagggccgcatgggaatgcggcggcggcagtggctcattcgctccatgttggattctacaacaaggctgagacgctggccgttgaaacggcagtaaaatgtattgtagtccatccaatctgtggagcggacctgaaagatgaagcagaaatcagaggcccagccgccgctgacccagtgccggaccggacccgtgtgaaacatcatgttcagccgttcgttttccctgggcatggaaagaaaggcatcattggcgatccaatccccatggagaccgacctgaagagtacaggattcctgatccgtttccagggaaatatggggctgtccctcccgcagggacagagagagggtgcgcagatgccaggggttctcctccagcacatagacgcagccgtagtagtcgtccagaaagctgggctgtgccgctgtgcgcggagcgcaggaccaatgggacagataggacttgagacgggcggattctccatggtcggggacggcttggggctgtatggctgaatagagggtatcccagaggacggcagggatcagaccgctgtcctcctcaatggcgttgcagacgatggccatttccttgtccgggaacagaaaaccgaactgactgcggccgccgtccaggcgggctccctcccgggcgttgcgccagagctggaagccgtagcctgccagctggtcgctgtgcatgaaggagatagaggagcagcgccgggtagggacctggaaggagacagctgcccgcaccagtcgggcgtccagcagctgttgtccattccaattgccctcctgaagatagaacagggagagcttggcgaaaccttccgcagtacacatggtgcgggagccctccagctccccgcgctgggtctgctccacagtgcagtagatgcccaggggctccagaaagcgggggcgcaggaagtccagatagttgatgccggagactttcttcacgatcaggcccaagatgtgggggacaccgttgttgtagagaaaatgggtgccgggttcaaagtccagaggctcctccagaaaggcgcggacgctgttggtgctgttgagcaccggtcggaaggtgtcccgatcatggccggtggtcatggtcaggagatggtagacggtgatggattccatcctgggggtgactgtttcgggcagatcttccggaaaaagctgagtcaggcgtgtcttcagtgagactagtccttcctgaatggcgaacagaacagctaggccggtgagggccttggcagcggaatagatgcgccggggggtgtcgccctgatagggacggcggttggcacccagcagttgaaagccgttgcggaagatgtacagactgtggagatcgacatccaggcggtccagctcggtcagaaactgcaggatcgcaccgctgggaacgccctgggaatcaggggaggcggtatggaagcggccttccaaataggggacatagtgcaaggtggtccccctcctttctgcggctgtccgtcgttaaccgaccagacgaaagccgcctagaattgcgacaaaaacaagaactgcggaaaaaatgggggcgaggatggtctgctgccggatcagcctgcggcggagggactcatcactgcagccggtgagcacggcggcgcccccctgggaaaaggggctgatgctgctggcggtcaggcccatctgcatcccgcagtaaatggtccccactggcataccggaggcagaggacagggcggaaagcagaggaagcatcatgggaaccaccacgccgcctgagacgaaaaagctgagcacacacatgaccagcactaccccaggcaggatccaatgggcggggatggtgttctggagcagatcggacagatagctgacgacccccatggagttggccagggccatgtacatgccggtcagggagagcatcagcagggtgtcccaggggatgcgcgtctgaactacgcggtgataatccgcagttttcagaagcacgttcagcgtgatgccgatgaccgcaagaaactgaaagctgcagtaggtgctgatccactgggtcacaggattggggaacagcagctggactgcggcaggcaccacgatcatagcgatgatgccgaggatgataaagagagtctgccgctgcccagtatcaaacggggccggtctggtgagagagaccgccgaggatctgacccgccagcccctcaggagaacaaacattgccacatacagaatggtgtaaaatattccgcggaaggtaaagaagtccaccacatatcccgaggaagtggagagatcgaagtagatctccagctgtcccacattggtagcatacccggaggtccagggcatgctgccacccaccatggaggaggtccagagcgccacggataccaggagcggatcgatgcccgcctggagagccaaactgaagcagatggcagacatgaagaagggagcggccccaccagcacccagaccggccacaatggcggacacgccgaaaaacaacagacccagaagccagcctgccccccgacaggagtagagcagatgttccgccacttttttcagtgtcccgttttcctgggcaaagccgaagagaaatgtggccaccataaagttaaaaaacaggggcactggaaagagggcgaccacgccgccgggagtcagaccgcctgctgtggtgcccagcagaaaggcaaagctgagcgagatcaggccaatgttgatgttcagcctggtccccaggattagggcaagcacgataaaaacaaaaaacaggatcgtattgagcaagcttacatcccctttcgctccagcatccgatacaaggtggcgcggctgatgcccagcagttcggcggcccggagcttgttgccgccgctgagggccagggcttcctccagcgtatagcggctgcggaggctcccaccgacggcggaaagccccctgttttcctgaatataggtctccacctgctccggaccgatctcatcggagtcgctgatgacgctgacccggcgcaccatgttctggagttcccggatgtttccgggccagtcataacggagcatggcggctttggcttggctgctgaagcggagatagcgtcccgcccgctccgaggtctcggagagaaaggcgtcggccagcaggataatgtccccctggcgctggcgcagaggcgggatacacagtcccagcacattgatgcggaagtacagatctgcccggaaggtgccctcccggaccatagagaccaaatcacggttggtggcagcaataatgcggatgtcaatgggaatgggagtctcagcaccaatgcggcggatgctgtgctcctgcaggacacgcagcagcttgccctgcatggagggagagatctcaccgatctcatccagaaaaatagttccggtatgagcacactcgaacaggccccgcttgccgtcccggctggctccggtaaaggctccctttacatagccgaacaactcactttccagaatgctttctgggagggaggcgcagttgacagccacaaatggcatgtcccgccggcggctggcccgatgaattccctgagcaaacatttccttgcctacacccgtctccccctggatgagcacagtctcgtccaccttggagtagcgcagggccagcctgagcgcctgcgtcatgcaggggctgttccccagaatgtggtcaaaggaatagacagcctgattttccttggtggtgagcgtacggcggatactgacctcggagctcatgaccgtatttacgtcctgaaagatgaccgacacaccctccagcgtgccgtcccgcttccgcaggatgggctccgcatggtagagaaagattcggtcttccagcttggcgatttgattaagatagggacggcgagtagagattacgtcagcgatgcggctgaactggggacagacgtcatccacagaaaaggcgactgcattgagctggtccagcttcagatattcgctggccagccgattcatcatcaggatctcacccaggcagtccaccgtaatggcggcatagatggaggactccatcatgggggtcccggtctcggattcatcctgccgcttttccagataggactgggccagagagatggcctttcggatctcggaatcccgggtcttgatgagtacagtcgggatcccgtactgcttggcgatcctggcctgatagtagccccccaccagtacatcgatgtcctggaccttctccagctcatgggggatcttttccggggacacagtaggaagccataccagatcaatggagagcaggtcccggacataaaacacatccttcagaactcggcggaagccaaagatagcgatgcgctttcccagcttagatgcctccagcagagcgtccataacgtcctccgcctgcagatccaccataattacggggacatccacgctctggcgcacgatttttgcaaacatgccgaaggcgatcagaactttggcgccctgggctacttggctgcgggatacctcctcaagatcctgggtattggagaggaccacctggcagttggcaggggattcccgcaaaatattctggaccttttcggcagccagcaggtccgaggcaatgaacgtaatgtctgagtgcatatcccatcgctcctttattcgtttcggcgttgctccgggagggggaggacacacgcagctgagccgcccccgggcccgtgggtgaaatataacgattataccacagccctgaccgaaatgcgggggagcgaaacagtcaggcagtcctttcctgcttttccaatctggacaaaattaccacagccagggcaacggccaggaccacagggacgacaaaggcggcaaagcccacacggtaaccgaacacagcgcacagcacgccgcccaccgtggaggccagtgcagaaccgatgtccatgcccaggtagttggtggaatttgcagcggccttccgctccgcaggaacggtgcgcatagagatggtcatcagtacgggagaaatgccattctggccgattccgatcaggataccggagataatgaaccaggtcagatcctgggcaaaggcgagacacaggaggcctgcagagaagaacaggcctgcggggatcagggtggcaatgggtcccttcttgtcgaggagaatgccgagggcggggcgggcgacccagcccatgagagaggcggcggtggcaaacacgccgatattggcgatccccagctcctccagggcaaaggcagccataaagacggtgataccggtccgggtgccctgaaaggccacattgatgatcatgggggagatggcttccttggcaaacaggttgttcagcttcaggccgccgaacatggactggccgggcaggcgcgctgggaccttggtgggggcggtgaagcacaccagcaccagaccgaaggcggagatggcggtaaagaccagcagcatggaggcatagcccatgtactcggccagggcaaaggccacaggctgggagaccgcagaagcgatcatctgggaaatcatgaaaaatcccatggcggtccccagatcctcccggggaacatactcactgacgatgacggcggtaatagtggagataaaagtccaggatacgccgtggataattttggccggcactgcaaaggcggagttgtccatgctcagcgaatacatgaacacagccagggtcagggcccccactgcagcgatgtagatcagctttttgttgccgcggtcggtaataggggcagagaaggggcggatgatgaaggcggcccagctcatggcgctggcaatgaggccgatagtggtcaggtccatgccggccagccgccagcctgcgctggtgacagagttggtcatagagtgggtgatgcagatgaccgtgtacgccacaaagagcataataaagttcttgttggcgatctggaagaaggtcttcttctgcggaacagcattactcattcaaatttcctcccattttatagtttgttttggaattccacagattaatacaagcaagttctgtgccaacttaattttattaaaaattacgggaaaacggcagaaaaaagggggttttttagaaatgatgctgtctcaaaagtgtttcatatctgtctcgcgatacaaaaaagaggaccatcagcaaatttgaaaggcaggaatatttggcttgaactgcccgctgccccgtacagaaaagagaagcttggtaccagagcaaaaaaatgcccccgctgtgtacacagcgggggcatttcggagagaacttattcaatggcaatgcggttttgagtgggcagggtctgctggtccttcttgggcagggtcagcatcaggatgccgctgtcatatttggcattgatctcctcgggctgcacatcgcccacatagaagctgcggctgcaagtgccgctgtaccgctcctggcggatgtagcggccctcctggtccttctggtcccggtccaagcccttggcagcctgaatggtcagatagccgttttgcagctccacgctgatctcatccttctggaagccgggcaggtcgatatccacctcgtagtggtccccggtctccttcacgtcggtcttcatcagattcttggcgtgcttgccgtataggggattccgggcgccgaacaggctcttctcccaaggctcatcaaagaattcatccaacaggttctcaccaaaaatgctaggcaacataagtcattcctccattcgcgatccttatttcgtgcctgccgggggacctctcaggtccccctctttcttggtacgcccttagtatagcactgaaattagcactgtcaagtagagagtgctaaaattcataaagtgttcacaagatattgcaaaaaaagacataaacagaacgaaaatggaagaaatattccgaaaaagttggggtggtcagaggggaggcaggggaaacccctgcccctgggcgcgctggagaccaagctccatcaggcggcggtccgtgtccagggtggcgggatagggccagcggggcgcacagtgctggaactgacgccaggacagcagggcggcctccgggtcccgctgggccagcagagcccagaggaactccatgcggctggtggagggggtgaacttccgggtagccttgcagtaatggagaagggcaggggtgcggaggggggccagctcctcctgggagcggcccaggagcagggagcaggagagcagatccaccgtcaggtcccaccgctggatgtccagcaggccagaggggacgtccagcagggttcggaaagcggcttccgccccggacaggtccccctggtccatgagccggctggggaggaaggatagggcggcggcggtaaaggggtcctggggctccaggtcctgggggagctggaaccagcgggcgggctggtcccggagggggatgccccgctggaggagggcgtggcaccgcagctggagggcgaaggtccggcgggcctgggggctgcgggagagcaggtgcaggttgaagccgtcgttggctaccccgtccatggagagagggatgaggttgacggcccccagaaacaggccggcagctgcaaagatcagcaggaagaccggccagggaaaggggaggagaaaggcggtcagggccgccgccagggcggaaagcagattggccaagccgcccccaagattataaagccggaaggggacctcgtccccgtctgggggctccagcaggcactggccgccagtgccggggaggtagaagcggcgcaggaccaggcggccattctggcggagcagggtgaaagagcccacccggaaggagaggaagcggtagccggagagcaggccgcagaccaggtgaccgccctcgtgcaggatggcctggagccagaaggagaggatcaggcaggccagggagggcagcaggacagtcattccataggggtccagagcccacatgaagaagtagccccctgcggcccccagaagggcggcagggataaggacagccagcttccgccaggggacggtgtgccgcttcaaacgatcagtcctttctgttgtgacatgtcgaaaaaatacaaataggagagaaaagctcacccctccgcccagtcctcatagggcacaaaggtaaatgagatgtcccaaggctgctggtggtagaccagatagacgatgtctcccttgcctgccatctcattggcggtgaactggggaaaggggaccaggggcagggtgatctggctggcgcctccgtcagcctgggcgcgggcggtgtccagccgatggacccagacggcagcgttgcaggcatacactgccaccagcaggaccccagcggcggcagccgcccgattcaggcgggtgaggggccgcaggccctctgcccgggcacgtcggaagagcactgacgcggccaggcacagaaacaggtagctggagaagaacatccgggcgttcaccggggagaccaccagcatggggccggtgaccaccagcagggaggccacccagaaccagagctcccgcctgtccgcgccgccccgccactcgaccgccaggatcagccagagcagggccagagccaggcccagccaaagacattcctcccggtacaggtcccgccgcttcagcacgaccagaaggcggtcatagccgatgtagaggtggagggggaggaggaggcaggcccacagcctccagcgggggcagccctgccgccgtaccagccacagcagcaggaggctgatggtcaggcagaggggaatggggcggaggaggacctcggtaaagatgacaggcaggttgtcccgggccagatccagccccaccccccgcaggccgctgtccacctgagcgaagacggagttggtcatgctcagggccagcccggcccagctgcctgccagcagggcggcccggagagacggggcgggcaggaggccccggagggcggggaccagtccggccagagccatagcggaggagaggaggaccagataggcggtattgtgctcggtgaacagaccgatggacagggagaggagcaggacgaggggccagcggtccggccgcccctggcggagcaggagaagcagggggagcaggagcagggtgggggccagatagttggcccaggccgcagaccagctgtacacctgctgccagatgccccagggggcccataccaccaggaagagggccagggcaaaggattcccggccgcctgccggcccgccctggaagaagcgggagaggagcagggtgagtcccagcatcccgccccccaggatcagcacccggaggggccagaggggggaaaacgccagcttgcccaggatcagccccagcaggttgcccagataccggccgttggatgggacgcccagcaccacgccctcctgggggatggggcggaccagcaggaagtccttccaggaggcgaagtcccagtagatgaagtagcagtcgtcgcactcagggacgaagaggagggcgaggagcaggaacagggcggcggagagcagcacgtcccagcgccgccggcgggtggtcatggagaggcctcctttcgggggatgaaaaagcggccccagccgccggtcaggccgggggaggggccgtttgttcgctttgggtgttctggcgtggaagggggatcacttctggccgcccttcagggccttcatccggtcgccgtggtccaggatgcgcttgcgcagccggaggttctccggggtgcactccagcagctcgtcgtcagccaggaactccaggcactgctccagagacatctggcggggcgggatgaggcgcagggcgtcgtcagagccggaggcccgcatattggtcagctgctttttcttgcacacgttgacggagatgtcctctgccttgggggtctcacccacgaccatgccggcgtacaccggggtgccggcgccgatgaacagcacgccccgctcctgggcgttgaacaggccgtaggtcactgcctcgccggtctcgaaagccaccagggagccggtgttccggcgctggatctcccccttcatgggggcgtaactgtcaaagacggaggccatgatgccctcgcccttggtgtcggtaaggaactcgttgcggtagccgaacaggccccgggcggggaccaggaactccaccttcatccggtcgcccacgggggtcatctccaccaggtcgcccttgcgggagccgatcttctccatcaccgcacccacacagtcagagggcacatccactaccaggcgctcgatgggctcgcacttcacaccatcgatctcctgatacagaacacgggggggagagacctggagctcatagccctctcggcgcatggtctcgatgagaatggacagggacatctcaccccggccggccacgttgaaggcatcagtgctgtcggtctcggtcacccggagggagacgtccttcatggtctcccggatcagccgctcccgcagctggcgggaggtgacgaatttgccctcccgtccggcaaagggggagtcgttgacggagaaggtcatttcaatggtgggggcggagatcttcacgaactcgatgggctccaccgcgtcgggggcgcagatggtgtccccgatggtcacgtcgccgatgccgctcatggcgatgatgttgccggcggtggattcggtgacggggaccttgcccaggccgtcgaactcatacagcgcggtggccttggccttcttgggggcggcgtcggggtcgtggtagttgcacaccgcgatctcctggttctgcttgatggcgccccgctcgatgcggccgatggcgatgcggcccacgaactcgttgtagtcgatggaggagaccagcatctggaaaggggcgtccacgtccgcgtcgggggcggggatatactccagaatggtgtcgaacaggggcttcaggtcgctgcccgccacatcgggctggacagaggccgtgccctgacggccagagcagaacagcatgggggagtccagctgctccggggtggcatccaggtccagcagcagctccagcacctcgtcgatgacctcgtacacccgctggtcggggcggtcgatcttatttactaccacgatgacccggtggcccagctccagggccttggacagcacgaagcgggtctgaggcatggggccctccgcggcgtccaccagcaggatgacgccgttgaccatcttcaggatgcgctccacctcgccgccgaagtcggcgtgtcccggagtatccacgacgttgatcttcacatcctgatactgaatggcggtgttcttggccaggatggtgatgccccgctcgcgctccaggtcgttggagtccataacgcgctccaccacggcctgattttcccggtacacgccggactgcttgagcatctcatccaccagagtggtcttgccatggtcaacgtgggcaattatggcaatatttctcagtttttcgttcttcatcatttttcctcctaccagcaatatggcaagaccactcggggccccatcgccgatggggcgcgccgaatggcgcgtacaagcttttgtccggaagaaaaagcttgacgcaggcggaatttatttccgccaagcatttaaatatctggggtccctgcggggcatcaggcccgcggggcggccataccgtggccggcgtgggcgatcatggcggcacgtctctgtttttcgcgctttgcggccgcttctcatttaaagacacaaaaccatatgagacgccggagaggaggctcaaatggcggatcgccgcagatcagcgggaagcgctccccaaaggggaggtgttcgtgttgacgtaatattatacagcgccctttcgagaaacgcaacattttttgcagaaaaacaggaaaggatctatttggatccccgatttgacacggagaagcggaaaaataggagaggatattgtgatttcgccaaaaatttgaggcgggaaaacggggggcacaggggcgcccacggacagagtggggaggacgggacaggggccacaagatatcgtgaaaaaaccggaaaaagacgagaaaaagaaataaaaaatttacatttggagaggagaaaaaggggttgacgtaaagcgggattgcgtgtatagtacgtttgtaaccaaattgtaacattttcttttccgttctgtcacttttggggcagcgggaaatttgatctggaagaggtcatgattcatggacgaggttttgcacaagcccgccggccgccggccccggcagagtgacggtcgggagctgtcagctcaggagcagctggggctgctggcgcgccgggtggtcacagattggaagcatttttatcagtgggcccggttccatggccgccgtgtgatccacacggtccatgacctggcgggggggaaccgcgccaccggtccggtcacctttctggcggtgtccggagcgctgggactggcgctgactgtctccaccctatacgccccggcctatactgtcacggtggacgaggatactctgggtgtggtgagcgaccaggctgtggtagccgacgcggtggctcaggtggagcgccgaggcacggagatcctgggacacgactaccaggtggaggggcagatcggttatgatttcaccctttccctgcggtctgagctgacccagcccgaccaggtggagaactacttcctggagcagctcagccaggtagccgatggcctgcgccgctatcaggtcagcgtcaacggcgtggcggtgggctccgtggaggagatgggagccctggagtccgtgctggaccagctgaagggccagtatgtgaatgagaacaccatctccgctgaatttgtggatgacatccaggtggaggatgtctactcggaggaggggcagatgaccgccgaggagctccagaccgccctgatggccaacaccactggcgacaccacctacacggtggtgaagggagacaccttcaacgccatcgcctatgccaacgacatgtctgtcagcgacctgaaggcgctgaatccgggcatcgatatcaaccgactgatgatcggggacgtgctcaatgtgaaggagcagatccctctgctgtcggtgaccacggtggacgacgtgacctataccgagcccatcgcatgcccggtggaggaggtgaaggactccagcatgtatgtgggggactcgaagatcctgacccagggtacagagggcgaggcccaggtccacgcccaggtgacctatgtgaacgggagcgagacccagcgggagatcctgtcctccaccaccctgcgtgagcccaccacaacagtcaaggcggtggggaccaaggagaagcctaagacagcctccactggaagctactcctggcctatccgggggcggatcacctcctactttggcgggcggaatattttcggcagttacagctaccactccggcatcgatatctccgcctcctacggtgcggccatcaaggcggcagacggcggcaccgtcaccttcgccggctacaaggggagctatggctatctggtcatcatcacccacgacaacggcacccagacctattacggccataactcttccctgttggtgtccgcaggacagaaggtgtacaagggacagcagatcgccaaggcgggcagcaccggccggtccaccggcacccactgccactttgaggtgcgggtgaacggcacctcggtgaatcccctgtcctatctcagctgaacgaccagaaaccatttgggctccggcacaggaaaggctgtgccggagccttttcatgcccctttgtacatgcggaataacgggggaataagaaaagtcccgccgctcaggagcctgagcggcgggacttctgatcgttagtcagaaggaaaggaggacccgatcacagatggatggcctggaccaccttggcgcaccgggggcacagggtgggatgggccgcattggcacccaccagggggtggtgcttccagcagcgctcgcacttgtctccattggcctcgctcaccagtacccgcacaccggcgatgggggtgtcgctcccctgggcatacagagccgggtcgtccgacacctccacgtcggagacgatgaacaggtcggcccactggtcctggaacttctcctgaagggcggtcaggttgtccgcctggtcctgggcccgcaccagagtgatgtgggcctccaggctcttgccgatcttcttctcgttccgcgcggcctccagggcggcgttcaccccgtcccgcagctggatcagagcagtccaggagaccaacgcgcccatgtcgtagtcctggaagggctggttcatctcattgagaaccacattgcgggggtcgtcaccctcccggtgaggcatggcctgccagatctcgtcgcaggtgaaggccaggatgggggcgaacagcttagtaatggtgtccaggatcatccacagagcggtctgagcggagcggcgctccaggctgtccactccctcacagtacagacggtccttgatgatgtccagatagaaggagctgagctccaccacacagaagtcgttgatggcgtgggagaccacatggaactcgtagttgtcgtaggcggcaaagcactttcggatcagctcgttgagcttggtcaccgcccagcggtccagctccagcatctcctccggggacaccaggtgatcggggtcaaagccgtccaggttgcccaggcagtaccgggcggtattgcggaacttcagatagttctggctgagctgcttaaagatgttgtccgaacagcgcacgtccacatggtagtcggcagaacccgcccacagccggagcaggtcggcaccatacttcttaaagatctccgcggggtctacgccgttgcccagggacttgtgcatagccttgccctcgccgtccacggtccagccgtgggtgacgcactcctggaagggagcccccttgcccagcgcgcccacggcggtgagcagggaggactggaaccagccgcggtactggtccagaccctccatatacatgtcggcgggccagaaattctggtccttctgcatggaggcgaagtgggtggagccggagtcgaaccagccgtccagggtgtcctcctccttggtgaagcccgtccttgagccgcagtgggggcaggcgaagtcctctggcaggatatccttggcctccatctcataccaggcgttggagcccttctcaccgaagagcctgctcacagcctcaatggtctcgtcggtgacgatgggcttgccgcagtcggcacagtagaacaccgggatgggcaggccccagcggcgctggcggctgatgcaccagtcggcccgctcccggatcatggagatcatccggtccttgccccaggcagggagccaccgaacatcgtcgcaggcggccaccgcctcgtccttgaaggagtccacggaacagaaccactggggggtggcccggaagatgatgggttttttgcagcgccagcagtggggataggagtgaacgatctcctcactggcgaagagggctccgctctccttcaggtcggtaaggatgaccgggttggactcctccgtcttcaggccggcgtacttgcccgcgtagtcagtgtggcggccctggtcatccacagggaccaccagctccaccttgtagcgcttgcaggtctcgtagtcatcggcgccgaagccgggggcggtgtggacgcagccggtgccggaatccatggtgacatactcggcgcagcacagcagggattccttatccaggaaggggtgctgggccttcatatactcgaagtcctggccgcggaactgcttaacgatctcatagtggtcaaagccgcccgcctgcatcaccttggcgcacagggcctcggccacgatgtagagctctccattgtccgccttgaccagcacatagctctcccgggggtgaacggcgatcgccaggttgccgggcagggtccaaatggtagtggtccagatgacgaagtacatgttggacaggtcgccatattggctcagacggcccagatcgtcctttacccggaacttcacatagacagtggtgcaggggtcgtcctggtactcgatctccgcctcggccagggcggtctcgtcgtgggggcaccagtacacgggcttaagccccttgtagatgtagcccttgcggtacatggagccgaagaccttgacctcctccgcctcaaagccggggtccatagtcttataggggtgctcccagtcccccagcacacccatgcgcttgaagccctccatctggatgtcgatgtatttctgggcgtagttgtggcaggcggtgcggaactctgccacgctcatcttcttgcggttgagcttctgctccttgatgatggcggactcgatgggcatgccgtggttatcccagccggggatgtagggggtatagcggccccgcatggcgtacatgcgggtgatgaagtctttgatggacttgttcagggcgtggcccatgtgcagattgccgttggagaagggagggccgtcatggagggcgaagcggggtttgccctcattcttcttcagcagctcgtggtacaggtccatgtcgttccagcgctggagcatcccgggctcccggttgggcagaccggcccgcatggggaagtcagtcttggggagattgatggtcttgttgtagtccatgggtttgcttcctcctattctgggtcttttttagacttttcgatcaaattacatagaaatgtgaccaggccacacgcccggcagagcatagcgtggggaaattccggaaacgggtcccgcgtgaacatactggtggtgtcatcacctggggggcccagttccaccatatccgtggggctgtgaaaaaaccgcaattcctgctgggtccagaagggatatttttgcgtgtgcatggtcccttcttccataagaaggccgcacttagggcacttcatcaaagccactcctctctggaaaaacaaaaacgcccttgtctctcaaagagacaaaggcgaacaagacctctgcggtaccactcttcttgccggaagggcatcccgtcccagccactcaaatgctgcccggtaacgggggcgtccggaggggcttactcaggttcagcccccctgctccaaggtgatcttccccagcccctcccgtccgccttgcaccaaacggcggctctctgtgcgtctcggaggcgggtactcttccttttctgcgcatgataacgatatacccttatattttatccactttattgaggaatgtcaagaattttgttgaggattttcatgtctagcacgctccagtcataggtgcgcagagcgccccctccgcacggcggagggggcgcttccagtgtatctctgcgatcttatttgatctcatagtcccggccgaactggaggttgccgaagtcgatgcggcgggtgccgtggaccggctcctcctcaggctcctcctccgcctggggggcgggggggaactctgcagtgtccgacaggtcctctgggccctccgcagcctcctgggcggcctgggcctttagattctcggcggtggcgtctgccatggcctgggccaccaggcgctggacattgtcatcgatctcctccacggcctcctctaccgggtcggcctgggagaccggggcgtcggggcacagctgggaaaggccgtccaggtagcgcagctcctgctcgtggagggcccgcaccttggccacataggcagcggtggcggattgggcggcggacagacggaactcctcgtcgccggcctgcttgcggatattggccacccgctccttggcctccccttcggcgtcggagaggatctgggcctttttggcctccgcctccttcaccagctcgtcggccatccgctgggcggtcatcagcgccttgcgcatggcgtcctcggtggcgcggtactcctccaccttctccaccaggaccttcatcttgctcttcaaaacggcgttctcattgtacagtgaggtatagtccgctgtgagcagatccagaaattcatccacctgagccatgttgtagccgccgaaggaagccttgggaaaggcgcgctcggagacctcctgaggagtgagcatattcattacctcctaaatcaaaacgcttttttcagcgcaggacctcgtcgtcgttctgggcgcgccagtcaaaatactgttccaggaccacgggagtgccgtcgtcccaggtgaggtgggtcaccagatagcccatcaagtccgacagggcctgtccgtacagccgctgggccgtccagataccctcttcggctgggagcagggcatagatatccccctcctcccaggaggcgggggcgcagggccaggcaagagtcccgtccgcctcatagagcggtccctctccccgctccagccattggagcaggtccagcgtctccacggtgccggtctcgggtacggtgatctgggcggtcatgccggcctgaacgctctggatagaccagagggggagctccaggacctgaaaagctcccttgtcataggagaggacatgcacttccagcatgccggccccggccccattggactgtgggatcagaccggccaccaccagggacgcgccctgccggtcctgaatggagaagaacaggggctgatcctgctggggagaatagtaataataccggccattcaggtcacaggtgaccaagtcatccccaatctgggcctctacataccagcggaacagcagattccgggaatccgagccctccggcggcagcgcctcagggggcaggtcgtccgcggcctgaagggcatacaggcggacggcctcctctgcgccgtctccgtccagatccatggagaggcagccatgctccatgaggagcggggcctgcggctcctcgtcttcggaggcggaggcggcccctccgccggcgcagccggacagcagggccaggagcaaaaggagggggaggagccggcccggcggccgaacggcgacgcgtcccatctgctcagaagtacagcccgttgttctccagctcgtcgatcagatcccccaggatgtccacattgtagggggtgatgatataggtggagatggccaccttcttgatcttgccctcgttggcataggccacgccggaaagaaaatccagcaggcggcgggcgatctccttgttggtggactccaggttgagcaccacggtgcgcttctcccgcagatggtcggcgatctcgctggcgttctcaaagcgctctggctttaccagcaccacctggagctgagtagtggtgtgaatattgacgaccttgttgctgcggcgctccggctcgaccggggcgctgtacaaagagcccgtgcggtccatccgctcggagcggtcccggcgctcagggacggcagcacgaggcgccggctcaaactcctcgaaatcgtcctcgtcctcatcctcgtaggggtgggccaagcgcttgagttcatccataaatcccatagcggtatcctctcttttccttggtgtaagctctgccgccggttcaacgggcggtgtgcatgggcggccgggggccgaacagcgcggtgccgacccggaccagcgtggccccctcggcgatggcgtcctcaaagtcgccgctcattcccatggacaggcaatcgatatcacattgattatcggacatttcgcgtcttatgtcaacaaaaagctgatacatttttgcaaaaaaaggccgattggcaccggggagggggctgataggcgggatggccatcaaaccccgcaggcgcacatggggcagggactgagccagctcagccaagggacggagctgggctgggtccaccccgcccttgctctcctccatgccgatatttacctccagcaggatgtcctgaaccaggcccagcttgtccgcctgggcctccacagcccggagcagatgctccgaccccaccgactggatcaggtccacccgtcccaccacctgcttgaccttgttggtctggaggtggccgataaaatggacccgggcgccctcataggcgccggcggccaggtgggcggtgagttcttggacccggttctctccgcacagggtgatgccggcggcgatggcggcgcggatggtgtcgtcgctctgcaccttggtggcggcgcacagggcgatatcctccgggcggcggccggacgactctgccgcggccgccatgcgggcccggactgcctggacctgctgttggatggacatatgcaatctctctctttctctacaggtgacgggctgccggatgggcggccctcagaaattcagcaatttcccgtcatagagcccggtggcccggacgatgacctcgtcccccgcccgcaggacggcccgcccctcggtggcgggggagaccacatagaagtcggactcctcggtgaggatctccaccggcttgaattctgcccggccgcccaccagggtatagacccccaccaggttggtctggacggtctcgccggtctccggatcggtggactcctgggtgaccatgcgcagagcggccttggggatgcgcaggccggagctgctgccgaagatgagctccactgtctggccgcggagcagagtgatctgggacaaatagcggttggaggagaggaccaccaccgcacggccgtccaccgcctcccccacctgctccagcgtcatggggacgtcctggctgaaggaaccggaaaagcgggcggtgacggagctctccttggacaggcgcagggcctcctcctccgagaccgcggccgcgaagtaccagcggtcggaggtgatgagcttgccggcggtgccggagggggccgtgacctgctgcccggccagggcatccaggtcggcgggggtcatggtcaggatggactgaggggtgagcaggctctcatagccgtcggccaaagaggagaacacccccgcggcaggagcggtgatgcggctggtgacgctgctggactgggtgcgcagggcgcggtactcctctatcagcgactgccgcagggcggagagctgggaggagtcaagcccctcaccataggtgtagctgcgcttgagcacctggcttttcagctccatcacgtcgtcgtccagctgacggtaggagccagaggcggaggcgaaccgcagggaggccagggactggaggatggattcgtccagccgggcggcggagacgacgtcgtcggtctggttcatggcgtaatccagcagctcgatctccatggccagctcctccatctgagcctggacgtccagcgcctggctgttctggtggaccagagccacagtctggccccggcccacttcctccccttctgcccgggtaatgtccaggatgcccgattgggcggggaggagctgttcctcccgcaccacccagccgtctgcctctaggctgtcattggcagtataggagtaggtgagggtagtggtgaagggatcggtaaagctgtcccaggcgtagacgcccagataggcggccagcatcaccgccagaaggacgatgaccagcgtgaccagactgttgccctgtttcatgtgaccggctctctttctcttttgcggatgggtgtggggatggggcgggagttactccagctcgccgggctggcagagggggacgggccgctccgggacgatagtggagatggcgtgcttgtagatcacctgctgcttgccatcgctggtgaggaccacggtgaaggcgtcaaagccggtgacatagccccgcatctgaaacccgttcatcagaaagatggtgacggggcggcggtcccggcggacctgggtgaggaagatctcctgaagattgttggttttctgcatggtgagcactccttttttctttaaggcggagcagagctcggcccgagtgcctctatactaaaccaaattcttccaaatattttgtcgaagtccggcaggccgcttcaaaatcaggctccggtccccagaagagccatttggccccttcggtacggcggaaccaggtgagctggcgcttggcgtactgccgggagcggagcttgatctcctccgcggcggcgcagacatctccgccgccgcgctgcgcggcggccatttccttgtagccgatggcctgcatggcggtgcaccgcgccgggacaccggagtccaggagggcccggacctcctccgccaggcctgcggccatcatctcgtccacccgccggtcgatgcgcgcccacatgtcctcccggcgctgaaaggccagggagagggtgagggcatcgtaccggagcgggagggcccgggtctcccggttatgctgggagatggtctttccggtctgctgaaagacctccagggcccggacgatgcgcttgcggtcgttggggtggaggcgggcggcggcctccgggtcggcggcggccagctcccccagcatggcctccccccccagggcgtcaaagcgggcctccagccgggcgcggagaccgccgtcgggggagaagggggcgaaggtgcggccggagaggagggagtccaggtagagacccgtcccgccggccacgatggggagcttgccccgtgccaggatgtcgtccacgcagggggcggccagctccacgtaccgggccacggagaagtcctcctccgggtcggctacgtccagcatgtggtgggggatgccccgcatctcctccggggtgggcttggcagtgccgatgtccatccggcggtagacctgcatggagtcggcggagaccacctcgccgccgtggcgcagggccagctctacggccaggcgggtcttgcccgaggcggtggggccggaaatgaccaggatctttgggggcatgggagactcctttcagcgggctcaggggccggtatagagaaagcctgcctggtccagcgcggcgcggacccggtgccaggcggcctcatctgggcagaggatggtgtgcaggtggacaccgccggtgagggcggacaggggccgtgccccgcttcgggacaccttttggaggaactgccccacgtcataccgggaggataggtggagctggccggtgagctggccgtagaccgggtgctccacgatcacgtccagcacggtgcagccgttatccaccatgagctccagctcccggcccatgtcctccggccggtggacacaggccagctggcgggtcagaccgggggtggggcgggggagcagatagccccggggggtggcggcgatgtccagcccgccggccctcagcagggcgatgtcccccacaatgatctgccggctgacagaaaaacgggccgccaggacggaggcggagaccggcccggccgcctgggagagatagtcggacagcgcggcccggcgctggactgcgtccatgggggaccctcctctcttgaaaatctgggtgatatttaatcatagcacagatcggagcgggaagcaactgccgtctgcggcacgccgggcaccaaatctttccggggaccgcttttggcgcgtttgatggctgcatgcgccccttcgttccgctcccgcggcacagacaaagggggctgggtcggaatttctcttgaaggatcttaaatagatgtgttataatactattctgagcaactatagccgaagggcgggaaaggagcgggtggcctgtgaagtatgaaaaatggacggtggcccctcctgatccggctgccctggctgccctggaggaggcggggatctcacctctgctggcggcggtgctgtccgcccggggcgtacgtgcgccgcaggaggcccgggccctgctggagggtggggagacggccctggaggacccgctggctctgaaggatatggcacaggcggccggccgggtcaggctggctctggagcggggagagaccatcgcagtctacggggactacgatgtggatggcatcaccgccacctgcctgctgaccgatttcctccgacggaagggcggggcagtcatcccctatatcccagaccggctggaggagggctacggcctgaaccgggaggcggtgacggccctgaaggagcagggcgcctccctgatcgtcacggtggactgcggcattactgccctggaggagaccgcctgggcccggtccctggggatcgatgtggtcatcacggaccaccacgagtgcaagagcggcctgcccgccgcccaggcggtggtggacccccggcgcagcgactgccccagcgcctgcaagggcctggccggcgtgggggtggccctgaagctggccatggccatcaacggaccagaaggggacggagacgtgctggcggagtactgtgacctggccgccgtggggacggtggccgacgtgatgcctatgaccggggagaaccggaccatcgtccggctggggctggaggagctctcccacccccgccggctgggcctggccctgctgatccgggaggcggggctggaggacaaggccatcaccgccacctcgatcggctacaccctggcgccccggatcaacgcctccggccggatggggcgggcccagatggcggtggagctcctcctcaccagggaccgggagcggggggagcagctggcccaggagctgtgcgccctgaaccgggagcggcagaccattgagggcgagatcttccggcagtgtgtggatcggctggaccgggccccccagaagggggcggtgctgctggccgacccggagtggcaccagggcgtggtgggcatcgtggcctcccgcctgacggagcggtacggctgccctgcgtttatgatctgcctggaccacgggatggggaagggctcttgccgctcctggggcggcgtgaacctgtttgagcggctggcagagtgcagtgacctgctggagggcttcggcggccacgccctagccgccggcttcaccgtgcgggaggagaacatcccgcttctctcccgccgcctgcgggagggtttggagcgggccctgggggccggggcatccccagccgccctggaggccgacgcagaggtggaggcccgggagctcactgtggaggcggtggccgatctggaccggctggagccctgcggtactggcaacccccggcccgtcctggtgctgcggggggccctgatccagtccatgtcccaggtggggcggggccgccacctgaagctgcggctggagtccaaggggaccccgctggacgccattttcttttccgccgacggggccgagctggggctggcccccggcggccgggtggatgtggccttttatccccagatcaatgagtttcgaggcacccgctcggtgcagctccaggtggcggacctgcatccggcccccacccgggctcaggcggagcgggctgtctatgagaaataccgccggggggagggcctgaccccggcagaggcccggctgctgatgccttcccgggcggagtttgtggggctgtggcgctatcttcagcgccggtgcgccgggctgggccgggtggaggacaccgcctcccgcattgcccggggggcctcccgggccaccggacagagggaggcagccgagcgggtcctgctgtgcctggaggtgctggcggaacgggggctgatcgacctggagaccggcccgcagggggtggcggtctccctgcggcaggtggagaggaaggtggacctggaggcctcccccatcctgggccgtctgcggcaggccatccgcggcggcagtgcggaggcgtagcgccgaggagagaaggcgctgcgcgctttaggcggcccccgctttactctaaacttttgcgaggtgatccgaatggaccctattctggaacgatatcaggcgctggaagacaaggtgagcgcctataccccgggactggacacccagcgcctgtaccgggcgtttacctatgcggacgcggagcacaaggggcagctgcgcaaggacggcaccccctatatcacccatcccctggcggtggcggagatcgtggccgacctggggctggacgcggactcggtgatcgcggccctgctccatgataccattgaggacaccaacgccacccacgaagaagtggccaagcagttcggcgagacggtggccgccctggtggaaggggtgaccaagctgtcccgggtgcagtacacctccaaggaagaggagcagatggagaacctgcggaagatgttcatggccatggcccaggacatccgggtgatcctcatcaagatctgtgaccggctgcacaacatgcgcaccatggaataccagtcccccgccaagcagcgggagaagtctctggagaccatggagatctacgcgcccatcgcccaccgcctgggcatgcagaagctgaagtgggagctggaggacctgtccctgcgctacctggacccggtaggctataaggagatcgaggacgagctggcggccaggtcctctgcccatgaggagttcctggccgccgtccagcagcgtatcacccagcggatgtgggaagagggcatccgctgcaaggtctacggccgggtgaagcacacctattccatctaccgcaagatgttcgcccagaacaagacactggatgagatttttgacctgtatgctttccgggtcatcgtggacgacatcccggagtgctacaatgtgctgggctgcatccacgacatgttcaagccggtgctgggccgattcaaggactatatcggcacccccaagcccaacatgtaccagtccctgcacaccaccgtcattggccgggagggggtccccttcgaggtgcagatccgcacctgggccatgcaccagacggcggaatacggcgtggccgcccactggaagtataagcaggggctggccaacaagcagctgggcacggagcacgacttcgagtgggtgcgcaagctgctggagagccagcaggacaccgacccggacgagttcgtccgcaccctgaaggtggatatgtttgccgacgaggtgttcgtcttcactcccaacggggacgtaaagagcctgcccgccggcgccacccccatcgacttcgcctactcggtccactccgcggtgggcaaccggatggtgggggccaaggtcaatggccggatggtcccctatgaccaccacctctccaacggcgacatcgtggaggtgcttacctccaagacggccaaggggcccagccgggactggctgaagatcgccaagagtaacgaggcccgcaacaagatccgtcagtggttcaaaaaagagaagcgggaggagaacatcgccaccggccgggcagcttttgagtcggagctgaagcacgtgggcctgaagctggaggctatcaccgccccggaggtgctgcccagcatcctgcgcaaggtgcgcttcggcaccttggacgagctgtacgcctccatcggttacggcggcaccaccgcggtgaaagcggtggcccgcatccgggacgagatgctgcgcctgggccgcctccaggcggagaaggcggcggccgcctccaagaccacggcggagagcgtcatcgtccccgccagcagccaggaggtcccggtgctgaaggggtccaacaagcactcggactctggcatcatcgtggagggactgggcaactgtctggtgaagttcgctaagtgctgcacccccgtgcccggcgacccggtggtgggcttcatcacccggggctacggggtgtccgtccaccggcaggactgtcccaacgccgaccccggcaagcgcaagccggaggaggccgcccgctgggtcaaggtctcctgggtggagggcagcctgcccagctaccagaccagtttggagctgtccgccaaggaccgggacggcctgaccctggatgtggccatggccctgtccaccgccaaggtgaaggtgtccgccctgtccgcccgctctatgcccgacggctacgccagcgtcagtgtggtgctggaggtcaaggaccgggaggagctctcttccgtcatcaacaagctgaataacatccagggtgtctaccaggtggtccgggccagcggaaaataatatagatggacaaagggggcaggatgtcatggtatgggagatcttagggatactgttcgcttggacctggccgatctgggcctttgtattcgtgttctgcttggcggccgccatctccagggccgttcaggaggcgggagacgggaagagccgggggagcggctggtatgcttttggagcggcgctggccctggcggtcatcctgggcgggctggtctccctgatcgtcatggcagtgtgacgatcatcaaaaaacgatcgaggtgaaatgcgatgagagcagtggtgacccgggtctcctccgcctccgtctccatcggcgggacggtggagggagccattgagcagggctttctggtcctgctgggggtgggccccggagatacggaggccgtgtgtgacaagctggcggagaagatctgcaacctgcgggtctttgaggatgagaacggcaggatgaacctgagcctggagcaggtgggaggtgccctgctggtggtgtcccagttcaccctgtatgccgatacctccagccgaagacctggattcaccggggcggccagacccgacctggcggtccccctgtacgagcgattcatggagcagtgccgccggcggggcttccaggtggagcacgggaccttcggcgcggacatgcaggtggcgtcggtgaacgacggaccagtgaccattctgttcgatacggacaaaaacggagcgggaagggcgtaaagcgcggcgcggtccgcgctttggctgtccccgccggactttgacccaaaagaggtgttctaacgatgaaagtaaagctgctgcgggtggggcccatcggcaccaactgctatattctggaggacgaccagacgaacctggccgccgtcatcgatcccggcgacgagccggagctgatccaggaggcgctggagaaggagggggtggaggtccggtatctcctccttacccacggccactatgaccacaccacggcggtgccagccctccaccgggtgtatccccaggcggatatctatatccaccaggctgacgccaacggggcgggcagtaccttgttccccctggccggcgaggtggacgatctgaagctctacgacgagggggatgtgatccgcctgggggaccacgagatccaggtgctccacacccccggccattcccccggctccgtcaccctgaaggtggaggacgtgcttttcaccggggacaccctgttcgccggctcctgcggccgcaccgacctgcgggggggcagctatgagcagatcatgcagtccctgaagcggctgggggagctgaagggggacttccacgtctgtcccggccacgaggccacctccaccctggagcgggagcggaggagcaaccccttcctgatggaggccatgcggagctgagggggcgcctgcccgaagatttttctcgtgaggaaggtggactatgaagctgtatctggatctggacaactatgactaccagccggagcgctataaatacgcggtggagcagatgatgctcaccctcttcccggaggagcggccggaatatcccccccgggagggccgtacactgaagggggagaccaacgccgcccgcttcaccctgcgccgcagccccgtgtggaccaccgtccgcgcccaggtgtaccggccccaggggatggggcaggctgcggtccgtgtggggagcgggcagctggaccgtccgccggagcaggtgtaccacaccctccagcacgccctgaagatggcattttaccaggcgggcaccgccctgctggggggcgagccaccctggggcgccctcaccggcgtcaggccggtgaagctgcccacccgggccatgctggcgggggccacggaggcccaggcctgccgggagctggagcgggagtaccacgtctccccccgccgggcccggctggcggtggagtgcgcccgggccagtctggcggaggaccggcagctggaagagggacaggtgtccctgtatatcggcatccccttctgtcccacccggtgcgcctactgctcctttgtctccgccgacgtgggtcgggccctgaagctggtggacccctacgtggaggcgctgctggaggaggtccgccgcacgggacaggtgctggaacaggccgggctgcgggtccgcaccctgtatgtggggggcgggactcccaccaccctctccgcatcccagctggaccgcctgctggcggcggcggaggcccatcttcccctggcgggctgccgggagatgacggtggaggcggggcggccggacaccattacccgggaaaagctggaggtgctgcgggaacacgggatcgagcgcatctccatcaatccccagaccatgtcggaccaggtgctccaggccatcggccgccgccacaccgcccgggacatccgggaggcgttctgcaccgcccgggaggtggacttcgcctgcatcaacatggacttgatcgccggcctgccccaggacagcgtggagggcttccgggactctctggaggaggtgctggccctgaggcctgaaaacatcaccgtccacaccctggccatgaaaaaggggtccaggctgatggaggaggggggcgcgcttccttccggtgaggagacgggccgaatggtggacctcagcctggaggccctggagggggcaggctaccggccctattacctctaccggcagaagtacatgtcaggcgggctggaaaatgtgagctggtgtttaccgggaacggaaaaccactataatatcatcatgatggaggaactgcagagcgtcctgtccctaggggctggcggggtcaccaagctggtggaccggagttcgaggcggatcgtccgcctcaccaaccccaagtatccccatgactatttggcgatgtccgccaaagttctggagcagaaggacgagatcctgcgcttctaccgggaggtttgaaccaatggcctatcaacttcaggagatcaaccgaaggatcaagaccgatgtcaccgagtttctggaggagtgcgaccaggcgtatgcccagcgggtgtccctggccgcagaccgcatcctgagcaatctggacaagagccccgtggtgctgctctccgggccctcgggctcgggcaagaccaccaccgccatgaagatcgcggaggagctccagcgccggggcgtcaatacccacgcggtggctatggacaactacttcaagagcctgaaccgcaagaccgcgccccgcacccccgagggagacatcgactacgaatctccccagtgcctggatatggagctgctggaccagcacttcgccgccctgagccggggggaggagatcatcatccccaaatttgagtttgcccgccagatgcgcaacgacgcccggggcaccccactgaagctggggaagaatgagatcgccatctttgagggcatccatgccctgaacgacgacatcgcaggtcctcacccggaggccgccaagctgtatatctccgcccgttccaatgtgaacgacggggcggccctccgattcaaggggacctggatgcggctgacccggcgggcggtgcgggattacagcttccgcggcacaggtgtggctgacacactggagatgtgggccaacgtgcgccggggggagaagctgtatatctccccctataaaaaccgggcggacatcatcttcgactcctccctgccctatgaggtgtcggtgatgaagaattttgccctgcctctgctccaggcggtgccggaggagaacgcacggcgtggcgagctgctggagctgatcgaggcgttccagtggttcgagcccatcgacccggagctggtgccggtagactctctgctgagggagtttatcggcggcggcagctataagtaccattgaacgaagaagagagagctggggcggcagcccgcgggccgtgtggcccggggcacgccgtgccagaaaaatgtggagtgatgtttgatgtctgatcctcttgtctatgactcaaggagcgtgcggttcaaatccccctatggagcggtcccttccgggacccaggtgacgttcaccctccgccccctgcggtcggagggctactcccgggggaagctcaccgcccggctggagcagcgggacaatcagatcatcacggtggagctgccctggacagacaccgagctggggcgggatgccttctccggcgtcctggacactggggactatgtgggactggtgtggtacacctttcagctggagaccatcaccggtcggcgctggaacataaaggaggagtaccagcttaccgtctacgacgggagcgagatcgtgccccgctggttcggggagggggtgagctaccagatcttccccgaccgcttccgccgcactcgggtgcctgaccccgcggggctggtaggggggcgcactgtccaccagagctggcaggaggagccggagtaccgccccgacgccaacggggagatccgcaaccgggacttcttcgggggcgacctgaggggcgtgatagaggagctggactacctccagtccctgggggtggagacgctgtacttcaaccccatcttcgaagcggcggagaaccaccgctacggcactgctgattacagccgggtggacccaatgctggggaccaacgaggacttctccgagctgtgccggcaggcccaccgccgggggatgcgggtgatgctggacggggtgttcaaccacaccggctttgtcagccgctactttaacggggacggctattacccggagccaggggcggtgcagagcgagagctccccctaccggccctggttccagttccggcactggcctgaccagtacgagagctggtgggggatctataccctgcctgccgtggaggagagctgccccggctaccgggagttcatttttggggatgagaactcggtggtccgccgctggctgcgggcgggggcggacggctggcgcctggatgtggctgatgagctgcccgatgactttgtggccgggatccacaccgccgcccgggcggagaagcccgggaccctgctcatcggcgaggtgtgggaggacggtaccaccaagattgcctatggggtccggagaaagcacatcctgggccgccactgcgacgggctgatgaactaccccttccgaaatgccgccctcaactttctgcggggcggggacggggccaagttcgtttccgccatggaggccctgcgggagaactacccctcttttgccttttactctgccatgaactctctgggcacccacgacaccccccgcatcatcactctgcttggggtgggcagcgagtgcagggaccagagcaaggactggcgggcctgcttccgtatgagtatggagcagtaccagcggggaaaggagctgctgaaagtgggggcggtactcctttacgcctttcccggttcccccacagtctattacggcgatgaggcgggactggagggctttgaggaccccttcaatcggagaccctacccctggggccgggaggatcgggagctggtggactggttcgccgccctgggcaagctgcggagggaatgccccgccctgcggcggggggatatccggtatctggccgggacgggccatctgctggctttcctccggagcacggagggggagcgcctgctcaccgcgctgaacgccggggacgagccggcggccctggctctgccctggacggaggagccggagcgcctgctgggcgctggggagtgggccttgaccggggagggcccggtgctgatgctgcccccccgcagcggcgggatctggcgcgtgggggaggcggagccggcccagatgtagaagtgccgccagtgggacgaaaaagttcaaacgcccccttgcatttccctgaaaaacatgctatacttttctctacgtccgggcatagacccgctgaacaaacgatttgcccgctctgggctttgaaaggaacgagaaatgccatgaaaactgctgttaccgtgatccaggtgctgtgcggactgtttctgatcgccgtggtcctgctgcagtccggcaagagcgcgggcctgtccggtgccatcgccggcggcgcggataccttcctgtccaagaacaaggccaagactgtggacgccaagctggccaagtggaccaagtgggtggccatcgcctttatgctgctcaccctgtccctgagcctgatcccctgactgtaaaaagccccgcctgttttgaaaacaaaacaggcggggcttttttataagatagactggtcggatctatgagccggtgctgtgatgccgtgcccggcgtacttccaacacccggctgagcagggcgcccagcaggagcacgttgccgcagaagtagagccacaccagaaggatgatgagggaggccagagagccgtacagcatggagtagcgggaggacaggccaatgaaccaagagaacagaagagagcctgccaccagtgagacggcggtgaagagggaactgagcagcagcttccggctgctgcggaagcgccgaggagtgcccaggcggtagatggccagcaccagcagcaggacgaagcagaacagcagcagatagcggatccagagccagagactggacagggcggagagggggatcaggcgcagcaggggatggggcagatgggtctccagcagatggaagaaccagtcaccggtgaagatgaccaccacagacaggtaaatggtgagcaggaacagcagggagaggatcacgctgagggcgatccggcgcagcccgccggggtgttccaggccatacagcttatccatggccagcagcagggcgcggagccctgcggaggcggacagggcgatggccaccagggcggcggccacgatggcgggggactggttcagggaggcataggccagatagtcctgcatgacagccagggcctggtcgggcaggacctggtccagtcccgacaggagctgctccagactcaggtggaacagcccgatgaagtagttcacgcacataagcagggggaacagggtcaggatcagaaaataggacagggcggcggccgcctgcgccacgccgcagcggccgtaggtgctgaacgcctccagtgtgaaggagataggcggaaaggacagcagacgcttcaagaggcacctcctctcgtgtccaacggtgtcgaataagggaaaattgagaaaagccgcctgcaaagcagacggcttttatggtgcaaacacaggacaggactcaggccagcttgttcagcttcagagtcaggctgctcttcttgttcgcggcattgttcttgtgcagcagacccttggcagcagccttgtcgaccgccttgacagccaccttgtaagcgacatcggcctcgctgcggttgccttccgccaccgcggcttcaaacttcttgatgtcggtcttcagcgcggacttagcggccttgttctgcatggccttggcctgattgaccagaacacgctttttggcagacttaatattcggcaaaccaaacacctcctccgatcgaatcgtaaaatggtgcacagaaactctgtgcagatatgtattgtaccattggatcttcaaaaaatcaactgtttttttaaatttttcccgcttttttggatagaatccctggcgccgcaaaaaatagggcagaagcggcagctattccactatatcttgcggagggaggagcgggacatgcggaacagaaggacggacctggctctggaggccagggagctgtggcaggagtcggcggaggagcgtacccagctggagggggtggaggcccgggaggagatgagggagggcatccccgtgacccgggtcagcatcctggacaggcggggggaggaggccctggggaagcctgtggggacttatgtgaccctgaccctggacgggctggccagacgggaagaggatgctttcggccgggcggcccgggcggtagcggcagagctgggggagctgctgggcttccttcatccagaggccccagtgctggtggtggggctgggcaaccgagccatcaccccggacgctgtgggccccaaggtccacgagtacaccctggtgacccggcacctggtacggcaggtgccggagcacttcggggacctgagaccagtggcatccctgtctgccggcgtgctggggaccaccggtatggagagcggggaactggtccgggcggtgtcggagcggctgcggcccgcctgcgtgatcgcggtggacgcgctggcctcccggtccctaaaacgggtgtgccgcacggtgcagctggcggataccggcatcgccccgggctctggggtgggcaaccaccgggcggcgctggaccgggcttccctgggggtgccggtgattgcggtgggggtgcccaccgtggtggacggggccaccctggccgccgatctgctgggtacggaggagctgcctcccctgggggaggggagggacttgatggtcacgcccaaggatatcgacagccaggtggcagacctgtccaaggtgatcgggtacggcattgacctggctttacagccgagcctcaccctggaagacctggatctgctgttgagctgaggggagagccgttgccaaatgggaagaaagggaggtcccgacagaggggcggctcccagagccgcccttcaggccttccccccaccggggggaaggtggcgcggcgtatgccgcgacggatgaggggtctttcttttcccgtctcagtcatgatttgtcagagggattccaccctgcggggcggaatccctcttgtggcatcctgagacggaggcgggcctgtactccttatttctaatggtttcttcccgaaacgcccctgccgtggaccttccccacataggaccaaaacacccccagccaggaccggaacagagccggtcctggctgggggctttttaagaagaaatttccccggggatgaccacagtctcccggtagtactgggcctggaggaactgctggtagaatcgggcctcctccgggacgagagcatctgtgaggatgccgccgctcaggaagagcccccgagtatggatcaagggggagatggcctccagctggcgggacagctccatgaagccggggccctcccagccgcacagctcaaataccttgttcatcagaaagcagggagagaagtcgccgccctccccggtgaagctgttgcccagcgcctcacgggcggcggagttggcccagataaggtagggggtggagtagtactcccggaagccggagagctgagacaggtcgaagccggccccaatctcggtgtaccccgtattgccgttgcccatccagggcttgtggtccccaaaaaggaccagcacaaagggctcgggccgggcgttcagctcccgggtcagccgctccatggcggccagggtgctggagacattggacatatagttgttgagcatgttgcaggtctccgccgaccagccggtgtcgccaggggacaggaagacctcctgggcggaggcggtctcatagggaccgtggttctgatagctgacggagaaggagaaccaggggcccggttcccgcagtccgtccagaataccgtccaccagcgtctcgtcggagcgcatcacggcatccaccgggtccaccagcgccccgtagtagttctcggtgaaccagctctcctcaaagcccaggtactcgttgacattctggcggttgtagaaccagctgtagccggggtggtgaaaaagggtgtgatagccctgctcccggaaataccagacataggagtcagtgggcttgcggaagtcctcgtgctgagtgtagccggtgagaaagccccactcgctgtccaccgtgccgcccgcgaagatattggtcagcaggtcgccggagacggactgctcctccaggtcgtggagcggggcatagaccgcctggacggcgggctgctccgccagggcggggaagtcggtcaggtcacagaaggcctccagcatcaccccgaccacgttgacccggcggtccgccgggatgtcctggtctggataccgggcgagcagggaggcggcctcctccgggtcgtagtcctccggcggggtggggaacatgtcctgcacgctgtacagaaaggggtagaggcagccccgggagacaaagacctccacatccgaccagggggtgatatgggtgtcgttggcggtgcggtcatacaggctctggtcgcagtagagggccgcataggacaccgccagcagggcggcggaggagcacaggcagaaccagcgaagggggccccggcctatcccgcggggcagaaggaaaacggagaacaggagacccaggatcaggcaggccgcacacagccacaccagccaggtcaggtccaactgatagtgtcccacgatcccccccgcctcagtgaccaggcgcaggtcggcggccagcagagggtcccctcgcaggcggatcttgaagtaattcaccagggccagtcccacacaggggaggaagctgcccagaaaagctgcccaggcccggcgggtaagaaaatagaagaaccagatgagcaggatgggcggcaggacattgaggagcaggagcatgggctccaacaggaaataggacaggaacaggtccgtgctgtccagtttgagataggcggtggcggcgagcatcagcgtcaggacgccgacacagaagcccagccctgtcagggcaaatgccagccagacgtggtgccagcggagcagtttgggctgggtccctgggggagccagcagaacagcgcgcagctgagtcattcagatcacctcatgcgggatgggggacgcggccccataatggagcagtatatcacagcggaccggaaaaagaaacagcggatttcccaggcgatccagcccgatgcccgggcagccgccccctgcgtggaatgcggggcccaagagacgggaaggggcggcggctccaagcatcccgtggggggcccagacccgccccgcaaactcccgtcttgcctctgctgccgttccagtggtataatgtttcccaacctatcacagatacgggactatgtcccggggaaagggtgtcgcttatggggctcagaggtatttttgatccggaaaacggctttttccgcacactctcccgcatggtggacgtggtggggctcagccttttatgggtggtgctctccctccctctggtcaccttcggcccggcttgtgccgccctgtaccacacggtgacccactgtgtggtccgccagggggacagcacctacctcaccttcttccgctccttccgggccaatctccgggtgggcatccccgccggcctgctggtcctggccgcgggcgccctgctcctccaggggtaccagatcatggtcctggcggccaatttcgtgggcggcggcgccctggccatgtacggctgctactgcgcggccctcatcgtccccgccggcgtgtcctgctgggccttccctctgctgtcccgcttccagatggggctgggacacctgctggtcacttcctttcaggtgaccctgcgccacctgccccagaccctgctcctgatcctgctcctgttcgtcacggtgtggaccacggccggcttcttcccgctggccgtcttcacccccgctctcaacgcactgctcgcctccatgcccgcggagcgcgttatccgccggtatctcccagagaaggagcctgaaggggaggagctgtgaccctctccgcacctctcattcgacggcaaacgggcggggacaccattcccggtgtccccgcccgcttttttcactgcccgagcgcccccgtggccggatcggagaggaccgctcccaccctggccgccagctgggcatggcccgcctgggtcaggtgcatgtggtccactcgattcagctcacagccctccccgtccaggaaacgcgcgcccagcctggctgccagccggcggtagtgctccgccagctgacgggacttctccgcgcatccccggcccatggcagcggccacgggggagtgctccacctccggacgaatggcgggaggcgccacgaccagcaggtcgggtcccccgggtccccagcagtcctctgacatggcctgccgggccagccgctccatcccacgggcgatctcctccgccgagaggccgaagcgctccttggtgtcgttggtacccagcatcaggatcagcagggagaccggggcatggctcagcaggcagggacgcagataggaaatggcgtccagccccggctccagaggatcggggaataccgtggtccgcccgcacagtccctcctcgatcaccagatattcctctcccagggcgcgctggagcagacagggccagcgttccgcctcgctgaaccggcctccgcagagggtttccccctcctgagctccacagtagccgtgagtattggagtcgcccagacagataacatggcgcttcatgatatttcagtcccccgttttgtttatttttttgtacctataacctatcagttttcctgaaattgtcaaggttttgtttcgatttgggtctaactccacgttaaaaattttctttttttgcaatttgtgaaaattttttcattccgtcttgacaagctcagtgatttcctataaaattttcttaacccaatcggcaattatttgtgaaaaatgattcacaaggaggacaatgaaatgaaatttaaaaaagtagcagctcttgtcttggcttccgccatgacgctgggcctggctgcctgcggcaacggcaacagctccacccccagtcagtccagcggcggtgcctcttcgtcgggcaccacctccagcagcgccactgagatcagcctgtggtccttcaacatcggcggcttcaccgaggcctccaactgggattccctgatcgccgccttcaacgaggccaaccccgacatcaaggtcaccgtcacccccatcaactatcaggacggcgaccagaagctcacctccgccatcacctccggcagcggccccgacatcatctttgagggccccgagcgcatcgtgggcaactacgcccgtgagggcctgatggtggacctgggcgacgtgtggggcgatgcctccgcggatattggcgagaatatttccagtgtctgccagctggacgggacctactacatgtaccccctgagcgcggccgcccactgcatggccatcaactacgaggtctttgaggccgccggcgccctgcagtacattgacgaggagacccgcacctggaccaccgagggcttcgaggccgccatggctgccatcaagactgccatcgacaacggcaccgtcaccgtggccacccccggtatcgtctactgcggcgcccagggcggtgaccagggtacccgcgccctggtgaacaacctgtactccgactactatgtcaccgaggacggcacctcctacaatgccaacagcgccaacaatgtgaaggctctgaccctgctgcagaacatggtgaacgccggctctctgtccgccaacgccagctacgccgctgccgatgagcttcaggctttcgccaaccagacctgtgcggtcagcttctgctggaacttctccaactacagccagtacgcggaccagacccagttcacccccttcgccatggcgttcccctctgacgatggcacccccgagctggagatggccggcccctacggcttcggtatcttcgacaacaaggaccaggctaagatcgacgccgccaagaagttcatcgactttgtctgcaacgatgccaccgccggtgtggaggctgtgaagacctccagcttcttccccgtgcactccgactggggcgatgtctacgccgacgctgaggatgccgacctgcgcgctcccttcgccctgatgagcaactatctgggccgctactacaacctgaccggcggctggaccgagcagcgcgccctgtggtggcccatgctcgctgagatcctgaccaccggcgctgacgttcagaccgctgccgacaacttcgtgtctcaggcgaacgccaacatcggctgacctcctgcggaagcacgtatcctgttccatgcgatcctgtgcccgctccctgaatgagagggggcgggcactgtgtatcttccgtcctccccgggggagggcaggcaaattcttgtcaaagagggggaaatcttatggctcagaacactcctgctccggctgccggacagaagcctaaaaaagtcaagaaaagcgctacctccggtatgagccgcgcgctggtgcggcgggagaccacctcggcctacctgttcctgctgcccagcctgatcttctttgtgaccttcgtggtcgtccccatgttcatctgtgtgtattacagctttaccgactacggactgggcggcgtcaagggcttcgccggcctgtccaactacatcaagctgttccaggaccccatcttccaccgcggctttctgaacacggtgctcatggtggtggtggcggtgcccagcgtcactgcattctccctgtgggtgagctccgccatctacaagatgcattccattccccgctccttcttccgatgtgtgttctacctgccggtagtcaccggctcggtggccatcaccgtggtgtggaagtggatcctggacccctacaacggcatcctcaatcaggtggccggcacctccagctttgactggctgggcaatccaaaaaccgccatctggtttatcatcctgatcctgttcaccacctccatcggtcagcccatcgtgctgtatgtggcggctctgggcaatgtggacaactccattatcgaggcagccgaggtggacggcgccaccaagtttcaggtgttctggaagatcaaatggccctccatcatgcccactaccctgtatgtgctggtcatcaccaccatcaacaccttccagtgcttcgcgctgatccagctgctgaccaagggcggcccgctgaactccaccatgaccatcatgtaccaggtctacgacaccgcgtaccggctcaacgacctgggctatgcctgtgccatcggcgtggttctggccctcatcatcgccattttctccgccatccagttcaaagtggcgaagactgacaattaaggaggggcgagaacatgaaaaaaaccactgatctgagcggcacctccaaggggtataaggttttctccgtggccatcctggtggtcatggtgatcttcttcctgttccctctgtactggatcgtcaccggctccttcaagaacaagctggagatcacggcccggacgcccatctggttccccatcgaacccacggtggaaaactacgcccggctgtttgacaaccccgccttcctgtggctgttcaacatcatcttcatttcggcggcggctatgatcctgacctgtctcaccgcctccctggcgggctacgccctgggcaagaagcgcttcatcggccggggcgtcctgttcaccatcatcatctgcgccatggccctgcccaagcaggtcatcgtcatccctctggcccaggagatgaccaacttcttccatctgaacgataccctttgggccgtcatcctgcccacggtgggctggcccttcggcgtattcctgatgaagcagttctccgagaccatcccgacagagatcctggaggcggcccgggtggacggcgcgggtgagctgcgcaccttcattaccgtggtcttccctatgatcaagcccggtatcggcgcgctggcaatcttcaccttcgtcaacacctggaacgactacttcctccagctggtcatgctcaccagcagggagagctggaccctgccgctggccatcgccaaccttcagggcgagatgtccactgacttcggcctgatcatggcgggcgcggcgctggcctccatccccatcatcatcgtattcgtggccttccagaagtacttcacccagggtatcgccatgggtgcggtcaagggctgatcctaaaaaactttaaatctttgcaaattatattggagtgatcgatttatgcgcgatttcagcaaatatcagggcgtcatcccggcattctacgcatgctatgacgatttgggcgccgtcagcgccaccaaggtgcgggagctcacccgctatctgatcggcaagggcgtgaagggcctgtatgtgggcggctcctccggcgagtgcatctaccagagcgtggaggagcgcaagctggtcctggagaatgtgatggccgaggccagaggcaaggtcaccatcatcgcccacgtggcctgcaacaacacctctgacagccaggccctggccgcccacgcggagagcctgggagtggacgccatcgccgccatcccccccatttacttccacctgcctgactacgccatcgccaagtactggaacgacatctccgccgccgcccccaacacggatttcgtcatctacaacatcccccagctggccggtgtggccctgaacggctccctgctcaaggagatgctgaagaatccccgggtcatcggcgtgaagaactcctctatgcccgtccaggacattcagatgtggaaggatgagggctgcatcgtattcaacggccccgatgagcagttcctgtccggcctggcggcgggcgccatcggcggcatcggcggcacctatgccgtcatgcccgagctgtatctgaagatctatgagctgtacggcaagggtgagatggagaccgcccgccagatccagaacgaggcctgccgcatcatttacaagatgtgtaccgccaagggcaacctgtacgcggtccagaaggccatcatccgtctccagggcggccccgacgcaggcagcgtccgcctgcccatgccccctctggccgacggagacgcatccatcgtgcgggaagcggcagggatgatctcggctgccatcgggaagtactgctgatctaacgagaccagggccgtggaactactccattcttcatagtcctcggacccataaaaaaggaggaagaaaagaccgccggccggcggtgcggcagtgtggagacctgtcgtaagccccgggagggacagtccgtccgggggaggggcctgctgcggaggcagaggtctcacggccagaagccatgtcaactgtcagtctgaagaacatctacaagatctatgacaactcggtcaccgcggtgagcgacttcaacctggagatcgcggacaaggagttcatcgtgctggtgggcccctccggctgcggcaagtccaccaccctgcggatggtggcgggcctggaggagatcagcaagggagagctgtacatcgacggcaagctggtcaacgacgtggagcccaaagaccgggacatcgcgatggtgttccagagctacgcactgtatccccacatgacggtgcgggagaacatggaattccccctgaagctgaagaaagtgcccaaggaggagatccagcagcgggtggaccaggcggcggagatcctgggcatcacccagtatctggaccggaagcccaaggcgctgtccggcggccagcggcagcgtgtggccatcgggcgagccattgtccgggagcccaaggtgctgctgatggatgagcccctgtccaacctggacgccaagctgcgcaaccagatgcgtgcggagatcatcaagctgcggcagcggatcaacaccaccttcgtgtacgtgacccacgaccagacagaggccatgaccctgggcgaccggatcgtgatcatgaaggacggctttgtgcagcagatcggcaccccccaggaggtctttgagaagcccatcaacatcttcgtggccggcttcatcggtacgccccagatgaacttcttcaacgcccgcctggagaagaagggcggcgactactcggtggagtatgccggggccagcttcccgctggacggggagatgagcgccaagctggccgggaagggacagcagagcgccgacgtgatcctgggtgtgcgtccggagcacatcgcggtgcagaaggacccctccgcctccgccatcgaggcatccatcgaggtgtccgagctgatgggcagcgagctgtacctccacgccaccgtggagggcggccaggaggtggtcatccgcacccccaccgtagaactgccggcggagtaccggggcggcgtgccctatggcaccaagctccgcttcaccttctcccccagcctcatccatctcttcgaccccgaatctgagaagagcctgctcgtctgaatcgaggaacagaagtaggaagacacggataagcacccggcgcggtccccgtccgatcatgcggacggggaccgcgcctttttgcagagggccccagcacccgcccacctccggacgggaccgtgcccgttccagcctccctgttccggcgctgacgagccggagcagggaggctttgcgcccgggcggacatgtttggctggcctttgtccgaatataccatattttcccatagttttcggtatttttaacaaagtcatagggcggcctgcgtgctctccccggcagccccggcggccagtctggattttgatgcagcttatccgtcttttttgcattataatttttgcgatcctttgtttttaatggatttggcggtaaaaatccgtcattttcgttaaaatatgaattatttattttcccatcttgcgtatcaatttttaaaggactataatagcatcacttcgctaactcaataaagtacctggtgccagagaaaacaaatttctaggagtggtcaacaatgtcctttcagaacgcttaccttaattccgtgatggatgatctgcgggcccgctacgcccacgagcccgagtacctccaggctgtggaggaatttctggagcccctttcccctgtgatcgattccgacccccgctatgagcagcagaacatcgtgggccgcatggccgagccggagcgcctgatctgcttcccggtgtcctgggtggacgatcagggcaagacccgcctgaatcacggtttccgggtgcagcacagctccgccctgggcccctataagggggggctgcgattccatccctctgtcaaccagtctgtcatgaaattcctggcctttgagcagacttttaaggactgtctgaccaccctccccatgggcggcggcaagggcgggtccgacttcgacccaaagggtaagtccgacggcgaggtcatgcggttctgccaggcctttatgaatgagctctaccgccacatcggtgagaacaccgacgtccctgcgggtgacatcggtgtgggctgccgggagatcggctacctcttcggacagtacaagaagctgaagaaccagtggaccggcgccatcaccggaaagagtctggcctccggcggctccctcacccgcaccgaggccaccggcttcggcctgtgctacttcggcgccgcctatctggccgaccacggccagtccttccaggggaagaaggtcatcatctccggctcgggcaatgtggccacctacgccaatcagaagtgcaccgagatgggagccaccgtggtggccatgagcgactccaacggctatgtggtggacgagaacggcatcgacttccgcatcatccagcagatcaaggagcagaagcgggagcgcatcagcacctatcccaactatgtccccactgccaaatacgtggagggctgtgccggcatctggtccgtcccctgcgacatcgccatgccctgcgccacccagaacgagatcgacaccgactccgccaaactgctggtgtccaacggctgtaaggccgtctttgagggctccaacatgccctgtactcccgaggccatccaggccatcaaagcctccggcctcctctactccccctccaaggcttccaacgccggcggcgtggctgtctccggcctggagatgagccagaacagcgagcgcctgtactggacctttgaggcggtggacgccaagctgaaggagatcatggagaacatctaccgccagtgcgccgacaccgcagctaagtacggccaggagggcgacatccaggccggcgccaatatcgtcagcttcctgaaggtggccgacgccatgctgtggcagggcgtgtattgaccgcttcgtctgagctcctatcagaagcgtccccgggacagaaactgtcccggggacgcatcagcttgtggaaaaagcctggcagagttcgcgcccgcagacgcaaaccaactcaggctgcaggtgcaggcagactgtcgaaaaaacggccagccgaaggactcggggggaaagatactgtgaaagaaaaccctcagggttgtctttcacatgcaatcaaaccacttttcagaacgttaaaacgttctgaaaagtgctctcagctcgtcgaaaatgctttgtcgacaagctgagggtttgcccgcctgcggcggacagaccctgcgcgcagcactgctgctttctcgaaaaagtgacttttccacttttcgacagtttcacgcgcccccgggacagtttctgtcccgggggcgcgttgatatgccggggtgtgggcccgatgccagtccccctttatttcagaccaggcggcatgatccgcagggcgtaggtcatgctctggcaggggatctccaggtagtcgcagaccttccagttgaggtacacctggccgtcccgctccacagtggggccgaaggtcatctcctctgctccatccaccaccagctcctcagtccctacggtgagcaccgcggtgtggccccggtaggtgatggtcaccgtcccggcctcacggtcccaatgacagccggctcccagccggctgcatagctccgccgccggcacctggtcgtcagcgctccagccggggtagtagaggacgaagggccgcaggctctcgtccagctccgccgggacgggcccgctgctgtccaccgggtactccaggtcccccaggatcaccgactccacctggtccagatccaccacccggtcaaagaagccgatggtggtctcggtgatggtgcgctggccctccggggcatcgtcatactccggacgggtaccccacccggccttcaggtcgccgggggtgtaaatggtgccgtccttcagcttcaggaagaactccccctggaggaaggtgtcccaggactcctcccactccccataagagtagaccagcttgtagctcagggggccgaactccagcaggtggacggtggcgctccggtcccactccgggttgaggaggatcttgcgctccggctccaccgtcacggcgcccatggagcccacctccggcagacggatggcatacttcggtcccatgcagtccaccccgatccacagggtgtccagtccctcctccatctcgttggggtcgaattccacccggagctgggtggtcacgctccggtcggtgcgcaggctgatgtcttcccaatagctgtagctgtgcgcaccctccagtttgggggaggcgttgcagtaccgccaggacagctgttcccccgcgtagtcggcgctggccagccatacgtctccgggatcaaaggtggactcaggggcatcatagcgctcccatgggctcatctgggccccctccatcagccaggccgccccctcgtcggtgagggcctccagggtcacctgggctaccaggccgtactggtccaccacggcgctgtccagggtcaggcggaatttcccgtccgacacgctctcgcccccctggatatagggctccaccacgctcaggtcgcccttgaaataccgctccaaaaatccgctgttcactgccagggcggtgcccatcagcagtgctgccgccagggccgctacccccgcagcacgtatcctgtgcttcatcggtctgctcctttccgtctgcccctccgccagcacccgctccatcagctcgggcgcaggacggatctgctccatcatctgcttgtattctcttcgatccatgctatccctcctccagcagcacccgcagcctgtctctgccccgcatcagctgggaccgcaccgtggccgggctccggtccagcagccgggcgatctcctccgtggtcatgtcctcgtagtagtagaggtggagcaccgtgcggtacttgtccggcaggcggcgcagctcctcccagagcgcctctccctccggggagggggcctccagcgtctcactgaggggctccgtccgccgccgccagggcgccgcatgaagctttttggcgcagttgatagtgacccgcagcagccaggccttccggtgctcctccgaggtgaactgggggtcgctgcggaggtagcggagaaagacctcctggtacacatcctcagcgtctgcggtgttccccgtccgggcaaaggcaaggcgatagaccatgtcagagtagcggcggaccgtctcctccgcctggctcgtccggtccatgtcatccccctcctttcacctcaaacaccccacagcggggcaaaatgttgcagggatcaaaaaatttttgcgcggcccctgaaccggacctgcgcaggggcacacagtgggtgtctgcctcatagaagcgggacgggagaagaaagacccctcatccgtcacggcttcaccgtgccacctctccccagaggggggaaggctttgggggcggtccgcacctttcctcttttgtgatctcctcatttatggtatatatatatcaggaaaaatggaagggccggcggccgagccccatctgtaagaaacttgtaagacttcccccagcttttttgtaagaaatctctgctatcctgttcccaggcaaaccgagagaggagctgcgctatggacacaaaggagaccgtcctggtggtggatgacgaccgggagatcgtgggggccatcgccctggccctggaaaaggagggctaccgggtgctgcgtgcctatgacggcatggaggccctggaccacgccctggacccggagctgcggctgatcctgatggatgtgatgatgccccgcctggacggcctctccgccgtcctccgcatccgggaacggcgcaacctgcccatcattgtcctgtccgccaagagcgaggagagcgacaaggtgctgggactgtccatgggggcggatgactatgtgaccaagcccttctccacccaggagctggtggcccgggtgcgcagccagctgcggcggtacacccggctgggggatgtgaacgcctccgccagagaccggcgcattgtcaacggccggctgtcctacgacccggacagccgggtcctgacggcggacggggacgaggtgaagctcaccgcaacggagctgggcatcctggacctgctgatgtgcaacttgggccgggtctttcctgcggaggagatctaccgccgggtctggggggaggaggcctacgcctcggagaacacagtgatggtgcacatccgccggatcagggagaagatcgagctcaaccctcgggagccggactatttgaaggtggtgtggggaattggttataaaatggaaaaacatccttaacagaggcaacaagacagacagggccccggcaccggcggcgtgcccggcggggggccgcctgcgggcggcggcggggctgacggctttcctgctggggatcagcctcctgctggccggcggattgggccagtacggctggtggtccacggagctgggcgcccggtgggccagggacagcctggaggaggactggcaggacaccgccgccttccgaactatcatctgcaactggctggacgcctgtctcaccgcggggacctgggagtacacctccggaggcgactacgggaaggagctcctggatggcctggagggggacaagaacctgctctacgccgtggcgcggcggggcagtgtcctgtacaccaacacctcggacggcggcttcctctcctccggtcagccgccggaggggtaccgcttcgcgctgcgctgtgaggacggaatggtgtccattacccaggacggccgggaactggatgtatatggggacggctggtacaccgaggacgacctgtggttcgtcccaggctatgagaacttccctatggatgcggatgccagaaacatccaggtctatctggccgcggcgtcagatccaaagcctatggtctacgggaattatctgggctccggcgcggatatccgcacctcccagctctatgacctggtccagaacctggcgcagtaccgccgggagctgctgacagagtgggggatgctggggggcggtgcgctgctgctggccctggctctggtcctgcgccgggacaaggccagggcggaccgcttcctggcccgggggaccggccggatctggttcgaggtcaaggtgctcctggcccttctggcgctgctcctcctcccctggggggagttgagcggctggatcgcctccacgcccacttcggcctatgccgcggcctcttccaccgtcagcagcggctccgcacagtgggacacgggggccgtcgccctctattcttacagcggggatgtggttcagtcccaggcagaaacccatgtgtatggaacgggggaagggccggacgtgctcttcgatttccttcaggcgctgggcacccgtcccgccgccgctgttctggccttcctggctctgtacctactgatattcaacgacctgcggtacaacaggcaggcatggcggcacggagtgctggggatgctggccgcccgggagctggagctccctgtccagaagcggctcagccgctccgccggcatggtttccctgtcctgtctgctgctgaactgcgtcacagccggtctgctgatctggtgctccagctggtcctggggctccgtccggctggagacggcctggctcctctgtctgccgccccttctgctcgctgctgtgacagcggcattcctgttccgccagcgccggctgtggggggatctgggggcgctcaccggtcagattgccgccgtccgggcgggggagctggcccgccccctggaactgccccgggaccacgacctgtcccaggcggcggatgacctgaaccacattcaacaggggctccaggccgccatggaggagcgcacccgcagcgagcggatgaaggtggagctggtcaccaatgtgtcccatgacctgaagacccccctcacctctatcatcagttatgccgagctgctggagcaggaacatctggagccccctgccggggagtatgtgactatcctctcccaaaaggcccagcggctgaaggggatggtgcaggatgtgttcgaggtgagcaaggcggcctccggccagctgccggtgagcctcaaacggctggacctggcccgcctgctccgccagaccctggcggatatggaccagcccatccaggagagcgggctgcagctgcgcacccagctccccgaccactcggtgctcatccagggggacagtgaccgcctctaccgggtgttccagaatctgctgggcaacgccctgaaatactccctggccggttcccgggtgtacctgaccctcacggtggaggagggacaggcggtggccgccctgcgcaacacctctgccgcagaactccgtcccggcctggactacacccagcgcttcgtccggggggacgagagccgtaccgacggcggcagcgggctgggcctgtccattgcctccagctttgtccaggcctgcggcggtcagttccaggtagagacccaggccgacctcttcaccgccctggtctccttccccttggacgcctccccgtccgatcccaggtgatccgcatttcggaaacagccgtacgggcggacttttttgacaaatggaaaggcccaggcgcttttgcgcctgggccctctgtgtcaatggggttacggtccttccgcgcggacggggcggagggcggcctcctcggtctgatcgggatacagcttccgcagatggcggatgcagaggatggcggcggggatcaggaacagatcggcgctgatccaggccaccggggaggcaaagcaggcggcggtgaagccgaacagggggacgaagacctggcccatcaccgtccgggcggccatctcgagcacccccgccaggatggccagctgactgaagcccatcccctggatggagaagcgcacgatattgaccagggccagggggaagaagaaagcggtgagggtagtgatatactggctggtgagggacacaagccgggcaagatcggcctcatcctggttcaggaacagcatggcgcactggggagcgaagagcagcatggcccccacggccagcacggcatagcccagccccagccaggcgcaggcccgcatcccctgtcccagccggtccagcttgcaggcccccacgttctggccgcagtaggtggccatagaggagcccatggcgtcataggggcagcagatcagctggaacagcttggctccggcggccaccgaggcgatggcggcagttcccaggccgttgacggcggactggaggatgatggagccgacggcggtgatggagtattggaggcccatggggatgcccatccagcacagaaccttggcggagtggaggtcaaaccgcttctccgccccctgcatgcgcaggatggggaagcgcctgaccatgaaagccagacaggccaggccggacagagcctgggagagcacggtggcgatggccgcccccgccactcccgcacggaagagcagaatgaaagcgaaatccaggccgatattcaggatggaggccagggccaggaaatagaccggcgtcttgctgtcccccagagagcgcatgatggcagccagcaggttgtagaggatggaggccgggatacccatgaagatcacgaagatataactgtacgcatccgcgaagatctcctccggcgtctgcatggcggtcaggatcgtacggcacagcaggccggtggctgcggtgagcaccacggcgatgcccgcccccagataggcggcgttggctacgtatcggcgcattttggagggctctcccgccccaatgcgctgagctaccgggatggcgaaaccgttgcagatgcccatgcagaagccgatgaccagaaaactgatggagccggtggagcccaccgccgccagcgcggcagaccccagcagtttgcccacgatcatggtatccaccagattgtagagctgctggaacaacaggcccagcagcgtgggcagggtgaagccggcgatcagccgcatggggctgccggtggtgagatcgcgggtcatagggggtccctccttctgatgcggagcggggcgcctgcgcccgtctcctggactgcaatattatagcggtccgcccccctttgggatagagctttttttcacaatcttttccccgctcccctccggccggtctgtcaaattgtcatgaccgggaccgtggggccttctgccacagcggcccgtctcgcccctcagcccttcggggcgtccttctcggtgggcagcagctttttccgctgagagaggaacaaagtcagggtggtggcactggccaggatgtcggcgataggctcggccgcatagatccccatgacgctgccggtgactctgggcaggatgagggccaggggcaccagcaggatcaccttccgcagcagggccaggaacaggctggtcctggcctgaccaagggccatgaaggtgctctggcaggccatctgggcgccgaaggcccagatgcccccgaagaagaggggcatgacccgggacaccagctggatcagctcctgctcaggggtgaagatacgggccagcacccccgggatcagggccaccatgacaaaggcggagcaggtgaccgccatggtgacggccagcagccgcttgaaggtctgccggacccgccggtagttcttggccccatagttgtagctcataatgggctggaccccctgggtgatgccctgggtgggcatgacgatcatctgcatgatggactggatgatggtgatggagcctacatacaggtccccgccgtaggtctgcatcccggtgttcaggaccacggttaccaggctctcggtggactgcatgataaagggtgccactcccaggccggcgatcttccccatcactctggggtcaggccggacataggcgcggcggatgcgcaggatgctgtggggacagcaaaggaaggcaagcacccaacaggcgctcaccgcctgggacaggatggtggccagggccgcaccccttaccccccactggaaaacaaaaataaagatggggtccagtacgatattcagcaccgcgccgatgagcacgctgagcatggcggtcatcgctttcccctgggcactgatgaaggtgttcaggcccagggccagctggacgaagaccgtgcccagcagatagatgccgatgtagctggaggcatagccaatggtggcgtccgaggcgccgaaggcccgcaggatgggctccttgaaggcgctgaagcccaccgtcagcactgcggcggtcatcagcagcagtgccagagagttgcccaggatccgctccgcctggtccttttttcccgcccccagctggatggcggccagcggcgcgcctccctgcccggcaaaggctgcaaaggcggacaccagcgtaatgatgggaaaggtcacccccaccccggtcagtgccaggtcccccacctcggggatgtggccgatgtagatgcggtccacgatgttgtacagcatgttgatgaactgggcggccaccgctggtacggccagcttcagcatcagacggccgatgggtgccgtccccagcacatttgattctctctcctccacaggagtcacttgcctttcttttctggattttcagtcaaagccccagcccatagacccggttggcgttgtcaaagaagacggcggggcggcgctcctccggcacgatgcgggtgacgtagtcccggtattctgacagattgacgatgggccagtcggtgccgtacaggaagcggtcccagcagcccagatagtccatccaggtgcgcagcagccccacgtatccggcccgctccacaaagtagcggtccaggtccgcacgcccctccagcagcccggacaggtcagcgcacacgttggggttcttctccagcaccgccgcggccgcctccaggaaggggttgccgaagtggcacatgacgaaccgggtcctggggaagtccgccgccgcctcgtccagcgccagggggtggctgtacttcaggtgggcccgggggtgggcggtgagccccatatggaccgctaccggcttgtcataccgctccgccagacggtagacgggctcgtacaccggatcggacagccagatccggttgtacccggggtagagcttcacgccgcagcagttctcccgcttcagatgctcctccacctggtcgggcaggtcctccgggatgtggctcccccggcggagcaccaggctgtccagccccacgcagtagtggaacaggtcccgggggtagttgtggaagccggtctccaggctgcggttgcccatcaccaccccgtggacgatctccagctccccatagacctgccggagatgctccaccgagttctcgtgccccaccccacgggccatggcatcggtccccggctcggacggaaagatgtgcaggtgcgcgtcaatgatcttcataagtccctcctctgatccggcggcgcagccaggccgcgcccccattcaggccaatggccagcagtgtggagagcaccgccaccaggaaggggagcagccagctccgctccatggcccaggcaaagcccggcacagtgtcgctccactccttcatcaccccgtagatgggcacatgaaaggcaaagatataaaaggtcagctcccgcccgcagcggcaggcggtcctcctcagcaccgggcttttcaccgccggaccggccacacaggccgccatcacgcacaccgcggccagcaccgtccccacatggaggtccaggaattccgtgcggctgcgctcccacagcgccagaagggaccccgccgccgcccccagccagagccagcccggccgcagggcctcgatccgctcccgctgcgatcccatacaggtgcccaggaggaagaagggcaggccgtccagccacacgtttcggatgcgtacgctgtccactgccagcccctggagactccggccctcccccagcaccaggtggacggccagcaggcccagggccaggacggccagcaggcggtggggcaggcggccccggagcagcgcggtgaggccccaccacatcaggtagatcatcagcagcgcggccagaaaccacagcggccaggagtagggcaggggaaagagctgccacagtaccagcgatgctgcgttggcccaggtaaagcaccccagaaggtaggcacccatggaggcaccgccgtgtttggccatggcgcacccaagacccagcagggcgaggcaggcgaagagcagcaggccggcggtgcggaccgtccggcgggccagcacacggggcggactgcgccagctgaagaagccggcggagaggaaaaacagcgggaccgcaaaccgggccaggcagttcaccgccaccccgatctgtcccggaaggaggatatggataaagatgacgctgtaaatggcgacacatttccacaggtccagcttgtcgttgtgtccgctcccgcgctccatgcgcctcacctcctctggcctgtaacataatattatatcacagccgcccgggaaagaaaagccgagtctgtcccgatcttcctccctctctcattgagttgttgtccacaacttcaactttaaccgatgaggcattgtcctccatcctttttattcatctgtccagcatgtattgtactcctacagtaggcgaacgaccgggggcaaaatttttctttacaggggaagcgggctgtggtatgatgccggggacgagttcccacatctcgtccaagcacggtcgtgagacgcgccgtgttcgttcgggaggccctgcctctcgttctctaaaaaagaaaatggaggtttttttatgcgcaaatttaccacccgagacctgaccctggccgctgtcctggccgctgtctacgcagcgctcaccatcactctgcccgtgccccagtacggagcggtccagatccggttcgccgaggccctcaccgtgctcccgttcctgttccccgccgccacgccggggctgtttgtggggtgcatcatcgccaacctgttttctcccttcgtgctggatgtggtgttcgggtccatggccaccctgctggcctgcctgtggaccagccggatgaccagccgatggctggcacccctgccccccgtgctgtgcaacgcagtgatcgtgggggcggagatcgcctgggcggagaccggcattactcctgcgttttggacggcattcggcttcaacgcggtgacggtggggctgggtgagctgatcgcctgctatgctctgggctccctgctgctgtccgcaatgcctcaggtgccctatttcagggggatgatcccggccgagcggctggagcggctgtcttcccgtgcggggcgggagcgggcctgaagatagaacgagaaagagatcaccggtcgggagagccgtccggtgatctctttttgcgcatgtttggggtgggacatgcataatctggagggtgtgagagcaatcaggggaaaggcgggagggcgggacatgagattccaggggcgagacgccgccagggggcggaggatgcggaaggatctgggccggacggccggagcgggggtggccctggctctggtcctgttcctgatgcccgccctgctggtgcggcagggggaattttcccaggagcttctgccccagggaacactgcccctccatcggacgccgtccagcgtctcggccgccagccaggaccgggggcgggtagtgcggctgagccgatcggacgggacagtggaggagctgaccatggaggagtacctgtggggggtggtggcagcggagatgcccgcttcctttgaggaggaggccctgaaggcacaggcctgcgccgcccgtacctatacggtcacccttcaggaggcatccagcccccggcacccggacgcccagatctgtgatgacagcggctgctgccaggcgtatctggaccgggcggaggcggaggcccgctggggggccaatgcggaactgtacagcggaaagatccagcgggccgtggaggagaccgatggactgggggtgctctataacggggcgcccattcaggcggtgtttttttcctccgctgcaggccggacggtgggggcagtggaggcatgggggaattcggtggactatctggtgggagtggagagcccggagggggaggaggtgcccaactaccacagtcaggtggtcctgacggcggaagaggtcaggacggcggcgctggcacagtatccgggggcggacctgtccggggatccctcagggtggttctcgcagccggtggaaaattcagccggcggagtggcctccgtggatctgggaggcgtcaccctcaccgggagcgaggtgcgggctctgttcgggctccgctccgccagcttttccgtgtcctgggacggggaagccttcacctttgacgtcaccggctacggacacggggtgggcatgagccagtacggggccaatgccatggctagggaggggagcgatttcgaggagatcctcacctggtactacaccgggacagaggtgggggagctgtacggagcggcgggggaataagatcggggaaacagcccccgccgcaccggaggcccctccgcttctgacagagggccgtctcgtccgcagcggccgcagcacataggaagagcaccagatgcgggaacacggcctgatgaggggtggaccagagagcagaattcaaagaccatcccgcgggggggtctccctatatgagcacctggagcaacagcagagccgcagatgcaggccggcctccgaatggcattgggaagaggcggggatacaaaaagggctccggcagcttctgactgccggagcccttccatatttcatccatcaaaggtcaatatgccacgccccagtagatcatgtgcttggcgggcttgccgcaacagacgcaggtgtcgcccactgcctcctgcttgaggggcatgcaccgggaggtgaccccggcctgctccttcatcttcagctcacactccagctcaccgcaccacatggtcttggcgaagccgccctcgccctccatgaaggacttgacttcgtccagggtgcggcacaccttggtgtggtcctccagattctgtttagcccgctggaacagtccgtcgtggaccgcgtccagcagctcctgaaccttagcctccagctctgccagggggacgaagaccttctcgccggagtcccggcggcagatgcagcactggcccttctccatgtccttggggccgatctccacacgcagggggacgcctttcatctcgtactgggcggccttccagcccatggactggtcgctgtcatccatctgggcccggatgcccgccgctttcaggcggtccagcagggcggcggcggcgtccagcacgccctccttgtgctgggccacggggatgacgatggcctggatgggggcgatgcgggggggcaggaccaggccgttgttgtccccgtgggtcatgatgatgccgccgatcatccgggtggacacgccccagctggtctggtgggggtagtggagctggttgtccctgccggtgaaggtgatgtcaaaggcccgggcgaagccgtcaccgaagtagtggctggtgcccgcctggagggccttccgatcatgcatcatgcactccacggtataagtctcctccgcgccgttgaatttctccttatctgtcttgcggccccggaccacgggcatggccagcacattctccatgaagtcggcgtagaggttcagcatccgcatggtctcctcccgggcctcctcctcggtggcgtgcatggtgtggccctcctgccacaggaactcccggtggcgcaggaaggggcggctggtcttctcccagcgcaggacagagcaccactggttgtacagcttgggcaggtcccggtgggagtggataatgtttttatagtgctcacagaacagggtctcagaggtgggacggatgcagtagcgctcctccagcttctcgctgccgccgtaggtgacccaggcgcactcaggggcaaagccctccacatggtccttctccttctggagcagggactcggggatcagcatgggcagatacacgttctcgtggccggtctccttgaaccgacggtccatctcccgctggatgttctcccagatggcatagccataggggcggtagatgaacatgcccttgatggaggagtagtcgatcagctccgccttcttgcacacgtcggtgtaccactgggcgaagtccacctccatgtcggtgatctgctccacctgcttcttcttgtcattggccattctagatccgtcctttatcatcaaactaaaaactggcgcggccccgcagggccgggcatcagatcaatgtgtcccatccattttataaacagaaccgggaaaagtcaaggaaaacaagcggtatgggaggcccagacaaggggaattctatatcctcagccacgccgcggcagcggacctggtaggctgaggcggggcgagaccgggccttttccttgcgcgtgggccgattttgtgttacaatgacccgaaatgcacagagcaggcggcagaggatcatccacgccgcctgccggggagacgagaaagagcgatgacacgatacgacgcaggagaatttgatgtggccgtcatcggcgcgggccacgctggcattgaggccgccctggcctgcgccagaatggggctgcggacggcgtgcttcaccatcaacctggatgcggtgggcaacatgccctgcaacccggccatcggcggcaccggtaagggccatctggtccgggagctggacgccctggggggcgagatgggccgggcggccgaccgggcctgcatccagtaccgcctgctcaaccggggcaaggggccggcagtctggtccctgcgggcccaggcggaccggcgggaatatcagaaggtgatgaagcacaccctggagcgccaggaaaacctgtgggtgaagcagtccgaggtggtggacatccttacagacggaggggcggtgtccggcgtggtcacttacaccggggcggtctaccgggtcaaggcggctgtggtggccaccgggacctatctagggggacgcaccatcgtgggggaggtggtccgggactccggtcctgacggcctggctgccgccgtccccctgacagcgtgcctgacggggctgggcctgaccatccgccgcttcaagacgggcacgcccccccgagtcaatgcccgcagtgtggacttctcccgcatggagcggcagcctggggatgaggaggggctggccttctccttccagacagagcgcccgccggagaaccgggcggtctgctggctgacctacaccaaccagcgcacccacgacatcattcgggccaatctggaccgctcccccctgtacgatggcaccatcgagggggtagggccccggtactgcccctccatcgagaccaaggtggtccgcttcccggataaggagcgccaccagctcttcgtggagcccatggggctggacacggaggagctgtacatccaggggttctcctcctctctgcctgaggaggtgcagctggagatgctgcacaccgttccggggctggagcgggcggagatgacccggtgcgcctatgccatcgaatatgactgcgtggaccccacccagctggaggccaccctggagagcaagcaggtgccgggactgtacggagcgggacagttcaacggctcctccggctatgaggaggcggcggtgcagggctttgtggcgggggtgaacgccgccctgaagctgttgggccgcccgccattgatcctccgccgggaccaggggtacatcggggtgctcatcgacgacctggtgactaaggggaccaacgagccctaccgcatgatgacctcccgcaccgagtaccggctgctccaccgccaggacaacgccgaccgccgcctgactcccatcggccgcgggctggggctggtgagccgggagcaggcggaggcggtgcaggtcaagtatgaggcggtggaccgggaagcggcccggctggagcgggccgggacacctccctccgctgccttggacaccctgctggcggagaaaggggagcctccggtgcgggacggggcccggctggccgacctgctgcgccggcccaggatcacctatgaggagctggctcccttcgacccggagcgccccccccttcccagggagattgtccgggaggtggagatcaccatcaagtatcagggttatatcgaccggcagctgcggcaggtggcggagatgaagaagctggaggaccggcctctcccgccggacctggactatgaggccattggcggcctgcggctggaggcccggcagaagctggcccagatccggccccggaacctggggcaggccagccgggtgtccggcgtctcccccgctgatgtggcggtgctgatggtctatctgggcaagtgaggacaaaggagaagaagatgaagctgacacaagtgaagggcagcacctgggtgctggaggccaacgagctgatccccctgtacctgctggacgaccggcggtgtgttctcctggacagcgggctggccaaggagcgggatgagatcgagaagaccctgctggaggcggggctggagccggcaggcatcctgtgctcccacgcccatgtggaccactgcgccaataaccggtattttcaggagaagtaccacctccccgtggcactcaccgccccggaggcggggatgtgcagcagtatcctgaatttgaagtgctaccggctgctggtctcccccgatgcggcggagcaggagatgagcgagatggtgcacgtcccggacctgatcctcccaccggtggacgggcccatccggctggcgggagccatgttccgcatcctgcacacaccggggcactcctccggccacatctgtgccgtcaccccggacaacgtgtgctacaccggggacgccctgatgtcccaggcgctgctggacgccaagctgccttacggcctgtccatccagctggccatggagagccgggagcggctgcgggagctggaggactgcgacttctttatcatggctcacaagggggtgtgcgccggaagagagatcggccccctcatcgacgccaaccaggagctggtgcgccgccgggccggagagatccgggacctgatcacagagcccatggacttcagccaaatctgccgggcggtatgcacccggttttccctgctcacccggcggccccgccgggcgctgtactacgagcggaacatccgcctgtttgtggagtatctgatggaccagggggagctgggcatggagacccgccaggggacggccttctacctgccatcaaagaaaatatgaggacagtataaccgggccccggagatatttgatctccggggcccggtaaattctgtgcggaccgttaacgagcatattgctgccagctggtcggcgtatattcaatattatataatttttgcgggtagataataacaaggtttaatatcaagaaattacagaaaaattaaaccaaaaattcgaaaaatttatttcagaaatagaaaagctcctcaaattttttgtccagcgcgatgcacagcaccagggccagcttggcggtggggttgaactggccggtctcaatggagctgatggtctggcgggacacgcccaccagcttggccaggtctccctgggacagaccgcgctccgcccgggccacctttaagcgatttttcaagaccagctgttcatccatgtcctcaccatccctgtgtgaagtatcttaccagattccaggccaaaaaagcaagagagattagcagcgtcaccacgtcggaggtgttcctccgcttggtgagacggtagaggcggttgcccacacaggaggcccagaacatggccagcacactgttggcgggcaggccgtggagccggttgaagatcacgatcactacccccaccagaaagaccaggatcaggctgaaggactccccctcgatgcggacagtgcgctccatctcgtcctgaaggacgttttctttgcggcttttcgccaggatctcttccttgttcatggatcatgctcctttcttttctcattgggcgggcaccagcgccagtaccagcagccgcagcattcccgccagcagggccagcaggaaaagggcggacagcagcacaaacgtcagtaccagcctggccggccccagcggtctggccgggctcacggcagggtctccaggatgtaggagaccagggagaagagggaggccagtccggccagcactgcggtggccagcacgctcttttccttccgggcaaagtagcggcctgcggcctcgcaggagagataggcccaaaacagggtcaggggcagggagttgtccagcccccggaccatgttgtagatcatgatgacgagaaacagcaccagaaatcccaccacgccgtactgccggccccggtcctgggcataggtcaggccctcgtccttctcgcggcggctccgcttcagaatgtcttccttgtccatcatagcagcgctcctttcgtttggtgaggcaagcatatcacgtcaccccaaaattgtcaagtaaaccttgcaaaaaaataataatactttgcaagatgacaagcgtaataagatgacggggagcggcagagggccgctccccgtatgaggtcaggaacgaaacgagagcctggagtctggctgaaaggggaggcggccggggttgccctccgcacgcaggagggtgccggaggccgtgtcatagagcacggaccagacggtgtcccggccctccctgcggtcatactggcacaggaagcccatcctgccggagagcaggtcctgtccagcttggaggtcgagctccgggccccaggcggccagggagcgggtgagggtcagatagcgctcttccgcccgccagtcgtcgtccgtctgccggcggaagggggccatggcggagaggtggaaggaattgacggagcagacgaaggcgtccgtctccccgggacaatggatctgggtgcgcttcggggcacactccgccagggcgatacgcccagcccggtcggccagcaccagcgtgtggcaggaggagacggggagctgccggagcagcgccagggcctggggaacatcccggcaggattccagcaggagccgcagggtcagaccagcattcagcccggggcggggtgggctggggggcaccgaggtgagtcccgccgccagtccgaactgattgacgccgtcctccatctggaggaaggaggtggtgttgcccacaaaagaatagccgccgtcggaaaaacggtataggcagttggcgttgtgctcttccagctccgtgagaaagtcgctgttccggccgaacagggcccctctccccctgcgcagggcaaagcaggagcagcaggggccgggcggcatggcgtacatggagaagaggaccccggccagttcgtccggggcacacccctgcccctgggccagcccccgcagctcctccagggcggcggggaaccaccggcggcagaggggcaggcaggtccgggcaaactccagccgcgccggggtgatgggaaagggaacagcgtccaggataaaatggccgtcccgggccagaccggctcccagctggaagccgatctgccagtgtgtgccgtgcagttgtgtgtgaagcataaaaacgctccttttctgttcagatctcagagtaaagagcgcggcgccgcctctcaaaagaacggtagcacaattaaaatattggagcaaggccgatttattttttaaatttttttattccaggccgtttttggagggctggcccggccccgctcctgcaaaagactttgaaattttggattttgggcgggaagggcttgcatttgcggggaaaaaacgataaaattccaaatatctatgtcaaatgatgaaatggcccccgggccgggaaaggatactgctatgagtgagacatttcagggaagccaggactatgtcgcttccgaggaactgatgcgggcggtgaatatcgctatggtgctccagaagcccctgctgatcaaaggggagccgggcacgggaaagacggtgctggctgaggccatcgccaaatccctgggcaaagagctgatcatctggaatatcaagtccaccaccaaggcccaggacggtctgtatgtctacgacgtggtccagcggctgtatgacagccaattcggcggcgagggcgtggacgacatcgagaagtatgtcaagctgggcaagctgggggaggcattcaccgccgacgaccaggtgatcctgctcatcgacgagatcgacaaggccgatctggagttccccaacgacctgctgtgggagctggaccggatggagttccacatcccggagacgggacgcaccgtcaccgccaagcaccgccccatcgtcattatcacctccaatgcggagaaggagctgcccgacgccttcctgcgccgctgcgtattccactacatcgagttcccagaccgggagctgatggcagagatcgtcaacgtgcacttccaagatctggaccagcatctgctggaccaggtgctggaggcattctaccgcatccgcagcctgccccagatcaagaaaaagccctccaccagcgagatcatcgactggatacaggccctgatccacgggggctatgaccccgaccgcgtcgtggccgaggtgccctatctgggcgtgctgctgaagaagaacgaggacatcgacgccctgcgcaagagctggcggtgatggtatgttcggtgattttctctatctgctgcgccgcagcggcctgaagatctccctcaccgagtggatggctctgatggaagccctggacaaggggctggagggggccagcctcactggcttttactacctgtgccgggcactgctggtgaagacggaggccgacttcgaccgctttgaccgggctttcctggagtacttcaaggacgtgcccttcgagcaggaggtgtcccaggagctgctggactggctggaccgccccgatgctctgatgggccggtatgacgagcagcaggccgagctcaatgagctgctgtccaacacggagatcgaagagatgttccgagagcggatgaacgagcagcgggagcagcacaactgcggcaactactgggtaggcacccacggcatgtccgtcttcggcaactcgggcatgagccccaacggcatccgggtggggggcgagggccagggcaagcgggccttccgggtggcgggcgagcgtcgcttccgggatttccggggggacaacaccctggacacccgccagttccaggtggccctgcgccatctgcggcagttctccggcctggtggacctgcctgccactgagttcgatgtggacaacaccatcaaggataccgccaacaacgccggctccctgaaggtgcgctataaaaagccccggcagaacacagtgaaggtgctgctgctcatggactccggcgggtccatggagtattacagccgcctgtgctccgctctgttccaggcggtgagcaagtcgggccatttcaaggatctgaaggtgtactatttccacaactgcgtctactcccgcctgtacaccgagcccaccctccgtcccagcaacacggtgcccaccgactgggtgctgagcaacctgtccagcgagtacaaggtcatcctggtgggggacgcccagatggctccccacgagctggtgacccagttccgctaccgaactccggatggggaggagcacaagcgctgcggcttggagtggctccagatgctcaaggggaaatatccccatatcgtgtggctcaatcccggcgaccggcccacttggggggagtactggacccggacctatgataccatcggccgggagttccccatgttccccctgacagtggaggggctggaggaggctatgaagaagcttctggtgcggtgagcaccggttttcctggagcgggccaaggccggacgcggggaccccgtgctccggcctccgtttttctctgtgcccggggcggaagagacccatcttgtacttgtatttttacgggaaatagaataaaatatgaccagtatcagtatgaaagcccatccagagggcgcgccgcgggagagcccgcctcagggcccgccgtccgccgcggccccggccgccctggtgaaaggaaggatgcaaccatgaaactggaaaacgatctgggcgagatccgcatcagcagcgatgtgtttactgccattaccggcagcgccgccaccaactgctatggcgtgaagggcatggcggtccgctccaagaccgacggcctggtccatctgctcaagcgggaatccatggccaagggagtcaaagtatattacaacgaggacgggaccgtctccatcgagctgcacatcatcgtggaaaacggcgtcaatctggtcgccgtctgccgctccatcatgagtgaggtgcgctatgtggtgagcaagaccaccggcgtggaagtgagatccgtggacgtctttgtggactccatgcggttttaaccatttgtagaaaggaacatcgccgatatgacacagaccattgacgcagcggcctttcagcagatggtcatccatgccgccgccgccatcagtgcccagaagcagcacatcaacgacctgaacgtattcccagtccccgacggggataccgggaccaatatgagcctgaccatcagcgctgccgccgcggagctgaagaaaaagcagtgtgccaccgtgggagaagcggcccagacagcggccagcgccctgcttcggggggcccggggaaactccggcgtcatcctctccctgctgttccgcggcattgcaaagtccctcaaggaccgggagaccatcgacggccgggatctggccatcgccctggacttcggcgtggccgccgcctataaagcggtgatgaagcccgcggagggcaccatcctcaccgtgtcccgcctggctgccgctcaggccgccgccgccgcccgggaagagaacgcggcggagtccgtgctggaggccgccattcgggaggggcaggaagccctggccgacaccatcaaccagaacccggtgctgaagaaggccggcgtggtggacgcggggggcaagggcttcctggtgatcctccaggggatgctggacagcctgcggggagagcccatgcctcaggtggaggaggagtccgccccggcggacaaggccgacttcgtggccatggccgccgaggacatcaccttcgcctttgacaccgtattcatcgtgcgcaaacacactgaggaggtggatctggagcccttccgcacctatctgaacagcatcggggacagcctggtcatcggagaggacgacacggccttcaaggtccacgtccataccaacatccccggcgccgcccttaccgagtcccagaagtacggcaccctggagctggccaagatcgagaacatgcgcacccaggccgatgacctggcggcgggcaagcatgtgcagagcaccgacgacctggaggcggtggaggccgaactggaggccggcgccgacggcggggcgccggtgaaggccgccccggagaagaagtatggctttgtagccgtctgtgccggacaggggctggaggctgtgttccgtgacctgggggtggacggagtcatctccggcggacagaccatgaacccctccaccgaggacatcctgcgggaggtggataagactcctgcagagatcgtctatgtgctgcccaataacaagaacatcatcatggccgcggagcagtgcgtgcggctgtgcgaggacaagagggtggtggtcctgcccagcaaaacggtgccccagggcatctccgccatgctggcggtggacttggatgcccaggaggaggacaacacccaggccatgactgaggcgcttcagaatgtccacaccgcggaggtcacctatgccgcccgggactccgactttggcggcttcaccatcaaacagggggactatctggccctggaggagcaccagctgttcggtacggatcaggacctggacaccctgctcacccggctggcccaggccccggagcaccaggatgccggcttcatcaccatcttctatggcgaggatgtgacggaggagcaggcccaaaaggccgcggatatcttcacggaggcgtgtccctccgccgagatcaacctgctgcccggcggacagcctgtgtattattacatgatctccgccgaataagtgcaaaaacatcgggagcagcctaaggctgctcccgatgtttttttggatattccatgcaggatgtaaaagaagaggggatgaggagctcagccctccccctggacattggggtcggcctccggcttgtagaagttggtcttcacacggacctcccgctcataggggaccacgccggcctcgcgggcggcggtcatggagcggagcagccaggccatattgtcccccaccaggcgcagggtctgcatcccctccagatccgcccggacctcctccggccggtccccatggacgccgttccaatactgggaggacaccaccggcatggaggagatggtgaagtacttgttgagctggtcaaaggtgttgccggccccgccacggcggcaggtgaccacggcggcggcaggtttgtagaagaacagccgcttggcgtcgtagaacacccggtccagcaggcacttcagcccccccgcgatgccgccgaaatagactggggagcccaccaccaggccgtcggcctggatgatcttctggatgcactgattgacgctgtcatcgtcgaaaacacagcggcccttgccccagcaggatctgcagtcgatacacccccggatgagctgattgccgatccagaagatctcggtctcgatctcatgcttctggagctgagccgccacctcggacagggcggtgtaggtgcagccctctttgtgggggctaccgttgatgagcaggactttcacacgtatctcctcctttgggcatcttgagccctttcccatatgctcccattgtaccgcgccgggccaggatttgcaatgagaatcgaaaacacgggagagatcgggcaaaagcgggaaaaaatgggagtctcccaggcgaaagattctttaccgggcgtgctccgcgtgatacaataaaaaaataacccggaggcggccctgagcgcggacaggccggcctcggaggagaagagaggcggagcctatgcatgagaagctgatccgagagatcaacggggagatcgccgacgcgctgctggcgcggaagatgccctttgcccccagccggaaggcggcgctggccctgctgaaggtgccgggatggacggaggggctggagcagatgctgcccatccgggggcggctggagtgcgcccatgtgctggagctgtgctcctgtgtactgccccggctcgccccccggccggaggaggggtggctggccttctgcacccagtacgcccgggagcggatgtaccccggtcaaggcttcgcccctgatcgggaggagtatgaggcgggggccctgtttttcctcaccgtcctccaggtgatgctggaccgggagcggagggcggtgcccttcgaccccctgaaggacttccagttcctctcctcagaggaaatgggggaatatgagtgcggggaggagtaccgccgcttcctggccgccttccgggaggagtacgtctatgagatgatgcggctgagcgaggagaccacccccttccgcaccctggggcacatcgcgggggtgcattacatcgccatgaccgtggcccggggcatccgggaggcgggggagaacgtagacctggcgctggtgtccgctgccgccgccgcccacgacctgggcaagttcggctgccggcccggggagcgtgtcccgctcctccactactactacaccgaccagtggctgctggggcgggggatgcccgccgtcagccacatcgctgccaaccactccacctgggacctggagctggacaccctctccatggagtccctgtgtctgatctacgccgacttccgcagcaagcagggacgggatgagcaggggcgggagaccaccatcctctatcccctggaggagtccttccacatcatcctgaggaagctggagaatgtggaccaggcaaagcgccgccggtatgagttcgtctacggcaagctccacgatttcgaggactacatgcgctctctgggggtggacgtagacctgaccgggcagccgggggcgcggaagccccccaaggacccggccctgatgcccccggacgagacggtggacagcctgatcctgctgtcggtagagcacaacctgaagctgatgcaccagctgagcagcgagcggaagttcggcaacatcatcgaggccgcccgctcggccaagagctggcagcagctgcgggcctatctggatgtgttcgacgagtactgcacctatctgtccgtgcggcagaagacccaggccctggccttcctctatgagctgctgatccaccgggagggggatatccggcgccaggcagccagcctcatcggaaagatcatcgccaaattccacctggtctaccgcaaggaggtgcctgccgacgcccgcactgacccggcggaggaggtgcccttcaccctgtgggaggagtatctggacaagctcatctaccccgaccacaagaccaccccccagcagcggggccagatcggctataccctgaagctggtggtggacgccctgctggaatacggccggagcgagaccatgccacgcttcatcggggcgctgctgcgctactatgaccggccggaggagaaggacgaggataccgccttcaccctgctggacgccatccgctatctgcccgcccagcaatatgaccaggagacccggggcggcctcatccgctttgcggcctggttcgccgcctccggcaacctgcgcctccaggcggcggccctccagttcctgcgggaggcccagcgctccctgccccaggatcacccccagatggctcagatcgcggcggccgcccggtctgccgccggcgggagcctgccgctgctcttcctgcggtataaggtcctccagcgggcgggggaggacgtgtccgactatcaggcggccctgtatgagcaggacgtgaccagcgagatcttcctggacaacctgaagagcgccacacactggatcatcaaggtggtgggcatcgagctgctccaggaccaggtggagcacggcctgcgggagcacatgctccacatcgccacccacttctccaacctggtgaaggtgtccgagcgggtgggcgtccgccacgccgccggcgaggccctggtccgcctgatccccctgctgcgccgggagcagcgcaacgaggtggtggtggagctgggcaagggcctggagatgggccagtaccagatctccaagtatatcccggagtatctgggccgggctgccctgtccctccaccccagcgagctggacgagcaggtgctgtggctgaagaacctgctgggctcccccaccaacatcgccgtgtccggggcgctgaataccgtgggggtgctgctccagcactaccccgcctaccgggggcgcttccctgagccggagcgggcctatgaggcccgccgccaggagctgctgggcctgctgctccaggggctggcccactaccgggaggaggtgcggcaggaggcccttctggtcaccgggaccatgctcttcgacagcccggtgctctccatggaggagaagtcccgcctgttctccctgtgctaccgcaagctcctcttcctcatccaggcgggcccccgtcaggacccgctgaccttcttctaccgggcttccgccctggcccacatcaaccgcttcatcgccctgcggcggttggacaaggggcccttcgccttctcccagccccggaagatcgcctttttccccggcacctttgaccccttcaccctgtcccacaagggcatcgcccacgccattcgggagatgggcttcgaggtgtatctggcggtggacgagttctcctggtccaaaaagccccagccccacatgatccgccggcagatcgtcaacctgtccatcgccggggacttccacatccacctgtttcccaacgatatcccggtgaacctgtccaaccccagggacctgcgccgcctgcgggagctcttccccggccaggaggtctatctggtggtgggcagcgatgtggtgggccacgccagcgcctatcaggccgcccctgtggactggtcggtccactccatggaccacatcatcttccgcagggcgggccagccccccctgccggagggaaaggagctgggcatcaccggaaaagtgatccagctccagctgcccccccacctggaggacatcagctctacccgtatccgggagaacgtggacatgaaccgggacatctccaccttcatcgacccggtgatccaggacttcatctatcagaacggcctgtacctccgcgacacccaggacaagcccctgctcaacgcccgggacctgtccttccagtgggtggagcggccggaccccctgctggtggccgatgtcactgctgggcaccgggagcgggagagcctgcggaccgctatcctccgggacggggaccagctgctggtgctgcgccaccgtcgggagggcggggagcccatgctgggttggctcagcttccgctatctgtctacagccgacctctactccgcgtttcaaaacgccgatctggcggaccaggtgcgcctgcgggcgggaggtaaaactttgttcatcaccggcctggccgccgaagaggagcaggagaaggactatgcccagctgctggtcagtgaggtgctctcccacgccctggaggcggagtgcgtctacgctgtcttccacccccacgaggggctgtgccccccggagacagaggagctcttccggcggcagggcttcatccgccgggatggggggccgctggaggccgatctgcgggccccggtggtgctgctccagaatttggagaccaccattcaggagcccctgagccgcaaccctagggtgctcgccgccatccggcggggacaccagcggctcgagaccgccctcaccggcctgtatccaggcaacctggtcctcaccctgtctgccgacgtgatccaccaccggctgctgcggatgatcacccagttcaaccaggtgccccaggagcccaccaccccccggaagctggggaaatatatgtgcgtccccttcggtaagctgctccggggcaagactgtgcccaacacggtcaccaagaccatccacaccgaccgggtgtactcccctgacctcagcgagagcaccatcgaggcatttcccaactacgcctccatcccctgccaggtgcgcaccatcaaatcctttgaccggcccgtcatcctggtggacgacctgatgcaccccggggtgcgcatcaaggccctggaccccgtcctgcgccaggagggggtggacatccagcttgtcctggtgggcatcctctccggctacggccgggacctgatgagtcagcagaagcggccggtagacagcgtgtacttcctgccctctctgcggcagtggttcgtggaggccaccctgtaccccttcatcgggggcaacacagtgcgccgctcccggcccccagtccccggcctgctgccgggaatcaaccacatcctgccctatgccgtccctcccttcgccaaagagtgcggggaggaggccgtcttccaactctcccgctgctgcctggagtccgcccgggatgtgatcggcaccctggagcgggagtaccgggcactctacggccggaatctgactctgggccggctggctgaggcggtcatcctgcccctgtgtcccgacaagggcacctgcctgggttatgaccccaacttggccgcgtcggtctatctggagaacgacctggagcagctgctgaggacccacccccggggctgacctccgccgactgctggaaatgatctgcgggaaaccattgcgaggtgtaatattatgttctattattatgaaaaggctggaaagctcctggcctctgagcggagggacctcccctatctcaaggcggagcccgccccggggactccgatctgctatctggtggagggggacccggtgctgggccggggctccttcaaggtgaactgtccgggccagctgagggccccccacggcctggaggtgctggacgcctcccgcctgccggactttcccctggacgcgcccctgtccgccgccctggaggaggggatgctcaccgccgtcaataccggccgggcggggtgggagcaggtgttgtcccagagggccgggacggagaaaaagcgggtcaatatcctggccatcggggacgtgggttccactctgctcaccgggctgaagctgctgggcggggatgtgatctcatccatcggcatctgcgacctctccgaccagatcactgcccggtgggagttcgagatggggcagatcagcctgccctgggactacggggcatttccggaagtggaggtcatttccctggaaaagctgtttgactgcgatgtgttcgtctttgtggcctcccggggcatcccgccggtgggctcccaggtgaaggacgtgcgcatggcccagttcgaaaacaacgccgccattgtgaagcagtacgcccgtatggcacgggcggccgacttccaggggctgtggtgcgcggtgtccgacccggtggaccccctggccaagaccgcctatctggagagcaaccgggacgagaacggcgtatgggatggaaagggcctgcggccagagcagatccagggcttcggcctgggggtgatgaacgcccgggcggcctactttgcaaagcgggaccccaggctggcctccttcctgacggaggggcgctctttcggcccccacggcacgggactgttcatcgccaactccatcgaccactacgacgaggaggtctcccgggagctgacccacaggacggtcaccgccaatctggtcatgcgggagatcggctttaagccctatgtagcccctgcgctgtcctccggagccctgtccatcctgcttaccctgcggggggcgtggcactgcggctccgtcttcctggacggggtctttatgggggtcaagaaccgctatacccctgccggggtggagaccgagctgctgccccgtatcccggaccccctgttcggccatatccgggaggcggcggagcatttaaagtcggtattatagagggaaaaccggtaaggacgcgatttgttgtgcccctgcatccgaatggaataacttgccctgcatgacaaagggggtgtcccatgagagaaaaaattttggcccaccgcatccgctggcttatcggtctctgtacatttctggtgcttttcggctgttctggcttccccatctataatttcaccacagggcggcagcttggcagctggtattttatgctaatgctctgtatcggttactttgaaatcggacagctcctgggtgtgctgtatagccggaacaaggtgtggagatcagctgccctcgccctcggtatgacgcttttggggctggcctgccggtttttgatggagtttggtgaggtgtccaatacctgcaactttacgccccccaatgtggcgctccacctctctgtcgctgcggtgatcaccgccctggggtccctgtcctttgtggacggtcggcggccacccctgggaaaagactgaactttccggtctctccgcacatcaacttttgaagaaggtgatctcatgtccatcattttgatccatccatacccgggccggccggaggcggacgtccgcctgtccggtatcctctcccacgccctggcggaccgggaggggaggaccatccgcaccgcggaggagctggacctgaggccgggagaccgggtcctgtttgccctggccctggacggggcgggacagaatttggagtattaccgcatgctctcccggctgcggcgggagccggacctgctggagggatgcaccgccgcgctgatcgtggatggccccggagagctgtacaccaaatccaccgccggagagctggccctggccgcagatatggcgggatgcgccctcatcgggcggccgctggtggaggggacgggctccctggccaacttccgcgtccaggccaaaaacctgggcaccgacctgatgggggcctatctggcggcggcacaggagctggtccagcgtctggacaccttcactttcccccaaaaggagcggcctgagctgctggtcctccacgcctccagccaccacacatccaacaccatggccctgtgggcaggggtgcgggagcggctgggggaggtgtgcagtgtccaggagatcggcctgcgcaacgggacactggacgactgctccggctgtccctacaccatgtgtatccacttcggggagaagggggagtgcttctatggcggagtcatgtcccgggaggtctatcccgcggtgcgccgggccgacggggtggtcatgctgtgccccaactacaacgacgcactctccgctaatctcactgccttcatcaaccgcctcaccgccttgttccgccagacccgcttctatgacaaggccctgttcgccctggtggtctctggctattcgggcagcgacttggtggcccggcagctgatctcggccatgaacatgaacaagtccttctatctgccaggacgctttgccctgctggagacagccaatgacccaggggaggccatggggctgccaggggtccgggatcggttggaccggttcgcggaccatatgctggaagtcctggcccggcgggcttgaagagggcccttctccctcggtgaaaggcatggcggggcgggggagaagattattccgcagacagcaaagggctccacacccatcaagggcgtggagctcttttgatccttcagcgctggggcaggtagctcacagggtccaccgccttgccgtcctgggccatctccagatggagatgggaggggcggctgctctcggcgatggcggtctcacccaccacgcccagcacggtgccggtgctgacggtgtcgccctccgaaacagttggcttggcgctgaggttgcagtaggtgctggtcaggccgtccccgtggtccactaccacgcaggtgcccatcaggtcgtcatcgtagactccctggaccgtgcccgcgctgatggccagcacgttggtgcccacgctggcggcgatgtccacgccgctgtgggtgcgccagtcgcccatggtctcatcataggccagcacctccaggctgaagccggagaggatctcccccttcaccggccaggtgaagacagcgggaacagggtcctcctccaccggctggaccgtctcggccggctcctcctccacggtctgggggagggaagcctcctggctcccgctgtcctctggctcggtcacagtaggcgtggtgggtgtggtgacagagggagtggtatgggggggagccgcattctggctgctgtcgggaaggaccacggtggggctgccggtgaccggttccgcctctccgggggtgctgctgacggtgcgaacaaggtaatagcccgaaattccaatggtggcgacacagaggaaaaggactatgtagaagccctttcccagtacgaagtcgcccagtttctgaaatacggttcgtttcatggaaccacctccgaagcctattgtggacaggcccggggatggttatacattccagagaaaaaattttatggaacttctgccctctgagcaaaaatcgaccgcgcgatgagcgcggcgggggactgccctcagatcatggaaggcagtccagagaaaagcagacccggtcctcctgctcttcaaagccggttttttgataaaagtggtaagcgggcgcgtttcttttggtctggagcgagatgttccgaaagccgtgctgacaggcataatttcggatcagctggatccacagggacccgaacccttgtccctgatgttctgaggcaatgcacaggtcgtcaatgcagtattcaatgccattgtaccagtgccgcagacggcccagagagatcccaatcaggacatcttccgaaaaaagtcccagggccaaagaattctgattgcccatcacgtccagaatataggaatgaaacacatcctcatcctcccagcggtcacaccagggttccgccgaaaaggcatcccggatcagtcctttgacggcctgctcatgcgccatccccaatacttttaacatcatttctgttgacctccttttctctgtttccataaaaaaagccagactgaaacagcctgactgatggtaggtgctcacccaataggtctattgttataatatcatattgcctggcaaaaagcaaccggagggaaaaaggccgccggaggaaatcgtctcctgattccgaccatgtttttccaaataatggattataatgtggggcacaacgttccggacaagccggaagctacataggaggagacgagatggcggccagagaggatctgaaaatgcggctgacgaggctgcgggggcagacggcccggctggggcggacagggctgagcggcccggcggtgctgcggacggcagaggtgggcatccatctaatgctggcggcggtgctggcaggggcggaggtgttcggcggcttcgcccccttcggcgtggccatggtgggggcatcaggcaccggactgtgcggcggggcggccctgctgggggcgggattcggctatctgaccctgctgggcttctctgatgcactgcgctatctgtccgctgccatcctgaccttcgcggtgggctttgccttttacgacatgaagctcttccagaggccctggaccatgcccggggtggcaggcctgatgaacggctgcaccggcttcatctatctgtcccaggggggctggcgaacagtggacgtgatctacttccttagtgagatcgccctgacggtggccgcggcctggtgctaccgggtgctgctgctgcctatacggcgggggagcggggagggggtatgctccgcagcccggcggaccggggccctggtcctggtgtgtaccaccttgatctccctctccaacctgtatctatggaaggatgtctccttcggccggacgctgggagcctgtctggtgctggcgggggcctggcagggcggactggcggcaggagccgtacttggggtgaccatcggcttgtccatggatctggcgggctcgggcgtcccactctacgccatggcctgggggctggccgctctggcagcaggggccttccggggcaagaaacgggtgtgggcggcggcggccttcgcggcggcggacggggccgccgtcctgtggacctgggaccgggggctgaccctggccatcctgtatgaggtgtttttgggttcagtggcttttttcatggtgccggagcgccagtggaagcgcttgggaggcctgctggccccagcccagacggcgcccccggatggcagggcccagggctatgtgcagaaaaagctggaggccaccgccgccgccttccgtaccttgtacgagtccctgcggggctccttccgggtgccggagaacgacaacgatgtggcggcggtctttgaccgggcggcctgtcgggtgtgccggacctgctccctccggtccagctgctgggagcgggactatgtgaccaccttcaacgccctcaacgacgccacggcccccatgctggagcgggggcggggagtggccagcgactacccccgctacttcgccgaccgctgcctccacttccccgcctttgtggaggcggtgaaccaggagctcaccgccctgctctaccgccggcagtacaacagccgcatccgggagagccgggcggcggtgtgccggcaatatggggagctgtccgcccttctggggacggcggcggcagagctgagccgggagctgatcccggacccggcaggcaatcagaagctgaggcggcacctggctctgctgggactggagatggagacggcggtgtaccgggacgagtacggccgtctgcgggcggagctgaagggggagggatgccagactctggacacaccggaggagttggccgccctatcggatctgctgggtgtgcctacccgagcggaggcgggggaggagagcctgactctgatccagctggagccgctgatggcggtggcgggcgtggcagcccggaagaaggacggggagacggtgagcggggacgccgggacctacttcaagcgggaggacggcaccctctatgtgctgctgtgcgacggcatggggagcgggcccggggcgggccgggagagctccctggctgtccgcctgctggagcagttcctgatggcgggggtggagacgggccacgccctggccacactgaattctgccctgccccttcggggagaggaggagggggggttcaccacagtggacctgctccaggtggacctgttcacaggggagggggcggtgtacaagctgggagctgcccccacctatgtgcggagagggagctcggtgcggcggatcgcaggcagctccctgcccgctgggctggccccttcggagcacgcggtgcccgaccatacccggctgcggctggaggcgggggactgcgtccttatggtcagcgacggcatcgccggaactggggacgacgcctgggtccgggagcggctggctaaattcgatggggagagccccaaggagctggcccggagtctgatcaccgacagcccggagggagccaccgatgaccgcaccgccttggtggtgcggatcgcgcggagaacgtagaggtcaagtgcgcggaccctttgcctggcagcaaatgcccctggcggccgtatggatgcggccgccaggggcattttcctacgggatcaaagccgcccctggagcaccgggatgagaaggatcacggccagattgaccgcacataccagcgccagggacagcagctgctccttggattcatcgtccatctccgcccctccttcagatctcttggcaagatccagtgtacggcgggccgggccggaatatacccggtaaaattgggcaagaataactgtgtacacagggggctcacggcaggggccccggaaacggaggaggtatctcatggtcaaaggcatcacacgccaggtcatcctggtgaaatccccggaccccaagctcttcgaggaggccattttcattgtgaaagaagaggcattggccagagagggggtcagcgcggaccaggtcatccgggaggccagacaggcggcggacggctatctccgccgcagccgggcatggaacgcccggggcaggcagcttcccggaccggcctggggagctgcgggggcggtcctggcctcgctggcctgggggctgggtctgtttctgctgtaacagacctgaggcgcatgcatacaatgggatgtggaccgggcggcggcggacccgtctgcccgggctcccggtccaaggctgataaaggagcttacttatgtgcggtatctgcggattttgtgattttacccgggacaacgcgggcccggtctggcgggaagcgggagagcggatgggggagacccttgcccaccggggaccggatggaaagggactctggcagggagcggactgcgtcctggtccaccgacgcctggcggtcatcgacccggagcgggggcagcagcctatggcccgggtgcgggacggcgtggaatatgtgttgatctacaacggcgagctctataacaccgatgagctgcgccgggagcttcggaagctgggcttctcctttgagacggagtcggacaccgaggtgctgctcaacgcctgcatcgcctggggggatggggcggcccaacggctggagggcatcttcgcctttgctttctgggatggggggcggaggcggctgatgtgctgcagggaccggttcggcgtcaagccattcttctatgcctggaaggacggggcactggtgtttgcatccgagctgaaggcactgttccaatatccgggcctagagccacggctgggccggcaggggctgtgcgaggtgctgggcatcggccccgcccgtacagcgggggcaggtgtattcgagggggtccgggaactgaaggggggctgtcagctgacggccggcccggagggcctccagatccgtcggtactgggcactggagagccgcccccacgaggacggctacgaggagacggtggagaaggtgcgccatctcctggagggagcgatccggcggcagctagtcagcgacgtgcccctgtgtaccttcctgtctggcgggctggactcctccatcattaccgcggtggccgcccgggcctatcaggagcaggggcgggagcccctggagacctactcctttgactatgtgggcaaccggaagcatttcaaggcgtccgctttccagccggacgccgacgctccctgggtaaagaaggcggtccgggcactgggtacccgacaccgggtgctgcggtgcgacatcccctccctgctccagctgctccctgaggccgtggaggccaaggacctgccggggatggcggatgtggactcctccctgctgtatttctgccggaaggtggcggagcggcacacggtggccctctccggggagtgcgctgacgaggtgtttggcggctacccctggtttgagcggtcggagctgctggaggcggacaccttcccctggtgtccagacctggagttccgaagggcggtggtgaagccagagctgtgggagagcctccaggtggaggactatgtccaggcccgctaccagcagtccctggcggagatgccggacctgccgggggaggccctgtgggaacgccgccgccgggaggtcggctggctgtccctgaactggttcatgtccaccctgctggaccggaaggaccgcatgagtatggccgccgggctggaggtgcgggtccccttctgtgaccaccatctggtggagtatgtgtggaacatcccctgggcaatgaaggctatgaacgggcagcgcaagcaggtgctgagggacgcggccgaaggcctgctcccggaggagctgctccgccggcccaagagcccctaccccaagacccacgaccccctgtatgagcagctggtccgggccaggctgctcaccatcctggacgatcgggacgcccccatccacagcctggtggacgagaaagccctgcgcgcagggctgttgtccgacgcaggggactatggaaagccctggttcgggcagctgatggccgggccccagatgctggcctacctcattcagatcaacgaatggatgtcccgataccacttgactgtctgacctgcggtgacagtgcgtttctcctgtttgttcctcctgctttctggcgcgccccatccggggcgcgcttttttgtccctggctttatgatttcttaagaaaaccctaagagctcctttagagcatttgaagcaactgtatggtatcattcatacagtttcaataaaccattttggggcggcggagccgcctgcggcaaggagcgcatgaatatggaagaaatcttgaaggtcacagacctaaaaaaggtctatggaaggcggggggccgctacgacggccctgaacggggtcagcttttccctgagaggcggagaatatgtgggcatcatgggggcctccggctcgggcaagaccactctgctcaactgtgtctccaccatcgaccggcccacctccggctccatcttggtagatgggaaggaattgtccgacctgaggggaaaggaactggcccgcttccgccgggaacggctgggctttatctttcaggactgcaacctgctggacaccctgacggcctttgagaatatcgccctggccctgtccatcgtcaggacgccggcgggagagatccgggaacaggtggaggagaacgcccggctgctgggcatccaggactgtctggacaaatacccctaccagatgtccggcgggcagcagcagcgctgcgctgcggcccgggccatcgtcacccgacccgccctggtgctggccgacgagcccaccggcgcgctggactccagatccgcccggatgctgctggagcggctggaggagctgaaccagatccggcagaccaccattctgatggtgacccacgacgccttcaccgccagctgctgccaccgggtgatcttcctgcgggacgggcagatcttcctggaactgagccggggcgggatggaccggcgggcgttcttcgcccaaatcatccgggtagtgtcccaactgggaggagagatggaagatgttctctaagctggccctgcggaacgtccgccgctcctttcgggactacggggtgtatctgctcaccctcacctttggcgtgtgtctgttttatacctttaattccatcgacgggcagggggtaatggtctatctggctcagagccaaaaccccatggcccagctgatccagaccattctggatattttctccgtctttgtggcggtggtgctggcctgtttgatcctgtatgccaacacgttcctcatccgccgacgcaagcgggagctggggacctatctgctgctgggcctgagccagcggcaggtgtcaggactgctggtgctggagacgctggtcatcggcctgatctctctggcggcggggctgctgttgggcctagcggcctcccagggcctgtctgccctcactctgtccatgttctccatccgggtagacgccttcgccctggccttctcccctcgggcagcggtgcgcacagtgggctatttcggcctgatctttctgctcgtgatggtgttcagcggcatccaggtgtcccgggcccggcttatcgacctaatgcagggggagcggaaaaatgaggagctgcgggagaggcccctggggctggcggtggtccagttcgtgctgggggcggtctgcctggcggccgcctatgccatcctgctgacctttggcatggccatcgctgtggcggtcctgcccatctgtgcggccatgctgttcctgggcaccctgggcactctgctgatctttaagtccctgtccggctttgtggtgaagctggtccagagccggcccgggctctacttccgggggctgaacctattcaccctgcgccagtggctgagcagggtccactccacctacctgtccatgacggtcatctgcatcctgctgctgctggccgtcggcatcaccgccagctccatcggactcaactccaccttggaggcggcggccgatgaagaggctccctttgatctgacggtgcagaatcagtccgccgacagcgcgggccttgtggacttcccggccgtgctggcggagggcggctttgacctggaccgtctgggagagcagctggacgtactgttttactacaatgacccagcggtcaccggggtggaggaggtgtcggcggctatccggctctccgactataacgccctgctggcccacggcgggcgggggagctgtcatgaggaggtgcccatggtgcctgacgacccagagcgccgggcggtcaccggcgggctgtccctgagctacgcagtggtcccagacgagctggctggacagctggaggtgcggcggcaggtgtggtttgtggactacgccggaggggacgaggagcggacggaggccgagttgctccagctgatccgccccctggacctggactacgccctccacttctccagccgcctggacgcctatcagagcatcatgggctccaagatcctggccctgtttctggggctgtatctgggcttcaccttcctgctggcggcggccgcggtgctggccctccagcagctgagccaggcggcggacaaccagaagcggtacgccatgctccgccggctgggggcggacgacggcctcatcgcccgctcggcctcccagcaggtggctctggccttcctgatgcccctggggctggccctgatccactccatggtggggatgaaggcggccaacgacatcattgccacggcgggcgaggtggactcggtggggagcagtctggccacagccgctgtgctgatcctggtctacggaggctacttcctggccacagccctggcctgccgtcggatggcccggcagagctggaccaagcttgaatgaaagaacagcggctccgcggaagagagcttccacggagccgctgatttgatgtttttaaaattttgcgccgccgaactctgccagctgaaggcccttgttccggtcctggacccactggatggaccactgggaggcgaacagcagcagctgattgcccttgtagtcctccaccagcttggcgtcgttggggagcagcaggtcctcctccttcagcgggggggcgtcctcgtcctccttcacgatccagcgcaggtactcgaagggcaggccctccttgtacagctccacgttgtactcgctgcgcaggcggtactccagcacgtcgaactgaagggtgcccaccacgcctacgatgacctcctccatgccggtgtagggggtcttgaagatctgaatggcgccctcctgggcgatctgctccacccccttgagaaactgcttgcgcttcatggtgtccaccgagcggatacgctcaaagtgctccggggcgaaggtggggatggggtcgaactggaacttcttccctggggcgcacagggtgtccccgatggagaagatgcccgggtcgaacacgccgatgatgtccccggcgtaggcctcctcgatgatctcccgttctgccgccatcagctgctgggggcgggaaagacgaatcttcttcccgccctggaggtggtagacctccttatccgcatcaaaacggccggacaccacccgcataaaggcgatgcggtcccggtgggccttgttcatgttggcctggatcttgaagacaaaggcggagaaatcgtcatcaaaggagtcgatgatatcctctcccgccttccggggcaggggaggcgtggtcatacggagaaattcctccagaaagggctccacgccgaagttggtgagggcggagccgaagaacaccggggacagcctcccgtggcgcacccggtccatgtcgaagtcgcaggaggccccgtccagcagctcgatctcgtcggtgagctggtcctttttggcctggccgatgagcccggccagagccgggtcgtccagctcgatctgggtggcagtggcggccctggcgttggtgttggaggtgaaatggatgatctggcggttctggcggtcgtagacgccctggaactccttgccgcagccgatgggccagttcatggcgtaggtgtcgatgcccagctccttttccagctcctcgcacagctcaaaggggtcccgggcctcccggtccatcttattgatgaaggtgaagatggggatgtcccgcatggcgcacaccctgaacagcttccgggtctgggcctccacgcccttggccgcgtcgatgaccatgacggcggagtcggcggccatcagggtgcggtaggtgtcctcagaaaagtcctggtgtcccggggtgtccaggatgttgatgcagaagccttcatactggaactgcatcaccgaggaggtcaccgagatgccgcgctgcttctcgatctccatccagtcggaggtggccgcccgggtgttcttcttgcccttcacctggccggcctgggcgatggccccgccgtagagcaggaacttctccgtcagtgtggtcttgcccgcatcgggatgggagatgatggcaaaggtccttctgcgcttgatttcagattcatattgagacatgagcttcactcctgagtcagtgggatgggggcaggcggcgctcagccctgctgctccttctgccgctccaaatactcgtcataggtcagcttccggtcgatgagcctgccgtcctcagtgaagtcgaagacccggttgcacaccgtctggatgagctggtgatcgtgggaggagaccagcacattgcacttgaccgcctccaggccgttgttcagggcggcgatggactccagatccaggtggttggtgggctggtccagcatgagcacgttggccccggacagcatcatccgggagagcatgcaccgcaccttctcaccgccggagaggaccttcacgggcttatacacctcgtcgccggagaagagcatccggcccaggaagccccggagatactgctcctggggatcaggggagaactggcgcagccactgtaccagattgtcgtcgcagtccttgaaatattcggtgttgtccttggggaagtaggagaaggtggcggtctgcccccacttcacagtgccctcgtcgggctccatctcgccggcgaggatcttgaacagggcggtgtgagcgttctcattgtcgcccacaaaggcgatcttgtccccgtgctccacaatgaaggagaccttgtccagcaccttcaccccgtcgatggtcttggatacatcggtgacaaagaggatgtccttgcccacctcccggtcgggggaaaagcccacccaggggtagcggcgggaggaggcaggcatctcctccacggtgagcttgtccagcagcttgcgccgggcagtggcctgcttgctcttggacttgttggcggagaaacgggagatgaagtcctggagctccttgatcttctcctcgttcttcttgttctgattcttgatgagctgctgcaccagctgagaggactcataccagaagtcgtaattgcccacgtacatcttgatcttgttgtagtcgatatccacgatgtgggtgcagatggtattgaggaaatggcggtcgtggctgaccacgatgacggtgccctcaaagtccagcaggaagtcctccagccagttgatggcgtcgatgtccaggttgttggtgggctcgtccatcatcagaatgtccggattgccgaacagggcctgggccagcagcactttcaccttcagacgggcatccagggtggccatgtcgctggtgtgatactccgtgccgatgcccagcccctggagaatgcggctggcgtcactctccgcctcccagccgcccagttcggcgtactcctcctccagctcacaggcccgcattccgtcctcgtcggtcatctcctccttggcgtagatggcctctttctccctgcccacctcatacaggcgctggttgcccatgatgacggtgtccatgacgttgtaggcatcataggcgttctggtcctgcttcagtaccgacatgcgcacgttgggcaggatggacacggtgccgctggtggattccaggtccccggacaggatcttcaaaaaggtggacttgccagccccgttggcgccgatgatgccgtagcagttgccccgggtgaattgcaggtccacgtgagaaaacaggggctgtccgccgtactgcagccccagatcggtgacggtgatcatagtcgtctcgctccttacactccatggtaaaaacagtttgcgtccgctcagtgcacaaagggcggcacgcccgcggtctgcccgccccgaaacgccgtgcggtcctctgcacactgaggttactatcttatcacaaacaggaggaaaaggatagagtattttccggaaaattgggggcattttttcgtttacagctgtttttttgaccaacaggacagcggaaagggagaaaaagcgccccaggactctccactgggagatctcggggcgcggagggggagtcagtgccgtgcgggcctctccggcggacgggaggccaggcgcagggctcggcggagctctgaggctcgggctggggagaaggcgggggctccgccgccgaagtagagctggtccagacagcgggccagctcccccagctcttgggcacagccgggcagctccgccgccgcccggtccaggaaggcgcggcaggtctcccccggccggcggcccctgcggcggcgcttcaggcggcggtccagccacaccagcacgccggcgggggtattccgccgggccaggtaggtgagctggaagcggacgcggtccgccagccgggaccacagcattgccagggtgtcccgtgggctgcggcggtccacgacgcggcccctgcgggccggagggtgggaccgggtgcggcttccgccccggcggagggcccaaaggatcgcgccgacgccggccagcaggaccaggccggccagcacatagaggaccgcatcgctgctctggacggcctcgccggccgggccgcctgcggcggagatgggatcgggcaggtttagggagccggtctccggggcagggaagagggagaagagccagcggaagaaccggtccagaagggccagcgccccagaggccagctcacgcagccagccggtgagggcggtgagggcctgggcggcggtgccggtgaacagcagcacgcacagggctgcgcccccgcccagggcggccagcagaaggagaaggagcagacgcccccggagggagccggcggcctgtccgccgggacggctgttggaggctctctgtccggccagggctgccagggccagcagagtgccggcggcgggggccagggctgtgtccagggggaggacaccggcggcggtgcacagggcggcggccagcaggaccagggaggcggtctcgaaggagaccatcagctgctccgcgggcgtggggcggatcagcagctcatagcagcggaagtaggagaagccccacatggcaagcaggcacagccaggacagcagggagggatagcgcaccccccacagccagacgacggccccctggagggccagagcggccagcgccagaagcaggatggagcgctgggtccgggggcgccggagaaacagggccagacccccacaggtcagggagaggcagacgcaccagatgagcaggccggccggatcagaccggccggtctgacggaaggcgaagatggagaacagggtgtgcagggcagtcacattggacagcaggccggccaaatcgacaaggcgggaacggctctggttcatgggcggctcccccctttccgcagggagtccaaggagagggaccggaacccggcccgggcggggacctcccagtcctgggcgcacagcacccacagctgccctgggtccagccgctccatcagggcggcggggaggcggctgccggagcaggtgatcagataggcggtgccggactggggggccgcgtcggcggcgaagcgggaggggagaaaggccggcccctggggggagcgactctcctctgggacccgctgggccaggcagcggtagcccgccagatagaagagcaggtcgtccccgccgccctccccggaggagacggtcatgggaccgaagaggcgggagtgggggagggagagggagcagtccacccctgcgccagacaggccggaaaggacggaggccagtacctccagggccccctccagctccctccagtcctgggagagaccgcagaaggactccccatccagcagaaagcgcagccctctgggctggatggtctggtacaggttcaccggcgtgccctgctcccgggcggccatgcgccagttgatatgcttccagctgtctccgggctggtactcccggcagccccggagcacggtgttgtcctccatccacccctgacggccggcggcgcagtcccactgggggcggagaaagagggagaggtccacctccaccggccggggatagacggcgatggcggggatctgcccggcggggaggggctgttccccctggaccagcccgaagccgtccccggagcgggccaccagtcggtggacccggtacagtccccgccgctgggcagtccaggtgttctcaacctggatggtctgccagctccccacaaaggagaaggactggcgcagggcggggaccggggcgcccccttcctgatccggggcgggctgcagataggactcaaaggcatcgtcgggggtgaggcacccctcctccggggcgttttgggacagctccagccagatcagcggcagagccttcccgttctccagatggtagatgagctgggtctgctgcccgggaaagagccgggggcgggggcactccacctggatggagacgccgcgtatggctctgctcccccaccaccgggcggccagccccagcaggaggaagaacaggcatacccccgccaccccgccgctgcccaggcgcagggccagcaggaccccggccccgaacagcaccagggcaggggaagagatcagcaggctggagccccggccgaacagggccttacgctccatggaactcatctcccgccgccggggggacggggagctgggcggcgatctggtccagcaccccgtcagcggtgacaccggagagccgggcctcgttggtgagcagcagccggtgggccagcacggggtggatcagggcctggatgtcgtccggggtaacgaaggagcggcccgccatggcggcccaggcccgggcggcccggaacagggcccgggcggcccgggggctggcccccatccggaccatggggtggctgcgggtggcccccaccaaggaaaccaagtagccggccacctccggggacacccggatctgggagagggagtcctgggcggccaccagctcctccggggaggtgacagtctccagaccgtccagcgggatgctgtctcccagggagaagagcatccgccgctcctcctcaggggcggggtagcccatggagaggcggatgagaaagcggtccatctgggcggcggggaggcggaaggtgctctccgactccaccgggttctgggtggccatcaccacaaagggggtggggaggggaagggtctcgccgtcgatggtgacctgccgctcttccatggcctccagcagggcggactgagtgcgggggaccgcccggttgatctcgtcggccagcagcagattggtgaacacagggccgggcaggcggcggaactccccccggttccggtcatagatgttcatgcccaggatgtcggcgggcagcaggtcggggacgaactggatgcgcttggatcggcagccggacacggcggccagggtcttgatcagggtggtcttgcctacgccgggcaggtcctccagaagcacgtggccctgggagagcagtgccatgacaatcaggcggatctgcgtctccttgccgtagatgatcttggcggtctccgcagtcaggcggtctgccagctgagcgatatccatagggagctcctccttgtgccggctctcgccggttttacagataagctccattttaccacgattttttgggaattctatccccaatttgtaaagaagtgcccgaccccgccccgaagggctgggcggacagtgcccgggccttccggagccggaagagcgcccgcatggcggtgcgccgctttctgaaatatctgccctgtcagggggcgggagccatcctcagcaagccggacggggacggctggcgaagttccccggaggggcagacagcagagcggggcgctcccgaaggagcgccctgctcttggcgtgtgggtgagagtatggttctacttgggctgatacagctccaggatggccccgtccttccacacgaaggccagctggtcgccctggtcgttggcctgcatggggccgcagatgacgctgtccgcgtcggcaatgtacttctccaggctgtccaccttgtaggccacgtgggggcagcggtgaagcacctcggggaagggggtgccctcctcgaatttcagatactcgatcttgtagtcgtagtcgtccacgttgctcacccagaacttggccccctcgttgtaggtcatgccgggctttttgttggtgatggggataccaatgtgcatatactcagcggacatgaaagttccctcctgatcaagcgtttttgatttcctggtagacctcaaaggcctgctgggcggtgtagcccccgtggaccaccttgccgatggcctgggccatgccggcggggcagtcggactggaagatgttccggcccatgtccaccccgcgggccccctccgcgatggcccggtaggccatctccagggcctccagctcaggcagcttcttgccgccggcgatgacgatgggcaccgggcaggcggcggccacccgctcgaagccgtcgcagtaatagctcttgaccacgttggccccgttctccgccagcacacgggtggccagctggaagaacttttcggtgcgctccatctgtttgcccaccgccactacacccagagtggggataccgtaccgggcgccggcatcggcggtgcggcacagcagctccagggagcgggactcgccgggggcgccgatgaaggtctggacggccatacagtccgcgttcatccggaccgcgttctcgatgtcgcaggcgatgccgccgccattggacatctcatcgaagaggacggtggtgtcataggtcacccggacgcacttggccaccggggcggcgggggaaatgcaggagcggaggatgcccttggtgcccatgagcacgttcacataggggatcaggggagggatcaccacgtcgatgcgctccagcccggcagtggggcccatgatgtagccgtggtcaaaggccagcatcaccgtgttgcccgacttgggatcaaagaggcgggacagacggtttttcatgccccagtcgcagtgggcggcccccttcacatagaagccctcctggaccggggcgatgtccaggtgatagtcgtgggcggccttgtttccgatgttgtcagccatgtcttactccttgctgtacgcaggggtgtggcagggggtgttccacaggcggatgaactcgtcgtcccacttggcgatgttcatctggaagccggcggcctcctgtacggtgaggatctctcccaccatgctggccaccacttccacgcccttggctttcaggaactccacggtgtccttgaacagcaccagcatctccatcatggtggtggcgccgcagccgttgatcatcacgaaggccttgtcgcccgccttcagctccagcttcttggacagggcctcggccacagtggccacggtatccttggcggacatcatgggcacccggacgccgccgccctcgccgtgctggccggcaccgatctccatcaggtcggtctcacccaggtcgccgaaagacatgccgttctgggggtgggtggcgtcggtggacttgacggtgacagaggccatgctgtcggcgtaccgctgggcgatctcggccacctcgtccaggctcttgccctcccgggcggcggcggccgcaatgtgatacagggccaccgcaccggccaggccccgcttgttgtcctccccgctggggtcgtactggatctcctcgccggtgaccacctggcggaagttcagcccagccttctgggccagcttgatggcctgcttgcccgccagctggtcgccggcgtagttcagagtgagcagcagaacgccgtggcccttgtcggccagcttcatggcgtcaaagaccagcttgccgttgggggcggcgaagatatcgcccaccgcctgcacgtccagcattcccttgcccacaaaacccgcctgggcgggctcgtggccggagccgccgtaggtgacgatggtcacccggtctgcgtcggccaggtccttgctgatgactagatggccgtccacctccagaatgtcggggtaggccaggccaagacccaccagctcctcgtcggtgatggtctcgggggagttgataaacttcttcattttcatatatggagtacctcccgttcaaaatcaatggagatgcgctcagggccgtgccagcccctggaagaaataggccatggaggcggccccggcatccggggtcccgatggtctgctcgccgtagctcttggcacggccgaacttggagacgaactgcttgctggcctcggccccctggagcgcggcctgggcggcggcgtcgaacagcccggcctcatcgctgccggagtaggcagcgatggcctgactggcggggatcagggcgtccatcatggtcttgtcccccaccttggcgccggacatgtcgctgagggccttcagcgctttggcgaagatggcctggatgcccgccgtatcgatctcattcccctcgggggcctcctcctggagaccatccagccaggtgttccacagggggacggcactgccgccgttcaggaccatgacagccatggccgcatcgtccagcatggcttggatgccgccctctgactcccctgctgcggcggagatggctttggcgatcttgctcatggtcaggccgtggtcggcgtcaccgaaccgggagtcgatctccgtcagctcctgctctgcggcggtcactgccgcacaggcgttctgaagccgggatgcaaattcctgcttggtcatatggtgtcacctccctcctggacaaaacttaggaaagctcctgctgggctgtgttacttctgtgcgtagatactactataaaaggtaacaaaaatcaatagatagatctttttttctctgtcatttacgtaatgatatattgaaatttatgcaaaacagacaaaaatagaactccctgtggagggacgatcctccacagggagttacatatgttacttattggcccagcagggacttgaccagctccgcccgggctgcgatgtgggtgaagatcccggaccgcagggcgccccgcagggctttctcactggtgttggcggagcagacgcccacgatatgagggcactgcttcagcagctccagagggatctggatggcgaagtcctgatccgactggatcaccgtgcctgcctcgttgaagtagtagaccagcagccgtccacaggtgtgctgctgctggagcaggctgccgtaccggaccagggaggcaaagtcggggctggaggggtagtttccgatgttgaccagggcggtgtccatctgaacccactggtcctggatctggcggtagacctcggtggagcacagcagctgcttctcctccaggctctccggcagggcggggagatagaggaagtggggggcggcgcccagctgctgggccatgaggcggacgttttcgttggactggtagttgcgggcagggatgctggcatttcccaccagggggaagatatcagtgacggtgctgctgggctggggattttcctccagccaggtcaccagctggccgatcaggtggccccagcctacccccaggcggcgggcgccgatctgccgcagcaggtccacggccccctgggagagcagctgattggtggcgtcgtcgtcccggccgtcctccaccagcacgcccccctggagggaggtggacagccgcagccggtccagcaggacagcgctctcttcccccggttcgtagacggtgatctgcaccacgcccagctcccgggcctcccccagcatccggctcaccaggggacgggacacccccagttcccgggcaatgtcgatctgcttccagtcctccagatagtagcgccgggccacatgggccagacggaggagcttttccttgctgggcgccaagccgctcacctgcctttctacaccgcggctgttacataagtcaactgtaccatatcggcataacaaatgcaacgggaagggggaagaaaatccgcccggcagggaagggcctctgccggacgggggaaatcagggggacaccagagcgttgagcacccgggcggccacatctccggccgcggaggagccgctcccgccgttctccaccagcacgagaaaggcgtaggggtggtcctcatcccggaggaagccggtgaaccaggcgtggggggcctggccgccccccacctccgctgtccccgacttggcgcacaggtccatattgggaaagcggctggtcccgtaggcggcggtgacgttgtaggccatcatgtcggccagggtctcggcggtgtcccgggcaatgaggcggccggtgcggcgggtgaactggggcagatcgggcaggcccggcgtgtccacctgaaggagcaggcaggggacggcggcccttccaccattggcgatggcccccatgtagaccagcatggagcaggggttcaccgcgtcgtggtactggcccacgcctgcccaggccaggtcgttgtccgaaattccggtgagggaaaagctgccggcggcagtggggatgccgttgacagagtagcggctggtcaggcccgccttcccggcatagcggtccagggtggagccgcccagctccaccgccagctggccgaacaccacattgcaggagttggccagggcctctcggatgtcctgctccccgtgggcggcggtgcaggtgaccgtcccgtccccgatctgggccgagccctcacagacccatgtgcgctcctccaggccgggcagctcctccagcgctgccgccagggtcaccgtcttgaagatggagccgggcgggaaggtggaggagagaaagcggttgagatagacaccatcatagctgggatcggtctccaagccggaggggatgttccggggatcgaaggagggggaggacaccaggcacaggatctcccccgtctggtagttgtagacggccactgtgcccttccggccgttgagggcccggtaggcggtctcattcaggtccgcatcgatggtgaggtatacctgattgccccgctgggccccgaaggcgccgttgagcaggtcaaagccggtgaggcggtcggcaaaagcggtgagggccccggtgccgatgctgccgtaggggtcgcctaccacgtgaaggatggacttgcggcgggtctccccatcgggataggtgcggctgcccgactggtccacggcagagagcacttcaccgtcccggtccagcagggtgccgctgatgagctgtccggcgctgttgtacaggtggcggttgaagggggaggaggcccagtgccccccgtcggagaagaagcggaagaggaagagggccaggccggccagcagcaggccggccagcaccaggcagagcacggcccggcgttcgatctttttcacgggacaggtacctcctttccggcgggagaacggatggcaaagctggacttttcccgggtgtcagaggccttcaggaaggccagcaggccccaggaggccagcatggcggagccgccgttggagacaaaggggagggtgacgccggtgagggggagcaggtccatggccccgaagatgttcagggcggtctgcaccaccatgagtgagcccgcggcgcaggcggcgatggtatagaaagcggagcggcccacccggcaggcccgggcggcaaagagggccagggtgacgatagagaccaccgccagcagggcgatgagcaggccccactcctcgcacagcatgccgaatacaaggtcggtgtccgccgccggcacggtgtgcagccagccctctccggcccccacccccaccaggccgccggaggcagcggccgacatggcccgggtctgctgatagccggtggtggaggcgaactcccaggcgtggccccaggaggcgaagcggcggaagatgtagggcttgaagttgaggaccagcaggccggcaaacagggccccgccgcagatcagggacagggtggcgaagtcgccggagcggaggtaggcgatcaccaggaaggtggcgaagaagatgagggcggtgccgaagtcgctcatcagcgccagacagagcagacataccccggtgagcaccatgaacagccccaggttgcgcctgtggaacagccgctccagagtggcggagccggcaaagatgtagaagatcttggccacctcagagggctgaaaggagagggggcccaggatgatccagttggccgccccaaagcgggtctgtcccagcaccaaggtgacggacagcagggcgatggcagccgcagccatcagccagcgcagccgctgggtgcggctggtgtcccgcagccacacccccagcaccacaagggcggtcagccccagcaggatggcgatgaactgcttcagcacagagccgggggcggaggaggcggtgacggccagggagagggtggagagaaagaaggcgatggtctccatctcgaacccccgggcgccgcagcggcgcaaagccagatagtaggtccacatgacggtggggaggccggggaagaggagaaacaggctgggggagaccgacgcccccgcactgacggccagctggagggcagccagcagctggaacaaagtcagccacagcagggagggccacatgggcagaggggcctcctcctgccgccggcgggagagctgttccccctcctcccgggacagggggaggaagagcaggtccacgccccccacggtgagggtgtcccccacccggatgggggtgcgctgggagacctggacgccgttgacctgggtgccgcccttagagcccaggtccgtgacccaccaggaaccggactcgtcccggagaagggcggcgtgctggcgggagacggtggaaaaattgaggcggatatctgcggaggaggagcggcccaggatattttcccagtggtcgatggggagggagccgccgccgggcaggctgagctgtccccactgctccggggtgtgggggacccgcagcaggccgcggatggcccgcaccagcaccagcagggcgaggatggggaagagaaagcggaccagggcggtgtaccaccagacggcttgggcgtgctctgtcagccaggtgcccaggagttggggaaaggcctggaaggcggagattgattcagacaaggggacccctcctttcggggacggcagaccggcaggggactgcaagacaagagatcggtgatattgtatcacagggactggagaaagcaagcgggagttaaaggagaaacagcgggcctccggaacgattccggaggcccgctgttgaaaatgagatacagtcagtcctgctcaggggtgcggggaggcttcccactgcccttggagcggccgtcccggcccttgccctggagctggttgtgcatgtccagcatggtctgggcggccaaatcgaagtcgctgacctcctcgtagttgtccaccaagtcgctctgtaccaggtcgctgtaatcctcttcggccttcttctttgggtagacggcgcggagcatgatgggggtgacgatggtggtggcagccaccatgatgaccatgggggccaggaagatggggttcatcattccggtggcgatccccttgttggtaacgatcagggctacctcgccccgggataccatgccaacaccgatgcgcagggactcggcgttggtgtagccgaacagcttggcccccaggccgcagccgatgaccttggtgacgatggccagcgcgatggcgatgacggtgagcaggatgacggtcccatccatggaggagagggtgactttcaggcccacgctggcaaaaaagacgggggagaggagcatgtaggagagggtctcacactgggagttaacatagacagcccgggtggtgttggcgatcatcaggccggcgaagaaggcgccgatgatatccgccacaccgaagacctcctccgccacataggcatagaagaagcagaaagccagggagatgacggcgaagcgcttccggttccaggaggcagagttcatccaccgctggatcagcccgtggaggaagtagccagctacgccggtgacaacaaagaaagccacgatcttgatcatcacgatgccaaggctgatgctgctgtcagaggcactggtgatcagggtcagcaggatcagccccagaatatcatcgatcagggcggcacccaagatggcgttgccggaacgggtggacagcttgcccatctccttcagggtctctacactgatggagacggaggtggcggtgaatacggtgcccacgaacatgttctccaggaaggaacccccgtggttgaagacctcggccaggacatagccgcccgccagggggaccagcacgccgatcagggcgatgaaaaaggcggctttgccggattttttcagctcctggatgtcggtctggagtccggcgccgaacatgagcaccaccacgcccagctcggagagcatagcgaggaagtcactgggctggaccaggttgaggatgctgggccccagcagcaggccggcaagcagagagcctaccacctggggcatatccacccgtttggtaagcatggcaaagcactttgtgaccagcaggatcagggccacatcaaaaataaaatgatatgattccatggcagattaccttcttgcagacgaaatgatgcgtaactgtggcggctgcggcggacgccctatggggaattaagagaagacatcaatgcccccagacgtccggccgctgggatcaaagaaagagcaaccgtctccgtcagcgtatggatactaccacaaacaaaaaagaaagtccagtgatttgcaccgagaaggtgtacgattttaacagaaactgaacaacaattttgttatgaacgtcaaaagtgagaaaatggaagggaaagaagcaaataaataaatgagagaggagatcgcactagaaatgccgcgcccggggtcacttccgggcgcggcataagacagattttcagaaaaagatcaggcctgggcgaggaagtagtcggtcatcagatcaatggccacgcccagcacctcctcccggggaagaaaagcgtcgttgtgcaaagggtgctcggcctggcagccaatgtggaaatacagagaggggacctgatggctgaagtagtagaaatcctctccgatcaggctggggtggatgtccgtgtggacgtgttcctgtcccaagagccgggccgcatgggtggaaaagcgctggaacagctccggtgagttgcggaggacgccgtatccagcctggatgtccaccttggcctgcccgccgtacagggaggcgatctgctgggggatctcccgaatgcggcggtggaggtagtttcggctctcctcactggtggtccggaccgttccgtccaggacggcccggtcacagaccacattgtagcgcccaaaggtctggaaggagccgatagagacggagacgggctcgaagggattgacctcccgccggagcttctggaccagggcacagtcgatctcggagccgatgacaatggcgtccacccccaggtggggctccgccgcatgggcggcagtgcccagcacctcgatgcggaagcggtcggaggccgccataatggggccgggccgcagctcgatgtcccccaccggcagagagggccacatatgcagaccgtacatctcgtcgatgtgctggtcggtgagaaaaccggcctcagtgacagggcgggcgccgcccaccgggtttgcctcctcggcgggctgaaacaggaccagaatgttgcagttcagccgatccttcacccggttcagctcacaggcgatcccagcggcgatggcggtgtgcatatcgtggccgcaggcgtgcatgactccctcgtggacggaggagaacggagcgccggtatgctcggtcagcggcagggcgtcgatatccgcccgcatgcacagggtcctggcctttcctgcgttgatgcggacaaagccgccgttcagcgcgccgatggggcacagctccagtccgtcccgggccagaaattcccggatgcggcgggtggtctccacctcctggttgctcagctccggatgccggtggatatcccggcggaactccagatagcgggaaggatcagctttcatacacaaccttcttcctgaaaaagatgctggggcaggccccttttgggaggctcagtccacggggcggagcagcgtgtccccgtagagagtgggctgccggtcccggaacatatggatcaggtcccggacctcccgggtcttggtgtagtcgatggagccggtgatgatctcctcctcaccgccgccctccgcgatgatgtcgccccaggggtcgatgatgatggagtggccgcagtaggtccccatagggctggggcccacccggttgcaggccaccacaaacatctggttctcgatggcgcgggcggtcagaagggtgcgccagtggttcaccctgggattgggaaagtcggaggtgaccaccagcacatccgcctttttcagggcgtaggtgcgggccagttcgcagaagcggatgtcataacagatcatcatgcccaggcggcccagctcggtgtcatagacctcggtcttgtcgccgttggcgaaggggacatgctcgtccatgtcgctgtacagatgcattttgctgtaatcacccacgatctccccccgccggtcgatgaggaaggtggtgttgcgcatcttgccgtcggcgtggagggtggcgatggagccgcccaccacccagacctggtactgccgggccagctcccgcagcaccgtgacagagggaccgttttccggctccacgaagtcctccatgtggtggaacatctcatcagagaaaccggcggaccagtcctcaggcaggacgaccacgtcgggacgggggtccttggccatagcctgggcaaacagctcccggacccgcttgaaattggcctcgggatcgcagaacgcgatgttggtctgaagcagtgcaaagttcgtcatacaaacatctccaatctgatcaaatgccgttcacatggtgtacaaaatggcgcggatgaggacataggcgaaggtgatgacagtgatgacccagccgttggccagcatggccttgatgttcttggagcgggccaggcccatctgtcccaccatatcaacggtgggggtgacgaagaaggtgacctggcagcccaccaggaccaccatgccccagataggcatggcgatattgagggactgtaccatggggaggaacagctcgtggatgatctgcgcctgagccacgccggtgccggagatgccaaagatgcccactgcggcgctgagcatgaggaaggcgacctcgccgcccacatcgatcaggggctgcatgagctggcagaccgcatcgaaggcgccggaggcgctgacatagttgaggaagggctcgaacaggacgaacatgaagaacatccagaacattttggagccgccctggatcatagccgtgagggaggactggaaggacaggccgcccaccaggcctaccacgatagaggccgtcatcatgaccaggatggcgtagctggcgccggcgcccaccaccaggccgtagcccagcataacggccatcaccagcaggaaggccagggtggcgcgcttgcagcgggcatccgggacaaaggcggaagcgtcgtcccccgactcctcataggcctccagcgcctcggtcttccgctgggtgcggcaggccatgaagaaggtggagccccagacgatgacggccagagggatgccggcggtgatgaggtactgtccgtaagagagcccggtcaggccggtgatggtgaccaccggggggacgaaggggcctacatacaggccggtggccccggcaccgtggagaatgacgcccagggtggagggggtgagccccacgctggccacaatggggatcaggataggggcgatgatggcgttggagccggccagggtgcccagcagggagaccagcagggtggaggtgatcatggagatcagaatggccatcttcttgcttttcagcttgaagcggttgaccaccatgtacaccaggttatgtgccacttttgtctgggacaggacttccgccagaccagagcccaggacgatgatgaagccgatgagggcacagaaggagcccagggaggcgtagagcgtgtcggcgaagccggtaatggattctccggtgaggatcgcgcccagaatcacgcacagaaggacagagacgttcatgtccttgcccatcatcatcaaaacgatgtagagcagcaagggcaggaagccgaagaggggatgcagcccaaagatcatagtttccatctcctttttttcattcgcggtttccgttgggacaggcatattatattcctgcaccttccggaggccggcttctgccggagggcgcaaaaataccggaagaaaaaggagcggaatcagatggtcagaggtagatgtggtgctccagggcaattttgtcctgcagctccatccgctccagggtctgctgggcgttcagacggcccagggaggtgataaagcagttgcacagggtgatggctcccacgggggagaagttcccgccgttgggggcgatcagcacctcggtggctttcagcgcgatgggggaggtgagcgagtcggtcaaagcgacgatcttgcagcccgcccggtggaagtgggatacgatgtcataggaggagctggtgtaccgggcataggagatgaccagcaggcagtcctccggacggacatcactgagcgcagtgggcaggtcgctggtggaggtggtgagcagatggacgttgtcacacatctgctggagcatgaaggccagatagtaggccgtggcataggaggaacgcatcccggcgatatagatggtccgggcctgatgcaggatctcctgggcgcgggcaaaggaatcccgcagctggggggtgtacagggcctccagcaggccgatgttgttctggatggtccactgaagggaatccggtccggcgtcctcggcaggggtctcccggcggagcagggatttcagctggccgaagggggcccactgcttctggtgctcatagagcccgcgctgaaggtccggatagccctgaaaatccagcctgcgggcaaagcgggtgatggtggccggactgatcccggtccgctggctgagctcattgatggagagaaaggccacctcgtggagattttccagaataaaatcagccagcctccggtggcttttggaaaaagaatcgtagtgggtgcggatctgggtgacaacatcttttgtctgttccatagtacagtttccctctttacgatcataaaatggcggacttggggcggaaaagcacagccccgacagaaccattataggaggaaaccgccagaaaggaaactgtttttcaacattttggcactcagataggcaatcttattttttgatgcggatgagccggctgttggtgcggcagaaacggggagcgcggccctgcttccccttgaagcggcgcactgcggcgcggtagacttccagatcccggcggagaaagagcatcagggagccggcgatcagcacaccggcggacaccccgtagaacagggtggaccagggggcggtgtgctccctgtacagaaaacaggtggcggcaaactggaccagaaagacggccatgttgatctgcatgaccatcagggcaccctggatgtgtccacgggcgcccaaaaaggcgatgcccaccaggacggccccgccggccagcgcaaaggggagggagctccctgtataggagtgggagaccagcccgatcaggcggtccagcactacgatgaccgcccaggaggccatgatgatctgtacggtgcggtgcgcccggcggaaggaggcgtcagactgtctggcgctgcggatcttctgcatcagggagtcagggcggagatcagggtcagggcgcatagggatccctccgttttcagattcagtaactgcattataacaaaatgaaaatatattttcaatatagaaaaagaaatgaaaatataaaaccatttttggagcatctgctgaaaatcaggcgcgctttggccaaacagacctgaaagcggggaggtctgaggaggtgcgttcaggcacaatccggatgaaatgagggaaagcgaaggccgcatcggtttttggccttgatttgaggggctgaatcctctaaaatgggaatatacagaacacagcggtccggcggggcagtgacgccccgctgtttttgggaccggaaggggaaccatgagaaagctggtcattggaattttagcccatgtggatgcggggaagaccaccttatccgaggggatgctgtacacctgcggcacactgaagcggctggggcgggtggaccaccaggacgcctttctggacacggaggcgctggagcgggagcggggcatcaccattttttccaagcaggcggtgctgccgctgcccagtgtagaggtcaccctgctggacaccccgggccatgtggacttctccagcgagatggagcgtaccctccaggtgctggactgtgccatcctggtcatcagcgggacggacggggtgcaggggcacacccggaccctgtggcggctgctggagcgctatcacatccccaccctcctctttgtcaacaagatggacctggcgggggcggaccgggcggttctgatggcagagctccagaggctggacagcggctgcgtggacttcggccaggagggacccgggctccaggagagcgtggccatgtgcgacgagggaacgctggagcgatatctggagcgggggcaggtggagccggaggagatccgggccctggtggagaggcgcaggctgtttccctgctggttcggctccgccctgaagctggagggggtggcggagttcctagagggggtggagcagtatgccccccggaagtgctgtcccccggagttcggggcccgggtgtacaaggtcgcccgggacgcccaaggggtccggctgacctacctgaagatcaccgggggcagcctgcgggtgaaaacgcccctgaccggcggggagggggagatgcgctgggaagaaaaagcggaccagatccggatctactccggggccaaataccgggccgtggaggaggcggaggcggggaccgtctgcgctgtaacagggctgagccgcaccaggccgggagaggggctgggctttgaggcggcgggacagcccccggtgctggagccggtgctcacctaccggctggagctgccggaggggtgcgatccccacgcggctctccggcagctgcgggagctggaggaggaggacccccagctccacatcctgtgggacgaacgcctgcgggagatccatatccagctcatgggggaggtgcagctggagatcctccgccaggtcatcgcccagcggttcggcatggaggtctccttcggcgcggggagcatcgtctaccgggagaccatcgccgcgccggtggagggagtgggccactttgagcccctgcgccactacgccgaggtccacctgctgctggagcccggggagcgtggcagcggcctgcgggtagggaccgcctgctccaccgaccagctggacctgaactggcagcggttgatcctcacccacctgctggagcgtgagcacctgggggtgctcactggctcccccatcacagatctgaggatcacactggtggccggccgggcccacgagaagcataccgaggggggcgacttccgccaggccacctaccgggcggtgcggcagggtctgatgcaggcggagagcatcctgctggagccttggtacgacttccggctggagctgcccgcctcctgcctggggcgggccctgtccgacatccagcggatggggggcgaggcggcggccccagagagccagggggaggaggcagtgctcaccggcggggccccggtggaggggctgcgggactacgggactcaggtggccgcctataccaggggccagggccggctgttctgcacccctgggggctaccgaccctgcggagatcaggcgggcgtggtatccgccctgggctatgacccggagcgggacacggacaaccctgcggactcggtgttctgttcccacggcgccggcgttacagtgaagtgggaccaggtgcgcgcccacatgcatgtggacagcggcctgcgcctgggcgaggaggaggcgcctcctccagagacgcctgtccgtccggcggagcgggggccggcgggctcactggagcaggataaggagctgatggccatcttcgagcgcacctacggcaaggtggagcagagggccttccagccccagaagaagcccgcccgcaccagcctggatggggagaagtacagcatccggacacagaagcaggggccggagtaccttctggtggatggatacaatgtgatctttgcatgggaggagctggagcggctggcccgccaggatgtggccgccgcccggggggccctggaggatatcctctccaactatcagggcttccgcaggtgcgtggtcatcctggtctttgacgcctacaaggtaaaggggaacccgggctcggtggagcggcggaacgggatctacgtggtgtacaccaaggaggcagagacagcggacgcctatatcgagaagaccacctatgagatcgcccgggagcaccgggtgcgggtggtcacctccgacggggcggagcagctcatcatcctgggccacggggccctgcgccttccagctgcctccttccgccgggaggtggaggaggcggagggggagatctccgccatcctggcccggcacaaccggggggagcgttcccggccggtgaaggaggcgctggagcgggccgcggcgaaggagcggagcgggcccgggagcggcaggaagaggtgaccgccccgccaaagcagaaggcgggaccggccgggcgtccccggagcagggggaggcacaaccggggctggaccggtgtatatgatatttgagaccgcccgggagctgtatcccgggcggttttttctgcctttgcaggaaaaagggagaggaaaatgaaaattaaaaaagaagaaaagcgggcggagaggacacaattgtgaaaactcacaattgacttttttccaaggcttgttagaatatcactaaattattttaattaaataatttgaactaaaattcgacaaggagtgtttttattatgtttgagaaggtcaaagaggtcattctggataccctgagctgtgagcccgagcagatcaccatggaagccagcctggtggacgacctggaggccgattctctggacgccgtggagctgaatctggcgctgaacgacgtgctgggcttctccctcaccgacgaggagctgaagagcatcgtcactgtgggcgatatcgtccgtctgctggaggagcatcagtaagccatggatctgaatgagatcaaggctctgatggaccggttcgacacctccgcctgtaccgtgctagagctggaggagggcaacctgcgcctgcgcctggagaaggggaccgcccccgtttcggttgccccggagatccaggccgccccggcggcccctggagcggctgcgccccagcccgctccggcggaggaggggcagaccctgaacgcccccctggtgggcaccttctacgccgcccccgccccgggggaggccccctttgtcaaagcgggcgaccaggtgcggaagggacagaccgtctgtgtgctggaagccatgaagatgatgagcgaggtccccgctccggcggactgcatcattgaggaagtgctggtgaaggacggagaactggtgggctttgacgcccccatgttccgcatccgggaggtctgaaatgttccggagggttttgattgccaaccggggcgagatcgcggtgcggatcatccgggcctgccgggagctggagatcgagacagtggcggtgtactccgccgccgaccgggacgccctccatgtccagctggccacccgggcggtgtgcatcggtccggcccgggcagcggaaagctatctgaaccaggccgccatcctgacggcggcggtagagacaggctgtgacgctgtccatcccggatacggcttcctctctgaaaatccggactttgccgacctgtgcgccaagtgcgggctgaagtttatcggtccctccggcgacgtgatccggcagatggggagcaaggcggcggccaaggcgctgatgcgccgctccggcgtgcccgtggtcccgggctccgagggggctgtggacctggaggaggcccgccgggtggcggacgaggtgggctaccccgtgctggtgaaggcctctgccggcggcggaggccgcgggatgcgccgggtggaccggccggaggacctgccggccctgttccaggccgcccagtctgaggcagtggcctgcttcggcaacggggagctgtatgtggagaagctgatcctccacccccgccacatcgagtttcagatcctggccgactcccagggcaatgtgatccatctgggggagcgggactgctccatccagcggaagaatcagaagctgatcgaggagtccccctcccgggccctcaccccccagctgcgggaggagatgggccaggccgccgtccgggcggcccgggccgcccattacgagagcgcgggtaccatcgaattcgtgctggatgaggatgggcggttctactttattgagatgaatacccgcatccaggtggagcacccggtgaccgagttcgtcacggggctggacctggtgcgggaacagctgcgcatcgcggcgggcctgcccctgagcgtggggcaggaggaggtccggctgtccggctgtgccatggagtgccgcatcaacgcggaggaccccagggagggctttcggcccagcccgggacgggtggaatttcttcatctccccggcgggcccggggtgcgggtggacaccgccctgttcagcggctaccagatgccgccctactatgactccctgtgcgccaaggtggtggtgtgggcccccacccggctggaggcggtgcgccggatgcgccgggcgctggaggagctgatgatccaggggatggtgaccaccgcagaactgtgccatctgatcctctatcagcccgactttgtaaaggggcagtaccacacgggattcttggaagaaaatctggagaccctgatggcctgggactgcgggacggaggggtgagtcccgtccccgccggatggtgagataggaaccttttcagccggaggacccggttgaacggcgcggagcggagggagaggtccctccgctccggcctgtgcgatggaaggagcgctatggaagagatctttgcccgccggaaggcccggctgatggagctgcgggcccggcggaagggggaggacggcgagcccaaaaggctggcggcccggcctgtgttcgataagtgccccagctgcggggcggtggtgcccaagacggaactgtcccacagcctgtatgtctgtacgaagtgcggataccaccacaccatcggggcctacctgcggctggccatgctgctggactccaagagcttccgggagctggaccaggacctggtggcccccaatgtgctgggtttccccggatatgaggagaagctggagcgccagcgggataagactggcctgatggaggcggtggtcaccgcccggggccgggtggagggccgcagcgtggccgccgccgccctggacagccgcttctttatgggcagcatgggagcggccgtgggggagaaggtgacacgctgcgtggaatatgcccagcggaacaggctgcccctcatcattttctccgccagcggcggggcccggatgcaggaggggatcctctccctgatgcagatggccaagacctccgctgccatccagcgcttccgggaggcgggcgggctgtacatctcctttctgacccatcccaccaccggcggggtcaccgcttccttcgcctccctgggggacatcaccctggcggagccgggggccctcatcggctttgccggcccccgggtcatcgagcagaccatcggacagactctgccggaggggttccagcgctcggagtacctggaggagcacggctttgtagaccggatcgtcccccggggcgagatgcgggccaccatctccaaactgctgcgcctgcacgagaaaggagggacgttccgtggctgagatcctgaccgcagcccagcgggtggtgctggcccggcatattgcccggcccgggacggcggactttattgctgccctgtttaccgacttttttgagcagaaaggggaccggcagaaccgggaggaccccagcatcctggggggcatcgccctctacaaggggcaccctgtgacggtgatcggacaccggaagggcaagactctggaggaaaatgtggcctacaacttcggtatgccggggccggagggataccgcaaggcccagaggctgatggaccaggcggagaaattcaagcgcccggtcatcacctttgtggacacgccgggggcttatccggggctggaggccgaggcccgggggcagggcgaggccatcgcctccaccatcgcccggatgagctgcctcaccgtcccggtggtcactgtggtcatcggcgaggggggcagcggcggcgcgctggcgctggccgtggccaaccgggtgctgatgctggagaacgcggtgtactccatcctctcccccgaggggttcgcctccatcctgtggaaggacgccggccgcagcggggaggcggcggaactgatgcgcatgactgccgccgacctgctggagctgggggtggcggatgaggtgatccccgagccggagggcggggcccacagtgacccccaggaggtgtttgaggcggtggaccgcagcctgtccgccgccctggcccgggtggtcaaagagggcagctttgccgcccgccggcaggagaaatttcgcagaatggggagcgccgccccctggaaggagaatccatgaacggactgagcattttgggcactggccgctgcctgcccgaccatatcgtgaccaacgacgacctggcccggcgggtggagaccagcaacgactggatcgtcagccgcaccggcatccgggagcggcgcttcgcccagggggagaccctgacccaactggccgtagccgccgcccggcgggccatggagcgggcgggggtcggcccccaggacatcggtctgtgcctgatggccactgtcacgccggactggatcaccccctcccaggcgtgcctgctccaccaggagctgggcctgccggaggactgtcccgcttttgacctgagcgccggctgcaccggcttcctctacgccatggagaccgcggcggccatgctgccccggatggcccggccctgcgctctgctggtgggcggcgagctgctcagccgcattaccgatatggatgaccgctccacctgcatcctcttcggagacggagcgggtgccgcagtggtcaaaagcacggagggggccccctggcacgccctgctgggcacccggggcaaccgggaggccctgtgggcggcgggcccgggcaaccacccggcctacctccacatgaacggccaggaagtctttcaatttgccctcaagactgtcccggagctggcccggtccctgctggacaaggccgggatggacagggaccagatcgactggtatgtgctccaccaggccaaccaccgcatcctggagggggtggctaagcggatgaaggtccccatggagcggttctatgagaacatcggccggtacggcaacacctcggccgccaccatccccattgcgctggacgagatggcggagcaggagctgctgcggccgggacagtggatcatgtgcctgggcttcggcgccgggctgacctggggcggagcaatgttccggtggtgaggagcgccgggcgctctttccgctggggacgtggggatgacaaacaaactgcctcgaggggcggatgcgggaggaaaccatgaaattgaatgagcttttggggacggagttcccctttatccagggcggcatggccaacattgccaccggtgaatttgccgccgccgtctccaacgctggggccctgggcctgatcggcgcgggcggcatgacaccggacagcctgcgggagaacatccgccggtgccgagaactgaccgacaggcccttcggcgtcaatgtgatgctgatgcacccccgggtggaagagatggtccgggtggtggcggaggagcgggtgatggtggtcaccaccggcgcgggcaaccccggcgcctatatccctgtctggaaggagtacggcgccaaagtgctccccgtggtccccgcggtggcggtggctaaggtggcggcgcgggccggcgcagacgcggtcatcgccgagggcaccgagtccggcggacacgtgggtgagctgaccaccatggccttggttccccaggtgtgcgacgccgtggatctgcccgtagtggccgccggcggcatcgccgacggccggcagctgctggccgcctatgccctgggggcctgcggcgcccaagtgggcacctgcctgctggtcagccaggagtgccccattcatgaaaactataagcaggccatcctgaaagccaaggacagcggcaccatcgtcaccggccggatctccggcaccccggtacgcatcctgaagaatcagatggcccgcacctatgtctccaaagagcgggccggcgccaccatgatggagctcgagcagtacaccctgggcagcctgcgccgggctgtctttgacggggacaccaagacgggaagcctgatggccggacaggtggccgggatgctccacgagatcaagcccctgcggcagattttcgaggagctctccgcgggctgcgaccgccgcctggcggagctgagaggataagaatggagatacgaggacatcacctctccattcccgttctccagggcggcatgggggtgggcgtctccctgggcggcctggcgggcgcggtggccgcctgcggcggcatgggcaccatcagcaccgcagacgcgggctatcaggagccggacttccccaccgaccccgccggtgccaacctgcgggccctgcgccgggagatcggcagagcgaaggagctggcccggggggctgggatggtggcggtcaatgccatggtggccacccggcagtttgccgatgcggtccgcaccgcagtggccgccggggtggacgcggtagtctgcggtgcgggcctgcccctggagctgcccgcgctgacccaggggaagacagccatcgcccccatcgtgtccagcccccgggcagcccggctgctccttaagacctgggacagaaagtaccagaccaccgccgacttcctggtgctggaggggagcagggcgggggggcacctgggctttggggaggaggcactgaaggaggggacttgtccctccttggaggacctgctccccggtgtgctggcggagacggccccctacgaggaaaaatacgggcaccccatcccggtctttcccgcaggcgggatctggagcggggcggacatggcccggctcacccggctgggggcggcgggggtccagctggccacccgcttcatcgccacctgggagtgcgacgcctcccagggctataaggacgtgctgctggaggcccgggaggaggacctggccatcatccacagcccggtggggatgccggggcgcgcggtgcgcaccccgctgatccgccggctggaggcgggggaacggctggtgccccagtggtgcgcccagtgtatgcagggctgccggccctcggagatccccttctgcattacccacgcgctgatccaggcggtgaagggcaaccgggaggagggcctgtttttcagcggggccagcgtgggcctgcttgaccggatgtgctccgtccgggagctgatggaggagctgataagagaatggagggcattggcatgaaattggcctttttatatgcggggcagggcacccagcacccgggaatggggcgggacctgtacgagacttatcccgccttccggcaggtgctggacagcgcccagctggactttgacctgaaagagctgtgcttcgagggaccggaggagaaactgtcccagacccagtacacccagccctgcatggtggcctttgccgccggggtgacggcggtgctgcgggagaagggaatcatcccggaggtggccgccggcctgagcctgggcgagtactccgccctccaggccgccggggcgttcgactccaagacggcggtggagctggttgccttccgggggaaagccatggcccaggcggtgcaggaccggccctgcggcatggccgcggtgctgatgctgggccgggagcagctggcggagtgctgccgtcaggccggagaggccggtgtggtggagatcgccaactacaactgccccacccagctggtcatcgccggggacgccgccgccgtggagaaagcgggtgagctggccctccaggcgggggccaagcgggtggtgccgctgaaggtgagcggccccttccacacctccctgatggcgcccgcgggggaggctctggcggaaaagttccgcagcgtcgcctttggggagatgagcttcccggtgctgttcaactgcaagggcggtcccatggaggcgggagagaccatcccggagctgctggtgcgccaggttcagagcagcgtctatctggaggacaccatccgcgccatggcggggatgggcgtggacaccatcgtggagatcgggccgggcaaggctctgtccgcatttgtgaaaaagacggaaaagggcatcaagacctacgcggtggagacggtggaggacatcgagaagctgtgtgaggcgctgaaaggagagcaggcatgagcttgaagggaaaagtggccctggtcaccggcgggagccgggggatcggccgggcggtctgtctggagctggcccgccagggggcggacgtggcggtgaactacgccgggaacgaggctgcggcccaggagacggcccaggcgtgccgggagctgggcgtgcgggcagtggtcatccgggccgatgtggctgacgctgcggcctgcgacgcaatggtggctcaggtgctggagcagctgggccggctggacatcctggtgaacaacgcaggcatcacccgggacggcctgatgctgcggatgcccgaggcagactgggacgcggtgctggacaccaacctaaagggggccttccactgtatgcgggccgcctataagaccatgatgcgccagaagagcggccgggtagtcaacatcagcagcgtagtgggcctgcggggcaacgccggccagaccaactactccgccagcaaggcgggtctcattggtctgtccaagtccctggccaaggagctggccacccggaacgtcaccgtcaacgtggtggcccctggctttatcaccaccgatatgaccgatgccctgccggagggggcgcgggaggccctgctgtccactatccccatgaagcggctgggcgcggcggaggacgtggcccgggcggtggccttctttgctggcgagggcgccggctatgtcacgggccaggtgctgtgcgtggacggaggaatggcggtttgagccgcagaaaggaaactgctatggaaaaaagacgagtagttatcaccggcctgggcgcggtcacccccctgggccataccgcccgggaaacctgggaggcggccaaagcgggtgtgtgcggtatcgcccccatcaccctctatgaccactccgcccagaaggtgtccctggccggcgaggtgaaggagttcgacccctccggcgtgctggagaagaaggagatccggcggatggaccgcttcgcccagtttgccgtaacggcggccgcggaggccatggcccacagcggcctggatctggagcgggaggacagggcccggatcggcgtcgccctgtccagcggcatcggcggcatcggcaccctccagacctcctgcgagactgggcagagccggggctttgaccgggtctcccccttcttcatccccatggtgatcaccaacctggcggccggccatatcgccatccgcttcggactgcacggcatgtgcatctgcccggtggcggcctgcgccggcggcgccaatgcggtgggtgacgctttccgccacatccgggacggctacgccgaggtgatggtggccggcggagccgaggcctccatcacgcccctggccatgggcggattcacctctatgagcgccctgaccgacgcctccgatcccagccgtgcctccatcccctttgacaaggagcgcagcggcttcgtcatgggcgagggggccgcggtgctgatcctggaggagctggagcacgccagggcccgaggggcccagatcctgggcgagatcaccggctacggcgccacctgcgacgcctaccacatcaccgcccccgacccggagggcgcctggagcgccgcctgcatggagcaggccctggccgatgccggcctggccccggaggcggtggactacatcaacgcccacggaacctccacccccctcaacgacagcggggagaccgccgccatccgccgggtgttcggcgcccacgcggaccggctgatggtcagctccactaagtccatgaccggccacctgctgggagccagcggcgcggtggaggctgccctgtgtgtgttggccctgaaggatgggtttgtccccgccaccatcaactatcaggtcccggacccggcctgtgacctggacatcgtgcccaacgagggccgggaggcggacatccgctgcgccatatccaattctctgggcttcggcgggcacaacgcctgcctggtgttccagaagtgggagggctgagacatggagtttgacgccaatcagatccaggagatcctgccccaccgcccgccctttctgctggtggaccgcatcaccggcggagagcccggcgtctgggcccagggcatcaaatgcgtcactgtgaacgagcccttcttcgcgggccactttccggggtatcacgtgatgcccggagtgctcattatggaagcgctggcccaggtgggggctgtggctatcctgtccctgccggagaacaaggggaagctggccttcttcggggggatcaagaacgcccggttcaagcgccaggtggtgcctggagacgtgctggagctgcgctgtgagctgacccgccaggtgggcagcgtgggcttcggcaaggcggaggcccgggtgaacggcaagctggcggcccagggagaattgaccttcgctgttgcacagccgggcgatccctgataaaatggactccagcagagaaaacaggggaaaagaggagggggccatcttgctggagaaggattttaacgaggtgtacaccaaattcaagctgcatttttaccgggcggtgttcgggcgtttcaagcggcgggaggccacgctgaccacagtggagaccttctgcatggagatcatcctggccctgggggagcccacggtgaacgagttttctaatttcgtgggcatctctccccccaacgcggcctacaagatcaacagcctggtccagaaggggtatgtagaaaagcggcagtcccaggaggataagcgggagtaccacctggtggcgacccagaagtatctggattattacaacatcagctatcattatctcaacactgtcatgagccgtatccgggcccgcttttccccggaggacgtggccaagctggaggggatgctggagatcatctcccgggagctgatgcccgagatccccctgggggaccagatccatcaagcagaacaggcataaaaaacccggcgatcacaggatcgccgggtttttatccatataaagctcgatcagtcagtgacgtagggcagcagggcgacctgacgggcgcgcttgatggcctcagtcagctggcgctgatgcatggcgcaggtgccggtggtgcggcggggcaggatcttggcccgctcggagatataacggcgcagcttggcggcgtccttatagtcgatgcactccaccttgtccacgcagaaggcgcagaccttgcggcgcttgcggccgcgagggccccggttatcacgatccataggcatgagagaaacctccttttcagaccatatcggtcaaagtatcacgggtgtcccctctcagaagggcagctccccgtcgtcatcagaaagctcggcaaactggtcgcccatgtcgggggcgccgaagccggagggggcgggagaacgcccgccggaaggggcggaatagcctccgctgtacgggccggcggattccgcgtcccgcttggagtcaccgaaatagacgttatcggcaaccacctcggcactgcggcgcttgttgccgtccttgtccgtccagtcgcggatctggaggcggccctccaccacggccatgcggcccttggtgaagtagcggctgacaaactcgccggtctgccgccaggcaaccacatcaatgaaatcggtggtgcggtcgccggtggccttgtccttaaagtcccggtccactgccagagagaaggaggccacagccgtcccggtctgggtgtgccggagctcggggtcacgggtcagacgacccatgaggatgatcttgttgagcatatgcccgcctccctcactggtccttgcagacgatcagggaacgcatcacgctgtcgttgatccggaacagacggtccagctcgtggggaatggcggcggcggcattgaaagtcatcaggacgtagtagccctcgttcaggtcgttgatgggataagccagacggcgcttgccccactgatcgatctcagagacggtcccgttggcctccaccacacccttgaacttctccaccagagcggtgatctcctcctcgcccagggcggggtccaggatgtagagcgcctcgtagttcgcgttgatttttgccatagttcttgcacctccttatggacatatggcccccggaagacccgggagcaaggatatctcctgtctcatcagaaagacaggcttaattattatataggaaatccccgggatgtcaagagaaaatcccggggatctggcaaaaattttatttcagaggcaggaaaaacaccggggcgggactcagtagcggcggactaccgccaccaccttgcccaggatctcggcccggtcgccgtcgatgggggtatagtcgtcgttggccggcatgagccacacatggccgtccttccggcgataggtcttgacggtggcctcatcctcaaacagggccaccacgatctcaccgctgtggacttcctgctggcggtggaccaccactaagtccccgggcaggatgccggcgtccagcatagattccccccgcacccgcagggcgaagtgctccccggacaggccctgggtatcaaaggtgaggtagtcctcaatgcactcctccgccaggatgggggagccggcagccacactgcccaccaccgggatctgatcggcgtgggggtcctgctcctccgccaccggccggccggtgccggacagggtgatggcccgggtcttgccctctgccttgatgatgacgccagcctcctccagccccttcagatggaaatggacggtggagggggacttgagacccacagccgcgccgatctcacggacagaagggggatagccatgttccgcggaaaaggtctggatgtagtcgtagatcttctgctgcttcgcagtgagtttctccatggtctgactcctttccacagatgggcgtcgtcggttcatttaataaaagcatagcacaggaaagcaaaaaagtcaaacgaatgttcccaataagctttctgaaaatgaaataaatggaggatggggagtggtggggcctgtatcccgtgcagggccgatgggggcactacgccctacacggggacgcagcctccgcagaggggagggccggtccatttatgaacaatttttgaaacatacagggctccccttgactttttatggccgaatgctaaaataatcagcatgttaattattaagccgttaatgattgaaaaatattccgtaagggggcggagatatgtccagtctgaacatggatctgggtgtgttggaacaccagatgcatcaggcgcatcggaatgcggtgcaggcggaattgagcgcggcgggactgcaggaagtgggccatccccttctgctgtgcatcctgcgcagcgcgggggagcgctgcccggacgggcaggcccagagggagctggcggagctgctgaacatttcgccgcccgcagtggcagcatccctgaaatccctggagaaaaaggggtatattcaccgggagccggagcctggggacgcccggaggaaccgggtgcggctgaccgccaagggggagaaggcggtggacgactgcttcgcctgcctgcagcgggtgacccgcagaatgttcaccggctttaccaccgaggagcaggcagtgatgcggggcttctatctgcggatgctggagaacctccaggctcccctggccggcgtgcgggcttctccccttgcctgagggcgggaacgatgaagcggcgggcgcgcggctggatttctcgtcattttgaccataagcttcttaaaaaaccaagaaaggaagatgatcgatttgcttcagttgtttctgacccacctgcagggctacaagcggcaggcggtctggtctcccatcctcatcgtggtggaggtcatctgtgagctgctgctgcccctggtcatggcagagatcgtggatacggccatcccagccggcgacgagacttacatttttcagctgggtgcggtgatgctggtgctggcgggcgtggccatgctgtgcggtgtgctggcggccaagtattctgcctttgccagccagggctttggcgccaatctgcgccagtgcctcttcgacaaggtgcaggagttctcctttgcggacattgaccgtttctcctccgcctccctcatcacccgtatgaccaacgatgtcaatgccatgaccatgatgctggccatgggtctgcggatgctggtacgggctccagtgatgctggtggccgccctgtgtatcagcttctatctgaatgccaggctggcactggtgctggtggtggtcattcctctgatggtgctggtgatcggcattctgatgaaggtgtgcaccaagctctttgagaccatgcagaccaagatcgacaacctgaacaatacgctccaggagaatctggtggccatccgagtggtgaaggcctttgtccgggagggctacgagcgcatcaagttcaagaagtccaacgatgagctgatggacgccgctctggcggtgggcctgcggatcattgcgatcatgccggtgatgatgctggccctcaacggggccacagtggcggtgctctacttcggcggaggcatggtcatggggggcacctttgaactgggcgacctccaggccttcatcaactacatcgtgcagatcctcatgagcgtgatgatggtggccatgtccctgctccagctctcccgggctcaggcctgcgcccaccgcatcaaggaggtgctggagacagagccctctgtggagaacaagccggagggggagatctgccgggcggccctccccggggaggcggcggacggaacggaccacgtcctgcccgcccccaggggcgaggtggagttccgggacgtctccttcaaatatgtggcctcgggcagcggggacgacgtgctctcccacatcagcttccatgtaaggccggggcagttcgtggccatcgtgggcgggaccggcacgggcaaatccactctggtcaacctgatcccccggttctacgatgtcaccggcggccaggtgctgctggacggggtggatgtgcggaactaccccctggaggagctccggggccgcatcggcatggtgctccagaccaacatcctcttttccggcaccatccgggagaatctgctgtggggcaacccggaggccacagaggaggagatgatccaggcggccaaggacgcccaggcctatgacttcatcatgtcgttccccgacggctttgacaccagcctgtcccagggcggcgtcaacgtgtccggcggccagaagcagcgactgtgcatcgcccgggccatgctccgcaagccggcggtgctcatcctggacgactccacctctgccgtggactcagccacagaggcggccattcgggagtccttcgccgccaacctgaaggacaccactgtcatcatcattgcccagcggatctcctcggtgcagtacgccgatgagatcctcattctggaggatgaccacattgcggcccggggcacccatgaggagctgctggctaccagtcccatctatcaggagatctatcagtctcagcaggaaggagttggtgaataatgccgggacccaatcgcgccccccgggggggctatcagaagcccaaggatctgggcaagaccatatccaggctgctgggttatctcacccgcagcaagctgcccctgatggccgtgttcggatgcctgctgatctcggtgttcaccaacatcggcggctcctacatgatgcggggcatcatcaacgacttcatctggtcgggctgcaccgacttcgccggcctgggccgggccatcctggtcctggtaggcatctacctcatcggctgcgcggccacctacggacagtccgccgtcatggtgcggctggcccagcgggggatcaaccggctgcgcaaggacctgttcgacaaattgcaggacctgccgctttcctactttgacaagcacccccacggcgagttgatgagccgcttcaccaacgacgcggacaacgtgcagctggccctggagcagagcgtggtctccatgtgctccagctgcctgatgttcgtgggcctggtggccatgatgcttttcatcaactggaagctgttcctggtcaccgccctggtgctggcgctcaccatggtgctgttcaacaagctgggcgggcgcagccgccgcttctatcagaagcagcaggcagccctgggcgacgtgaacggcgacatccaggagatcatcgaggggctgaaggtggtcaaggcattcacccacgaggagcaggccaaggatcagttccgcaagctcaatgagacctaccgggacgcggcacagaaggccaacttctactccaccatgatcatgcccgtgtcgggcaacctgatgaacatcagctacgccctcaccgccgcattcggcggactgctgtctgtcatccagggctttgacctgggcggcctggtggtctatctcaactactccaagcaggtgggccagcccctgaaccagatctcccagcagatgaccaccctcctctccgccctggcgggcgccgagcggatctttgaggtgatggacacccagcccgaggtggacgaggggaccgtcaccctggtgggggcggagaaggacgccaacggcaccctgtccgtctttgacggcgcaggccggccccgtgtctgggcctggaagactccaaggaccgcggccatggcgctggtccccgtgctggtgggagcaaaggatgccctcaccgagctgggccaggcggagcggaccgagagcggcggcctgaagctgctgcctcccagcgtggactcctcccagggcatctgggtggaggtggcttctgacggcaggctcaccgaagtgaccgacctggccgccctggccggccacggctgggcctggaagtaccaggaccacacgggcaagccctccctccacctgatccggggcaccgtgcgcaacgtgcccggggaggactactacctcaccgagctgaagggggccgtccggttcagccatgtggccttctcctatgtgcccggcaaacgcatcctgaaagatgtgaccgtctacgccaacccgggccagaagatcgccttcgtaggctccaccggcgcgggcaagaccaccatcaccaatctgatcaaccgcttctatgagatcgagggaggactcatcacctatgacggcatcgatgtgaaggccatccgcaaggacgacctgcgccgctccctgggggcggtgctccaggacacccacctgttcaccggcaccatcatggacaacatccgctacggacggctggatgccactgacgaggagtgcgtcgccgccgctaagagcgccaatgcccactccttcatccgccgcctgccggacggctaccagaccatggtcaccggggacggggcgaacctgtcccagggccagcgccagctgctggccattgcccgggcggccgtggccgatcccccggtgatgatcctggacgaggccacctcctccatcgacacccgcaccgaacggcacatcgagcaggggatggatgccctgatggagggccgcaccgtctttgtcatcgcccaccgcctgtccacggtccgcaactccaactgcatcgtggtcatcgagcatggcgagatccaggagaagggcgatcaccaggagctgctggaccagaagggacgctactatcaactctacaccggtcagttccagctgtcctgacccccggacgtgggcggaaggcaccggagacaggaggagcgccatgtcgcagatcacaaagcgggccctggcctctgcgctgaaggagctgctggagcacaagccgctgaataagatcaccatcgccgacatcaccgagcagtgcggggtgaaccgccagaccttttactaccactttcaggatatctacgccctgctggagtggatctacaccaccgacgcccagcgcctgctggagggaaagcgggacggggacacctggcagcaggggttcctccaggtcctggagtacatccgggacaaccgggccctggtccgcaatacctaccactccgtcagccgggagctgctggagggctacctgtaccgggtgacctaccagctgatgcgggacgtagtggaggagagggcggcggagacccaggtcccggaggaggaccgggccttcctggcccacttctacaagtacgcctttgtggggctgacggtggagtggatgcaggggggcatgaaggaggagcccgccaggctggtgagccgggtcaataccgtgatggagggaaatatcgccgcggccctggagcgcatggcccggcggaaagagccctgagatccagacaaagggggcccgctgtcgcaatttgcgacagcgggccccctctatccattggcagacagggccgggggcgctatactgacctcacaaactcgatctggaggtcatggatatgtattacagcagcggaaattacgaggcatttgcccgcccccgtaagccggagggcgtggaacggaaatccgcctggctggtgggttccggcctggccagcttggcggccgcctgcttcctggtgcgggacgggcagatgaagggggagaacatccacatcctggaggagctaaagctccccggcggggcctgcgacggcatccaggaccccacccggggcttcgtgatccggggcggccgggagatggagaatcacttcgagtgcctgtgggacctgtttcgctccatcccatccctggagcacccggagaattctgttttggacgaatactactggctgaacaaggaggaccccaactattctctgtgccgggccacggtggatcggggaaaggacgcccatacagacgggaagttcactctgagcgacaaggccgccctggagatcatgaagcttttcctcacccgggacgaggacctgtacgacaggaccatcaccgacgtgtttaccgaggagttcttccgctccaacttctggctctactggcggaccatgttcgccttcgagacctggcactctgccctggagatgaagctgtatctccagcggttcatccaccatatcggcggcctgcccgacttctcggccctgaaatttacccagtacaaccagtatgagtccctgatcctgcccatggtgcactacctgaaggagcacaatgtgcagtttcagtatgacacgcaggtcaccaacgtgatcttcgacatcgccccgggccgaaaggtggcaaagcagctggtgtgggtccgggagggccgggaggaggtcagggagctcactgaggacgacctggtgttcgtcacaaacggctcctgtacggagaactcctctctgggcagcaacgaccgcgccccggagttcctcactgagccggtggggggctgctggcagctgtggcggaacatcgctgcccaggacccggccttcggccgcccggacaagtactgcaccaagccgggccttaccaactgggagtcggccaccgtcaccaccctggacgacaagatcccgccctatctggaaaaggtatgcaagcgggaccccttctccgggaaggtggtcaccggcggtatcgtcacggtgaaggactccgcctggatgatgagctataccttcaaccgccagccccacttcaaggcccagccggaggggcagctggtggggtggatctacggcctgttcaccgatgtccccggggactatgtgaaaaagcccatgcgggcgtgtaccggccgggagatctgcatggagtggctgtaccacctgggggtgccggaggaggagatccccctgctggcggagcagtctgccagcaccatcccctgcatgatgccctacatcaccgccttcttcatgccccggacccggggggaccggcccgacgtggtgccggagggctgtgtgaacttcgcctttatcggccagttcgccgagacggcacgggacaccatcttcaccaccgagtactccgtccgaaccggtatggaggccgtctacaccctgctggacatcgaccggggggtgcctgaggtgtgggggtcttgctacgatgtgcgctgtctgctggatgccgcatccaaaatgatggacggcaaaaagctgacggagatggacctgcccttcctgtatggattcgtggagaagaaggccctgaagcatgtgtccgggaccgtgatagaggaactcctcctccgctaccacctgatttgatgtctcccgccccagcctggtgctggggcgggactttttttgccttttttattgacaaaaagggatataggtgatatggttaattacacaagtaatgaaccaataaaccgaaggacaggaggcggtgagatgcatgggaccctcagcgatcagtcactgatctatctccagatcgctcagatgctggaggacgacatcctgcggggcgtctaccaggaggaggagcaggtgccctccaccaatgagctctcccgggtctatcacatcaacccggccacggcggccaaagggctcaacctcctctcggcggaggggatcctgtataagcgccggggcatcggcatgttcgtggccccgggggcggagcaggccgtgcgggccaagcggaaagcggcgttttacgacagctatgtgcggcccctggtaaaggagggggcctccctggctgtgaccggggaagaactgctggccatggtgcgccgggccatcgaggaaggagaagccaaatgaatacaggcattttgaaagcggaggggctgtgcaagtcctatgggagcaagcgggtgctggaggggctggacctgaccatccagccgggcaggatctatgggctgatcggacgaaacggggcgggtaagaccaccctgctgggcatcctcacaggccagaacaccaaggacagcgggcaggtgacctgtgatggagagccggtgtgggagaactgcagggcgctggagcagatctgcttttcccgggagctccagcccaccctgttctcaggtcccaacaaccagaaggtccggtactacctgaagtcggccgccatattctaccccaactgggaccaggagtatgccgaccgcctgctgaacgagtttcagctggaaccaaaaaagaagatcagtcagctgtccaaggggcagatgtctatggtgaccatcctgatcgccctggccagccgggcacccatcaccattctggatgagccggcggcggggctggatgtggtgatgagggagcggttctatcagctgctgctggaggactttgcccagacggggcggaccttcctggtctctactcacatcatagaggaggccgcctccgtctttgagcaggtcatcatcctggaccaggggcgcatcctggaaaacagccccacagaggaactggtggagcagttccgctatatctccggccgggaggacgtggtggaccaggcctgtgccggcctggaggtcctctccgtccagcagatgggacggcacaagaccgctgccgtccgggggagcgacgcccagttccgtcaggcccggcaggccgatgtggatgtgtcccccatgaaccttcagaacgtgtttgtggccctgtgcggccacggagatgcccagtaaggaggggaaggtatgagaaaggaattccgcttcctgcttcagtcggccaggatcaatctggccctggtggcgggatatgcggcggtgctcaccttgggagccatcctgttcccggccccggagggcgagcgaaatctgttctacaattatttcatttccgcgcccatcaccgtctcgttcatcctgtttatcatgagcttttccatgggcgcaaacaacctaaacatctccctcactctgggcgggcggcggcgggactacttctgggcccttcagccggttctggcgctctatgtagggaccagctgggccatccagctgctgatgtcggcggtgcccaaggcgctccggtggaccgatccctgggggtgggatctctcactgctgggaggctggcccctgtgggtgtaccccctggtgtgctggacagtcctggcctttgggaccctctgcggtctgctgatggtagagtccagggtatggagggggatcgtggttgctctggccgcaatggtgatgacggcagccctgattttcctgatggtgatggcggcggggcccaagatccctctgtggggcgatcttccctatatcctggggggcgttctggcagtggtcctggcggtcagcgagttcttcctgtggcgtaggatcacccgtttttctgtgaggtgagcatatgatgatgaaaatgatccgggccaactgggtggatctggcccagggctgcggagtggtggcggggattttcctggccatccacctgatcacggcgggggtgctcttctggggccatccagacagcagcgtcaccatctccgggatcgctctgcccgcggcggcggggctgatgatcctggtcgttaccgccacctatctggccatcacctttgaccaaatggtgcgcttcagcctgacacgccgccgggcactggggctgctgatggggatggccggggcacaagcgctgtgctccatggggctggccgccctgttgacctgggtggagcgggccacggcgcccatgctgtggaaggccatttccggcgcggcgtcggtgacgctggagcggagcggacaggtgatcccggagctggggagcacggcggcagcggaggcggtgccctccctgctggtggtggatatgtatttggaatggtggtggtatccagccatcgtcctggccgccattgcgctggggctgattatcggaggcgtgatccagcgctttggaggaaaaggaggctggttcctgtgggccatctggatggcggtcatcttcggtgattccctcttcggcggctttgtgttcctgaaggatctggtccccctgatggtggtcctgctggcggggtccctggtctggtccgtgtggtccctgctccacgcagtggtgaaaaactgaaaggagggggaggccatgataccggcgggtgccatccgaaagagagtcatcatcaggcagttcctggaggcgggggcggtctcggaggagacggccagaacgccggaggaggcgggggtcttccaggggctgggcatcaaatttgaccagctggtggagcggggcgttctggtcccctgtgctggaggacggtattacgtggaccagtgcaaaagcggttgaaaaagggaggcgcttccgccggaagcgcctcccttttttcattatgccggtattccccggcgccgcagtcatttcccgcgccgggaccagacttctatggtatctaagggatggatcgaatgctctgaaagccgcttatttgatggccttggtccgcacgtcctcggccagaagggcctggaactggacgcaggacatggcgcccaggtcctcaccggagcgcatgcggacagagacggtctgaccctccatgtcccggtcgcccaccaccagcatataggggaccttctccatggtggcctcccggatcttcttgccgatcttctcgttgcggtggtccacctctacccggaaaccggcctcatccaggtccttggagatctggtcggcgtactgggcggcccggtcggtgacaggcaggaccttcacctggacgggggcgagccatgcggggaaagcgccggcaaagtgttcggtgatgacgccgatgaaccgctcgatggagcccagcaccacccggtggatcatcacggggcggtgcttctggccgtcctcgccggtgtactccagctcgaagcgctcaggcagctggctgtccagctggatggtgccgcactgccaggtgcggcccagggagtcggccagatggaagtccagcttggggccgtagaaggcgccgtccccctcgttgatgacgaaatccttgcccatggcggtgatggcgtttttcaggatgtcctggttgcgctcccactcctccacggtgccgatgtggtcctctggcatggtggacagctcaatggtgtagctcaggccgaagacggagtagacctcgtcgaacaggcggacggtctcctggatcacgtcctgcatctggtcccgggtcataaagacatgggcgtcgtcctggttgaagcagcgcacccggaacaggccgtggagggcgccggacagctcgtggcggtggaccaggccgatctcgcccacccgcaggggtagctccttataggagtggggctggctggcatagaccagcatcccgccggggcagttcatgggcttgacggcgaagtccacatcgtcaataacggtggtgtacatattgttcttatagtggtcccagtggccggagcgctcccacagctgacggttgagcatgatgggggtggagatctccacatagccgtacttcttgtggacctgacgccagtagtccagcagggtgttcttcagggtcatgcccttgggcaggaagaaggggaagccggggccctcgtcccggagcatgaacaggcccagctccttgcccagcttccggtggtcccgcttcttagcctcttcgatcttggccagataggcgtccagctcgtccttctttgggaaggcgatgccgtagatgcgctggagggtctcccggttggagtcaccgcgccagtaggcggcattgcaggcagtgagcttcagggcgttgcccttgatgcggccggtggagtccaggtggggaccggcgcacaggtcggtgaactcgccctgcttatagaaggagatgtgggcgtcttcgggcagatcctggatcagctccaccttgaagggctctcccttctcctccataaatttgacagcctcctcccggggcagctcgaaccgctccagcttcagcttctccttgcagatcttccgcatctcggcctcgatctgctccaggtgctcgggcgtgaaggcgaagggggcgtccatgtcgtagtaccagccctcgtcgatagaggggccgatggcgagcttcacctcgggccacaggcgcttgaccgcctgggccatcacatgggagcaggtgtgccagtaggtctggcggtactcagggttttcaaaggtaaattcatttttgacttcttcggacatcaaaatacctccttgcgtccgcgggggtgcgcagggcgcgccccccaaaggctctgaggggcaaaacaaaagcgcctcgcccctgaatctccatcaggggtgaggcgcagtaaggcgctccacggttccaccctgcttgcggttttacagaaaaccgccgcttgtgaccgctgtaacgggcgggcccgtcccggtcatcccgggcggctcaggagtggtaccagccgcggcaatgtcgcaggacgcttccagcctttgcgtccctctctgggcgagtcccgcggcctcttctccatcagtgctcatttgacaaacgcactatatcaccaaacgcccgacctgtcaagtggggaatggaagaaggaaaggagccgatctcagcccagcacctcgaagagcgcgccccacacgtagtccaggtcctcaaaccggacagagggggcaaggcggaacacggcgtcctccccatcctgaaggacggtgacaccccagtcccgctccagccggtccagcaccccgccggtgtcctggccggggaagcgggcggtaacggtgccggacgcctcatccacccccgtcactcggggcccgccggggccgaagtcctccagccgggccttcaagtgccgggtcaggcgggccacccgggcccggtcaccagagggggctccgggccgggccagatccacccgcctcacagcttggtctccatcggggtactgaccacgtactcccgatagttcagctgacgaagcagggcggggagaacatccgcggtctgccggctgtcatccagggtaacataggcgctgttcagggcagcccggcccagctggcgcagaacgccgtaggagtaggaggcggcgctctgctccccgtccagaggaacggcgtccaggctctcctgccagcagacccagccctccgcctccagcccctcccacagggcctctccgcagtagacatagcgggtgcagctgcgggtctgctccgccagggcgcggttccctgcctccagctccgctcgggctccctctggggtgccggcctggacaaggatgccaacgctgtgcccggtgcccagcaggcggcggaccatgtccccatggacagagagctcctccggggcgaagaagaagacgccggattttccggatttctccaaagtggtgaggatgctgtccaacgcctcccccgtctggcagcggaaggccagataggtggggatggaggtggggtccagctcctggcccgggggatcggcggggaccgctggggtgacgtcaggggtctcaggttcctccacagggagcaggctcttttggtactccttcagctggaggttcatctggttgccggccgagtcgatgaagacctcgtcggtgaggatggagcgccgcccgttggaggcggtgtcgtcccggttcttgatgcggaccagatagccgtaatcggtgtggagataggagctccgcagcccgaaaaagtccaccacgatgttcagggggaggtagatgcggccgttgcgggtgatggcccggccgctgagcagctcgccggtctgctggtccacgcagatgccggagttcaggtcaaagaccaggatgccgctgaggctgtaaagggtgatggtgccgctgctctggctctgagtgaggctgacccccagggtcacgccgtagctggcgtttgtggcgctgccgtcgaacagggaggcgggcacgtagaggacgcctccggaccagaggggcatggtgtcggaggccaggggcagcagcttgttgttcagggaggtaaagcacacctcctccaaagccgaggcgggggacagcagggccagacacatgaccagggcgcacagcagggcgccgagacgctttttcaaggggcacacctccgtttccagttgataaggggattatagcatagtataatgagaatcacaagcagccgcgggaaaggcgtgttttcatccatttttaagaaaggctaaaggacacttcaagcccgggcggttatactgacgtcagaacaggcagactgcccggaaaggagcgattcaggatggagatcacagtggagatggtagagcgcctgcgggagaaggcccccgtgtcctacgcccaggccaaggaggccctggagtacagcgaggggaatctgctggacgccctgatctatctggaggagaagggggccatcccccaggcggaggggacccggtggtcgggccgggaggagaaggagtcccagcccacggcggccgaactggtggtccaggagacaccggagccgggaaagaaaaagaagcacaggagcccgctgggcgtggtggtggtgtggcccaagggggagaagcgacggggccgctccctgcgggagctgctgtcccggctctaccgggtgctggtagataacgagctggaggtgtggcgccgggatgaaccggtgacctccctgcccctgctgatcctgttgatcctgtttgtgttcgccttctatgtgaccattcccctgctgctgatcgggctgttcttcggattccgctaccgcttttccggccccgagctggagcgggacagcatcaacgacgtgatggagaacgtggccagcaccgccgccgacatggggcgccaggtaatggatgagctgcacctccagtatgagaagcggacccgggaccgggacggcaaggaatagatctccgggggagtgcccggatgttgaggtgagagaggatatggaagaaaagatccttctggtggaggacgaggaaaagctggctcggatggtggagctggagctgcggtatgagggctatcaggtggacaagagcttcgacggccgctccggcctggagcgggccctgtcgggggagtacgacctggtgctgctggacatcatgctgccccagctgtccggcatggaggtgctgcgccgcctgcggaaggagggggtacagctccccgtcatcatgctcaccgcccgggacagcgtggtggacaaggtatccggcctggactccggggcggacgactatatcaccaagcccttcgccatcgaggagctgctggcccgcatccgggcggccctgcggaagcgggggagcggagagcggccggaggagccgctgctgtccgccggtcccctgaccatggacgtggagcgccacaccgtggcagtgtccgggacgccggtggagctgacccgccgggagttcgacctgctccaccacctgctggagaacaagggcagggtgctcagccgggaggccctgctggacagcgtgtggggattcgacttcgtgggggagaccaactcggtggacgtatatatccgtttcctccgcagcaagatcgacgaggcctttgacatcaagctgatccacactgtacggggcgtgggctacgtcatccgggaggagtaaggacgggaagaaggggagctgattcatatgacgatcgtttatacctccaagaccggttttacccgggagtacgcccagatgctgggccgggccgccgggctgccggtctgtgccctggacgaggctacgggaaaggtggggcccgggagcgacatcctgtacctgggatggctgatggccgggcatatcagcggcatcgaccacgcagttaagcgctttcatgtccgggccgcctgcggcgtgggcatgacgccgccgggggacaaggtgctgcaggacctggcccggtccaactatgtgccaaacgcccccatcttctaccttcagggcggttgggccccgaaaaaggtggggtggctccagcgccggatggtagggatggccaccagggggctgcggcagtccctccagcagaagcgggagcggacccctcaggaacagcggcagctggatctgctgctccgcgggggcagctgcgtggccttccggaatctgacgcccctgctggagtggctgaaaaagcaggagggctgaccggctgcggcatggaaggagaggagggggcccggtgggaaaacgggacatgaagaacaagacgccccccagcggggccaagtcccagtcgctggtcctgcggctgaatacccggctgtttttccggcagctggggatctttctgtgtatggacctgctgctggtggtgctggccctgatggggcagctgatgtgggcggaaaagcgctgcgcggacgtggcccagctggtccaggagcggggcgtgcccaccgcggaggccgtcccctggatggcggccagcgactacaccatcatccccctggaccgggagcccaagggagtggacgtaggggagctggggtggttctctggcggggaggcaacagcggacggcctgcgcacctatgtgctgttctcctactacaccgtggaactgcccaacggcggggagccctacgccattacggtggatctgtccgggatcgggcggatgttgaagtgggcgggctttatcctcctcacggtgcagatcatctccctgatcgccaacctgttccgcaatgccgggactatccgccgcaccctgaggcccatccaggagctggcggccactgccgcccggctcaactccatgacccacatgtccaggcgggagctggaggccctggccggcgagctgagcaagatcaacgccacccacctggacagccgtatcgacctgcccggcacccagaaggagctgaagaccctggccaaggccatcaacgacatgctggaccgggtgaacgcggcctactccgcgcagatgcagttcgtctctgacgccagccacgagctgcgcacccccatcgcggtcattcagggttacgccgctctgctggaccggtggggcaaggacgacccggaggcccggcaggaggccatcgacgccatccgctccgagtcggacgccatggagcgtctggtggagcagctgctgttcctggcccggggagacaacgacacccagcccatccggccgcagctgatggacctgaccgcggtggcggaggacgtgctgcgggaggagcagatgatccacccggagcgggccttcctggcccggtggcaggggccggtggtggtccgggccgacccggggctggtgaagcaggtgatgcgcatcctgatggacaacagcgtcaagtacagcggcccggaggggcgggtctatctccgggtgtcggcccagaaggactatgccagggtcacggtccaggacgaggggatgggcatcgtgccccaggccatccctcatatctttgaccgcttttaccgcaccgacagctcccgggcccgccagaccggggggaccgggctggggctgtccatcgcccggtggatcgtggaccgccacggcggctggttcgaggtggtctcccgggaggacgtgggcacccgcatcacctttgtgctccccctggaggggacggcatgagctggtgggtctatcttctccggtgcggggacggcaccctctacaccgggatcaccgacgatctggaccgccgtctggccgcccacaacgcgggccggggagcgaaatatacccggagccgccgcccggtgacgctggtgtggcgggaggagcagccggacaagtccgcagccctgcggcgggaatacgccgtcaaacagctgaccagggccaagaagctggctctgatcgaaggcgggccgcttgtgtagatggtgttttaagaccttcactgcttatggcgctgaaaccaaggatgtccgttcagcttccgatgaacctcttgatttgccaaaattctaaagtgaaggtgagcttatggaaaaacacaatcattttagtgaacggcgctgctttgacacgaaacatactgttctccaggcttgatttatcaaaagaccccggccccttccgaatggaaggggccggggttctcatttctatttagctcttcagcctctgcgtgagagcagggatgcggccggcggcggcgatcatgccgatgctggtaccgtccgtttgggacgaccgattttgccttcttctttatatttgggaatagccctcataattggttatttatgatatatcatattctgccctggatcacaaacgcattttctcccagagtgtgttgagctttcatcaaaaagcgtctgtttcaccccaaaaggtgcgattttccggagcaggatgacagatacagctggatatggtaaaataggggagccgatcttaggagggcgccatgctgatctatttgaccatgatcgaggcggaggaggaccgacaccggtttctgtccctctaccgccgatacaaaaagctgatgctgtatatcgcccacgacatcctgcacgacccccacgacgcggaggacgcggtgcacgaggcttttttgcgccttgcggaaatgatcgagaaaattcatgaaattgactgtcctgaaaccaggtctctgatcgttatgattacaaagagcaaagccatcgacctgtaccggaagaaaaagcggcgggcggggacggtcccactggaggactggaccgccgccgcaccaccccaggccgagggtgtggagcggggggacggggtggcccgggccattgcggccctgccccggcgtgaacgggatgtgctgctgctgaaatacgaccagggatatggcaattccgagatcgggaaacttctgggcctgcggccggatcacatatcccaaatcgcccaccgggccaaagagcacctgcgcaaaaatttggaggaaatgggggtggaggtatgaccgatcaggagctggaccgccttttgtacgcccacgccggggcggcccgggaccttgtgctggcccagctgcccccggagggcgagctgcccgacatccccacctccccccggttccagcggcgcatgaaggccctcatccgccgggccgaccgcccgggctgggccaaggccgccctgcgctgtgcccgccaggcggcggtcatccttctggtgtgcgggaccctcaccttctccggcctgatggtcacctcccaggccttccggacccaggtcatcgcggtcatcacccaggtgttccaggagttcaccgagttccgcttctccgcccgggaggaaacggcgcgcagggccggggacgtcgccctgacctatctgcccgagggcatggaggaaatccgccggagcggcaatcatatcagcctccacatcttctttgaggacgcgacaggaaacaccatgcggctgacccacaccgtcatcggcgataaaacctctcatgtttcgatgctggacaccgaggacgcggaggtggagcagttctatatccagggtgaacaggctaccgctatctccaagggactggaccacaccattctctggaccagcggaaacagcgtctatctgctcaccgggaccatcgcaatggacgaattgaagctggtggctgcgggggtccaatgacccagtaaaaacttttgaaaaaatttttggatttttttgcgttaactgtcaaaaacagcctccccccgtcgttatgatatatgaacgcacggagggaggtgatttttatgcgtatcaaagcaagcaagctgctggcggcggtgctggccctgtgcctgactctggggaccgcccccgccgccagcgccgccgctctgccccagtcggctcccggcagccaggacattaccccatatttcctgtacattaaggggcaggactgtatcctggatatctcagggcggacggcatacatcaacgcctgggtcagtggacaaaccagcgtggccaccaagtgcaaggtccgggcggagctgcaggaaaagtcgggcacttacgcctggaccactgtggatttctggactgaccagcagaatggaacctgggccgaggtggacgagacagcggctgtgacctccggtaagacctaccgggtcaaggtgaccgtcaccgtctgggccgggagccagtcggagagccagaccttctattccgacgaggtggaagcgtaaggcacacaaccaaactcaaatgaataaatgtcaggaggttctgtatgaaaaagcaattcgtaagtatcctcgccgcaataaccatcttatgtaacttgtgttttacagaagtttacgcatttgaggatagtacctcggctttgaaagaatttacgttaactgagaacaccacattttttaaatcatcccatagcaccgtagcccaggatgattcagagaactacgccaatataagtattgactcggctggacaggttgcctctattacgttttctatcgatgagcacgtctataccgtcaatatgaccggtatgcttgacgcaatctcctctggaacaaacaccggatatgttggtgtatttgaaggcacatttgatcccgattcaaatgaccccacttttgcacccttatctaaatctgatttacccattattgccgatattgtattcacgggaaatgaatccttctgtgctttgacttttggagatgcctccgaaaataagaaccccataatttatcattttggcatttattctgactccattcgtaatatctccaaggcatacatagtcagccttgaaaacgataatatcgccattgccgccaagagtacttcccgtgccaccgttgatgcagaaatgcgtgtgcaagattacgccgcaattaaaagcggtacatactctctgggtgaagtcagtatttttcatgcaaatcaattgcgaaaccaaaatactatgactgtggctgcaaaagtaaattctgataaagataatgcggtttcgtacattaacaccagcttaggttatcctgctagcaagtacaccgtagttgcctaccctgatacagcgtatatctctattcagggaaatcattcaaatttccatgcagcgtccggtagcatcactcccgacaataacgagacccgtgttagtcttcccatctatttttacgctggagaattccttggcatacaatcggtatccctatctcttgtaactagtaagacctccgttactacttctccttatggttcaaactctccccatgatgataacaaggtatcttgggaaatctatcgccaaggtggtttcaatgcagatggctcttatgaagataaaacaggtatcggtgtaaaagcgagctatcagttcgaaggtaccgtacaaaattctatgtacacctcccttactacgactggcaagctccgttacacctatgtggtagaagaaaagagttcttctggaaacacggatgcttttgtttatcattttacgacagcaagcaaatccctctatactgatgttgagattctgccttgattaaggtatgaatgtgcaaaatatgatcaaaaaatgcgtcttccctttgaccctgtttcttctcttgatcttctgtttgttcaccggaaaacagctttctcagttttctgatttagacagcgcagatttaattcccaaacaatgtgaaattggagtgattttcgaatatcagaacgatctccccgattcctttaaaatcaatgacggaaacagcctggctaggtattttaactccctgagattggaaaaagctgattccgattttgatgaaccatgggttttccgtatcacgttttcttctgcgctgggcggttttggtgctgtcagtggcgaatatgtttcgatcccccccgatgctgagaccctgactgttttagtcggcgatagcaaaatgctgattggagatgtctcttacaggcttccttctcccgatttcctggatatcttagaagtaaaatacaattattttagtgaacgactctactttgataccaaacacactgttctccaagattgattaagaccccccgggccctttcatttggaagggcccgggaaggggcatttttatttggtttttcaggctctgtatcggcgataaaactgctcatgttttggggtggacaggtgaagcagttcttcacccacggcgagcaggccgccgctatctccaagggactggaccgcaccatcctctggaccaccggaaactccgtctatcggctcaccgggaccatttcaatggatgaattgaagcaggcagctgaagcgatccaatgagccaaaaaaacgtttcacaaaaatttccggattttttcttccctttcaactccctccgccggtataatagatagatcgatacgaagggggggttttagtatggcaggacagatgttctcaaaaaacaatttcaaaaatctttttctgctcttttttatcatctgccagtttggcgcaatagtttccgacagccatatctgggactggggcgtttatctggccctgaatattctgatcgttctgtacgtctatctgcgtccaggtgaaacacgcacgaagtcctcccagcaaaaactcctgatcgccgtgctgatccacaccgcagtcatcatatccacactctggcgcgcctatcgggtcagttttatcatggatatcttttttgatattttggacttctgggcaattttgggatttattctgatcctgaaatttggcttgtcaaagagatagaactgctgccgggatgtaagagaacggaacggtcgcacaaaaccagtatggcaaacacatagtcatacaaattttcagaaggtttatcttaacggattcgcttcaatggaatattcagcggtctatcccagcaagggcaggccgctgaatattttaaaaatacagaaactataactgcacatctgttccgccgggtgcagggtgagtcctatgaaatttattatggaattatttaccctcctaagttattgtatccctttcgtcacaatacctgtattcgcggtaagtgccatcttgatgatacgtactttttttgctgagcaggctcccgagcaaagtaagaaaaggagacggtatcttggttacatgctggtctcctttctttttttctgccctattttttgggggggagtttacttctcattttactgtatccctttcttcacaatacctgcatttgtaataagtgccattttgatgatacgtacttattttgttgagcagactcccgaggaaagtagaaaaaggagacggtatcttggctgtatgctggtctcttttctccttttcctgctcttttttgggggagttatcttaatgctgtcatgtgtgatcgattgattttcaaaggagtttagtaagcaacttgcgatttacataaaattatggtgaattgtcatctggacaactcaccataattttttaaccactgattctttttatttagtttttcaggctctgcatcggcgccggaattctgccgccccggtccacgaaggccttggcggagaagggatggaccggctgtaccggggcggagcccagcaggccgccgaactccaccgtgtcccccacctgtttgccgggggcggggatgaggcggacggcggtggtcttggagttgaccatgccgatggctgcctcgtcagcgatgatggcggagatggtctcggcggtggtgtccccggggacggcgatcatgtccagacccaccgagcacacgcaggtcatggcctccagcttgtccagggtgagggccccggagctggcagcggcgatcatgccctcgtcctcgctgacggggatgaaggcgccggacaggccgcccaccgaggaggaggccatcacgccccccttcttcaccgcgtcgttgagcagagccagggcggcggtggtgccgtgggtgccgcacacctccagccccatctcctccaggatgcgggccacgctgtcccccacagcgggggtgggggccagggaaaggtccacgatgccgaagggggtgtccaggcggcggctggcttcctgggccaccagctggcccatgcgggtgatgcggaaggcggtctttttgatggtctcggccaccacatcgaagggctggcccttcacgctctgaagggcgtggtacaccacgccggggccggagacgcccacgttgatgacccgctccggctcgcccacgccgtggaaggcgccggccatgaaggggttgtcctccacagcgttgcagaacaccaccagcttggcgcagccgaagccgccccggtccgcggtgcgctccgccagctccttgatggtgcggcccatgagggccaccgcatccatgtcgatgcccgccttggtggagcccacgttgacggaagagcacaccaggtcggtggtggaaagagcttctgggatggaggcaatgagcttccggtctgcgtcggtcatgcccttctggaccagggcggagaaaccgccgatgaagttgacgccggtagctttggccgcccggtccagggcggcggcaaagggggcgtagttgtctgtctccgccgcagcggccaccagggcgatgggggtgacggagatgcgcttgttgacgatggggatgccgaattccttctcgatggcctcgccggtggccaccagattttcggcgcagcgggtgatcttgtcgtagatggcgtcacaggcctgcctggggtcgctgcgggcgcaggacagcagggagatgcccatggtgatggtgcgcacgtccagatgctgctggtcgatcatctggatggtctgcatgatctcgtgttgattgagcatagtttcctcctgtaaaaggcggtgtggccccgcggggatcgcgctgggcggccggtccgcggcggtcctccgccctcagattcggtgcatggcgttgaagatgtcctcccgctggatgcggatggacagcccctgttccctgcccgcctgctccagcaggtcggacatctcgccgatggaggcggtgcaggcggagagatccaccagcatgaccatggtgaagtattcctggagcacggtctggctgatgtccaggatgttgatgctgtgctgggccagcagggcgcagacggcggcagtgatgcccaccttgtcccggccgatgacagtgacgatggccttcatagaagacttcctttccacagtaaattttgaggaatgcggagagacgggggaggagaaagccgctgcgcggcggggccggaggcaggcgctgctcctcagctcagctcgtccagagtgagctcaaagccggggaggaactcctccataaagcagcgcagggcgggcagcgggttctgaaggagcgcggcgtaggtctgctccttggccttgcggaactcggtgttccccgccttcagctcctccaggcacttgaggtaggcggagagcttgtccgccgcctttaccaggtcccgcacatgggggtccgggatggtgatggcctcgtcataggcggggcgcaggtcggggggcagcatggacagcagcttctgctccgctacggcctctaccgccttgtaggcggtctggatgtccgggttgtcgtacttgatgggggtgggcatatcgccggtaaggatctcactggcgtcgtgatacagggccgccaccgccaccacgcccgggtcggtctgcccgctgaagcgctcgttctcaatgacggccagggcatgggccagcactgccaccatgtgggagtgctcctggacgttctcagggtcggtgttgcgcatcaggccccagcggctgatgtagcgcatccgggcgatcatagggaagaaatgatagggcacggggcgcccctccctctgttgagataaaagttattttatcatagcccgccccggatgtaaactgttaaaaggggaggcggggcggcagttgacggatgggccggaatcggagataatagatcaaaggcccagggtctgccgcttccggggcggagggggccaggggccggaaaggggagagccgcgatggcaaagaaaaattcccgcaataccaaggggcgcatcatccaggcggcatggcagctgttttaccagcagggctatgacgatacaacggtggaggagatcatcgaggcatccggcacctcccggggctccttttaccactatttcgagggcaaggacgccctgctctcctctgtctcattcctgttcgatgagaagtatgaggagctgatggcctgcatggacccggaaaaggaccggttcgaggtgctgatggagctgaaccgggagctgtttgccatgatcgaaaactccatctccctggacctgctggcccggctgtactcctcccagctggtcacccggggggacaagcatctgctggaccacaaccgcacatattacaagctgctgcggcagatcgtccttcaggggcagcagcggggagagctgaggggagatgtgacggtaaatgagatggtgcgggtctacgccctgtgcgagcgggccctcatctacgactggtgcctgtccgggggggactactccctgctccagtacggcaggatcatgatgcccatgtttttgggaggatttcggacaagtcaaaagaattttgtacaaaatatctaaaggatgattttagaaagtgtacggctgaaatcccgcagtataaaagagaaaaatgggaaatagagagaacacagtatagaatttattctatactgtgttctgtattttgttcttaagatctccatgctataataaaaaaacgccgtgcgctgccggcagccgtcctgctcctgctttgtgtgtgggggagccggagggtaacagaatatgaggagagatactatgaccatttcgcagatctgcatctgcctggccatcgcggtctatctgatcgccatgctgggcgtaggcgtctggttctccaaacgcaacaactccgtagacgacttctatctgggggggcggaagctgggccccttcgtcaccgccatgagtgcggaggccagtgacatgtcctcctggctgctgatggggctgcccggcgtggcctacctctccggcctggcggaggccagctggaccgccatcggactggctgtgggcacctatctgaactggctcatcgtggcgcggcgcatccgccgctactcccaccagatcgacgccatcacagtgccccagttcttctccaagcgctggggggatgagcgaaacctgctctccgccatcgccgccgtggtcatcatgatctttttcgtgccctatctggcctccggcttctccgcctgcggaaagctgttcgcctccctgttcggcatcaactatgtttccgccatgctcatcagcgccgctgtcatcgtcatctacacggtcatgggcgggttcctggcggccagctttaccgacctggtccagtccattatcatgacggtggccctggtggtggtgctgggcttcggcgtggcgcaggctggcggcatggaggcggtgatggacaacgcccgctctctggcgggctacctgtccctggtcaacatccacgacccggccaccgggggctctgccccgtacagcctgctcaccatctgctccctgctggcctggggcctgggctacttcggcatgccccacatcctgctgcgcttcatggcgattgaagaggagaaaaagctggccctctcccggcgggtggccactacctgggtagtcatctccatgggcgtggcggtgtttatcggtgtggtaggcaacggcatgacaaaagcgggggccatggagcagctgtccgacgcggagacaatcatcgtacagatcgccaacctgatcagctgctacggtgttccagccgctctgctggccggcgtgatcttggcgggtatcctggccgccaccatgtccactgccgactcccagctgctggccgcctcctcctctgtctcccagaacctggcggtagagttcttccacctgaagatcagcggaaagaagagcgtgctggtggcccggagcaccatggtggtcatctccctgatcgcagcattcctggcccgagacccggacagctctgtcttccgggtggtctcattcgcctgggcgggcttcggcgccgccttcgggccggtggtgctctttgctctgttttggaagcggtccaacaagtggggggcactggcagggatggtcaccggcggcgtgatggtcttcgtgtggaagtatctggtggctcctatgggcggcgcgctggccatctatgagctgctgcccgcttttctgtgcgcctgcgtggccatcgtgatggtcagcctgctgacccccgccccggagcagagcatcctagaggcttttgagtgctttaagtccaagcaaaagcagaaataacgatagaggaaaaagcctcgcagagttcgcgcccgcaggcgcgaatccagttgtgatctgttttcgccggcggcatgtgcgtcggggaaaacacttctcaggctgcaagtgtggggtttgtccgcttgcggcggaccaatcccgcgcgcggcaggctgctgctttctcaaaaaagtggcaaagccgctttttcgacagtctcaggaaaagggcctttggccctttttctttttgtcccagcgcgggtcttagaggagttttttggaaaaagtaagagcggatcgccctggagtggggaaggacatccggcagctgaacccaggaaggagtgtgtctgggaagcgagccctggagactgcccttgtaagagagagcggcggacccgctgggccctgcgggggggcggactgtaggaccggctcgccgagttgcagcgcctggcctggaatgcatagaccgtcttacttgcccagtcatgacacgtgcccctctgccccaaacatgccgcggtacaaaagcttcagtcaaaatattattgacatatgacgaaaatggagctatactaaagaggaaagagagggggcggtcccatggcgcggccggtaaagcggagaagggtatgcgggctgcctcctgtgggggcgttccggcctgaaggagggccaggcggcccagtgatcgaggtgacagtggacgaatatgaggcggtgcggctcatcgacctgctggggctgactcaggaggagtgtgctgcccagatgaatgtggcccggaccacggtgcaggccatctacgactctgcccgggagaagctggcccgcatgctggcggagggcaggcccctggcagtccaggggggcacttacgacctgtgcggtcaggcggagcactgctgcggccggcgctgccgccgccggggcgggggagagggccggtgcgaaaacggccgcctgacctgccgggaggagggccgctgcccgggacggtctggagtggaacagaacaggatgaaacaggagggacagaacatgaaaatagcagtgacatatgagaatggacaggtctttcagcattttgggcacacggagcgattcaagctctatgaggtggaagacggagcggtgactgccagccaggtggtggacaccgccggcagcggccacggggcgctggctggattcctgcgtgagcggggcgtccagacgctgatctgcggcggcatcggcggcggggccagaacagccctggcccaggcggagatccagctctatcccggcgtatcgggggcggcggaccaggcggtggccgacctgctggcaggccgattggcctatgacccggatacagtgtgtagccaccaccacgagggggacggagcccatcagtgcggcggccacggagagggggagggccactcctgcggccattcccacggggctggcggccagggctgcgccggacatcagggataaaaacgtcccggcatccaatcaggatgccgggacgttttttacttacagtttgccagctggagctcagcccagattcagggcttccttcaccttggcgatgatgtgggcaccgatgtcgcgggaggcgtcggtgctctgggcgcccaggtggggggagaccaggaagttctcgcactcgaacaggggggagtcaaagccggcaccctcggtcaggccgccgccggccagctcgttctccataacgtcggaggcatagccgccgatcttgccggccttcagggcctcgtacatgtcctgctcattgacgatgccgccccgggccatgttgaggaccacggcgtcatccttcatctcggccagagacttggcattgaacagatccttggtctcgggggtgaggggcatgtggatggtgacgaagtcggagaccttcagcagctcgtcgatgcccatgctggtggcctgctgctcctcgaacacgtgggcgggcaggtaggggtcataggccacgatgttcatcttgaaggcacggcccagttcgcccacgcgctggccgatgcggccgaagcccaggatgcccagggtcttgccccgcagctcgcggcccacgaatttatacttgtcccaggtcttgttcaccttcacgtcgtagttggcggggatggtgtggcgggacagatccagcatcttggagaaggtcagctcggccacggcgttggcgttcaggccgggagcgttgaagacctgcacgccctttgccttgcaggcgtccatgtccacgtggttcaggcccacggagcacacgccgatgaccttcaggttggcggcggcgtcaatgatctccttggtgatcttggggtccacgcgcatgatgagcacatcgtagtccgggatgagcttgaccagctcctcctgggtggggagcatgtgggtgtccacctgcatatacttgcccagctcctcggcgatggcactgtggacggcatcaatgatcagacatttcatgggaaatcttcctttcttcttcatattggggctctttggcgactcaggtcggaagatgcccgtttccgcccggcattggtaaaataggcagaaaatcttccagttatcatgattatagcatgacagactaaacagggacatcacatttttcctgagggttgccacagtcgttcaactgtgatagaatacttgcaggaagagaatggaacagaggggcgcccggaaccggagggcggaaggagcggcttttggagggagacacgtgaattttttacatctgaagtatttcctcatggtggcggaggagctgaacatcacccgggctgccgagcggctgtatatctcccagcagtcgttgagcaaccacatcagcaacatggagcgggagctgaatgtgaagctgttcacccgctcccccaagctggcgctgacctatgccggagacctgctggtggacacggccacccagatcctggatctgcacagccagtacctcaacaaggtgggggatatcaaccggcactatatgggggtgctgcgggtggggatctcctacacctgcggcttggcggtgctgcctgagatcctgccccagttccgcagggaattccccatggtggagttctccatgttcgaaggcaactcctccgagctggaggacgagctggcccacggccgggtggatctggtcatcgccttccaccccatcatgctggagggggtggagaccgtccccctgacagaggaccggctcatcatggtggtgcccaaggtcttcaccgaccaggtgttcggtccccgggcggaggagatgcgggcccagtacgcccagggggcggatatcaccgccttccggcagatgcccttcatcctgctcaagcggggcaaccgggtgcggggcatcgtagaccagtacctgagccggtgctacttcaagcccaagatcatcctggagacggagaacacggtcaccaccctggctatggcccgggaggggatgggcatcgtcatctgtccccagctgttcctgcggaccatccaactgccgggggtcaagcccgccccggaggatgtggacctgttccccctggccgacccctccaccctgagccggctggtggtgggctaccgccgggaccggtatctgtcccacttcgctgagcgcttcatcctcatcgcccaggacgtgctgagaaaataagcggcgtattcctggcagacagccgatccttccctgtaatggagatgaccagaggccccagtccgtactgcacacgggctggggcctctggtttcagatccgttcattccaatgggagactgtgggcgcagatatccaggagcggtcgacaaagctactgatccagatagaccccagtataaggaccctggaaggaggcctctaattttgataagatgtccaaaacccggcccgtatctgccgggatcatagaggatgtcacgccttcagttactttataaatttgatattccatgatatcagatagctcatgataaaatgcgttgcagctcctttggacccaatatcccccagacagatcctgcgtacagaagaaacaggcccttctcagggcggacgcctgttttgctaagtggcctttgtgacgaaataggggcccagctcaggctcatgggtgacgatgtaggcccattcaaaatcggggtccacaaagtagaagtcccctgagccccggaaaaaggcggcctggaagggctggaagccgtcgatctgatagaatttatagatgtcggcaatcccctgatggggcggggcggagggcctaaaatcgaagcgataaaattcgctgaaacggagatggtacagacccaggacgctggggtggctgcgccggtcaaaggcctgctccgccgcctccccctccaggaatgggcacaggcggcagctgaaggcgtgccacagttcctccgtgacgcagtggccgcagaactgctcgtcggagaccgcgggcaaaaacgcgcggcggaatctggcctcgaactccgggaagcggaccgtggtcagacgccggaccgacgccccctcttgggagagacggaccgtgatcccgctgtcgtatccaggggcctcccagaagcagtccagcgacagggacagccgcaggtcggccccgccgtcaggctctgcccagaaatattttgtggggttcccatccatctgttggcctcctttttaccaaaggcattaaaaattggttttcctatgcagacagcggcgcgattcgcctggcagaatatcaccggctcccggcggggcagtcattcccgggcctctaatatatgcgtcataggtgttcaggcgaatgatggtggagatctccagcacctcctctgatgtgggggggccggtgagcccattcagataggcggtgatcttctgcatctccctgggtgggatggcggtaaaggcgatctcattttccagctccaccagcacttcgcccagctggccccatgtgggctgctgcgcgtgctgagccgtctcgtcaaagcgggcgatggcgtcgatggtcatgtagtcataagttccccgcttcagatgggtagccagccggtctgccgcccccagacagtcccacccgttttgagcggcgatgtcctccaggcgggtgtcggccctctgataccactgaaagagggagaggaagaggagaaggagcaggagaaagaccgccgccagcgcgttgcggacctgccggggggtaatgtgtgttcccttcatctcttcatgctccaaaagccacgcttggccagagaaatttcggtcatcagttcggagaaccgataggagggaccgaggtggtggttggcggtgtgggtgatggcctcccgggtgctctcgtcgatgcggtccacttggatgtcccagagctcctcgaccagggcaatctccttggggtagcgggccaggaggtcagcctgcacctccgggctcaggtcccagcggtcctggtccgcctctgccagttggacagccagaaagacgcctgtggtcagggagaggaccagcaggggcagaaggatgcgttttctcaaatgagtacgggccataagaagctcctttcgctgatcagaacgatctggcacgggggcggagaatgagcgaagagatgctccgccggcggcctttatgagctcttccccttgtgcttgtcgtaaatgaggtgagcgcagaggatgaccgggacggccagcaggatcaggttttgacgcccgtcgggagcgggagcatgggggcggtgcggggcacaggggccgccgttcagtcctgccgctccagcgccccggccagacagtccaagacctccgccgtgtcccccggctccagcaccgggtcattctgataggaatagtcattcagaaaagcggccagggtctcccgctcctgaggggtgagctgctgaaaggattccgggctttggacaaactgactcagctcggaaaagacctccagccaggcgtcatccgccccgaacccggaactctgaaaataatatccacaagacgcaatggtccgcagctgttcggcctcccagatcatggagtcatgatagtccggggaggagagattgccagccagaaagtccttcgtgctggtgaactccatctccagatggtggtccagctgggccagctcgctctggaggacatgattttcgtggcgttccccgttcagcaggaagaaaaagtacaggagagcaataagaggagcgtattttttggccttttctctcacctttgcccagcgcataagatccaactcccttggttaggtcctggacagcctgccccgcgtctgccagccgtacagtttgtacttgtcgtgaatgaagtggacgcagaggatgaccgggaggaggaaggagccggccagcagcatccggcggtataggtgcggccccgccccgccggatgcctccaggcccagggtgatagctcagaaggtcttgctattatgtatcccagacaacgccgtcgatgagggtgatatagagattgctgagaataggaagcggctcattggagacggtggaagggacctcctcctccgccatcataatcaagatactggcatcctgggagacgccccgccactcaaacccaccccattcaaaggaaaaaggaggttcttcgccgccgctcaggctccgataggagaacccgcactgcttcagctggttgatgtagctgatgacgtctgggatactggcgccccgaatatagatattccagcagggcgcatcctgatagacgccggtgccatccgcatagtgctctctgtactgggtatagaccacctgaccgctgcggaaataccccatctccttgggaaatttttcatcctggggccaaacataggcctccccatcctgaaccccaaagggagataagacaccccccagacagaaggagcacaggaacaacaataccaggagcatagaccgaaggaaaggcttcctatctaactttttcattgaggttcttcagtcccgtcattgtaatagatacagtgctcttctccacgaggaccgacatcagatccaagtattgtggtagaggcagagatgctggcaacaccgtaagagaatgaaacactgatatcaactccaccttgatccgaggaaaaatatgctccttgagcacgaagtgcttcaaaataatttccacttattacgggtgtaacagagtaagagacattacctcttttagcccatatacgggaatcgccttcatcattgattttatatttatcatagtagcatacgatataattttgacggacagtagttgaaggcgtttcgtatttataatatgttccatcttcattataataataaacagatgagttttgtgcaaccttttttgtttcaatggattggctattttcattaattccaaccatggttaaggcatatccagcggtatcttctccggcaggaattttgtcccactcccagctgtaaacacatgtgtattgtgttgatgtatgctttgtacaacgaaggtcgctgctcaagcttgcagatgcacgcatggctgctacatcaaaagaaacactaccagacagataagctttcataagtgagacttcttcactgctgtaaccgttgttcatgagcatgtcggccggaagttcacataactttttgaaagcccgttcataggccgcaagaggatcttctccgctttgtccagaacgttgaaattgtagagattcttggactgcaatttcgtattcagacatggtgtttatagttgtagtgttctgatttttgttttcataaatagaggaaatactattaaaagaagcaaaagagtttatagaaaataaagaaatcagggctgtggcacacaaaaataacgataagagtcttttcttcatcgtgattccttcctttcaatatgaaattttaatcgtaagttggaaaatagcgaaaaagtagtgttgtcaaatgttacgctgtctggatttcagagtagatagttgcggtttctgagtcactgccggcccagacagtgaccaccgccttgacccggtaggtctcgccgggggtcacagacaccgtctcagagacagatgcccgggtcccgtcctggcggtcggtccaggagtccaccagtatccaggcgaaggagccggatttttgctggagctccacccgtacctcacattcggtggaacgcccggtctgtccactcacccagccttcgataaatgcggtcctgtcggagatcatcaggtcacatccttggtttttgatatagagggaataaggaacgatttcttcaaaaacgggcgtgtcctggggcggctgggcggcagaggcggcgggggtggtcaccagggtcaggcacagggccatccccgccgccagccagcgcatgggtttcttgcgcataaaaatcacctcccttcatcggtcctactaatataccgacgaaaggaggcgattccggacaaggaaatcaaaatttttttgaaaaatttttaagaaatgggttccagacccaatgcgacctgtttcagctcttccataggaatggtcccggacaacaaatagtagcagttatcttcggtccaaaaaatagtatgatccagattttttgaaattgccatggcttctgagttatggattttgaagtactcaacctctgcgtcctcagtgtctactcccagaatactggatgcattggcgcccactacgatgtgggttacttccaacatatttccagcgttgtcctcgaaacaaatatagtgcctgattctgctggactgccgtacagtctcctccatcccctgcgggaggtaggtaagaacaaaatctccggctgtccgatctgtttcgccctcggcggagaaacggaagttggtgatctcctcatagacctggaccagcacctccagcacctgggcccgaaaggcctgggaggtgaccatcaggccggagaagcccaccgccagaaagaccagcgccaccgccgccgcccgccgcacctgggccagggcacggacccgccggggggagcgccccatccggcggatcaggcggtccatccggcgctgaaaggcgggggagggccgggcctggggcagctccccgtccccgggcagggaggagagccacaggtcccgggccatgggcgcggcctggctgagcagccggtccagctcctgatcagtcatacctctacccccaatccctcaagagcctcccgcagccgggccttggcccgggacacggtgcgctccacggcggacacggtcatgtccagcacccgggcgatctcccggttgtccagtccccggtcatatttcagcagcagcaccgtccgctgacgggcggggagccgggccatggcctgggccgtcagctcccggagggaggacgcctcctccggggggcggccggcctgcgccggggcccagtcctccaggggctccgccccctgccgccgccggcggcggtacagatccagtgccttgccctctactatcataccgaccagtgccttcgtttccggacagaccgggtcatgaattttttcgatgatttccgtgatgcggagcagggcctcctgcaccgcgtcctccgcgtcctgctgactgcccaggatgcgcagggccagatagaacatcaggtcccgatattcccagtagaggagggcgaacttgttgcggccctcctctgtggggatcatcgccaggtagaccagcatggactcgccccctctccctctgtccagtgtaacacaggcggggggaaatgtcacccccgggcggccccggagggaacagaaacagggggcggcagcggtcaggctgccgccccctgtgggcgtgcaggacaggggtcagcggtccagctgggcggccacttcctccaggtaattgcgctccgccccctccacctttccggcgtcgcaggcggcggccagggcggggtcaatgggcaggcgggccaggatgggcaggcccagctcccgggccacctcctccaggcggctctccccgaagatggcgtgacgggcaccgcagtcggggcactgataccagctgtaattttcaatgaggcccagcaccgggatggacatcatctccgccatgtgcaccgccttggagacgatcatggacaccagatcctggggggaggtgaccacgatgatgccgtccaccggcagggactggaacacggtgaggggcacgtcccccgttccagggggcatgtccacgaacatatagtccacctcgccccacaccacgtcggaccagaactgcttgaccacgttggcgatgaccgggccacgccagaccacggggtcggtctcgttggcggtgagcaggttcagggacatgagcttgatgccggagggggtgacggcggggtcgatgcccgcgtcggtgccggtggcccgctggtggactccgaaagccatggggatggaggggccggtgatgtcggcgtccagcacggccaccttccggccccggcgggccatggctacggccagggaggaggtgacggtgctcttgcccacgccccccttgccgctgaccacggcgatcaccttcttgatgctggacagggcgttggcagggacgcgcaggtcccgctcgctgcagctctcgccgcaggtagagcagtcatgggtgcagttttcaggcatgatcgattctctccttcatatggttgggatcacttgccgtcctgacggccggcaaaggtcttgttgatgcgctcgccggtggtgtggaccagctggaacatggactggtagagcaccgggtagtcccgggccaggatgtcgtggctcagctcgggcatgcggctcttgtccttgccctggccggccagggcctcgcacagctccacttcgctgcacgccatgtcagcctcgggcaggccggcggcgaactgccgggccgggacggagaaaaagtccgggttgttggacgggttggcctgatacaggcggcggaacaccttatagacagcggtggacaggtagttggaggcggcacggatggcctcccggctgccggtcttgcccagcaggtcgaagagcatgcccaccgagttcaccagcagctttttggacagcagggccagtacgctgcccctcatagagttgtccttctcatcgctcaggtcatagagctcctccggggcaatggtggtgccgtcccgggtgagggtgcggcccaggagaaagtcggcggagaccccataatagtcacaggcccggaccacgaaggccaggccgggctcccggatgccgttctcatagtgggacagcagggcctgggagatgcccagggcacccgctgcggtgcgctggctgaccccccgctcctgccgcagcagggagagggtgcgggaaaattctgcgttcaaatttctcacctcgaggggcggcccgcaggccgccgtttctggatctcatctcgatctgcaatacatacagtatagtataacggaagcattacgccacgtaaagagaaaaatgaaaattttcgcggaaatttgacacgggtggacaacggccgccaaaacagggctgttattcccggaaggagcggggaaaactgaaaaaagaggtcccacaggaattttatgcgcttctgcagcggataagccttgaaatttctggctgaaaatgctaccataagggacagaaaagcggccttacggccacgaatcgaaaagttggagggatcacccatgcacatgtttcagaatttgatcgacaaactgaaggctcatccccgcaagatcgtctttaccgagggcaccgacccccgcatcctggaggcatccgcccggctgctgtccgggaccttcctgacccccgtgctggtgggcaacgaggaggaggtccaggccgccgccgagaaggccggcttcaatatccgcggcgccatcatcattgacccggagaactatgacggcatggacgccatggtggagaagatggtggagctgcgcaagggcaagatgaccgccgatgagtgccgggccgccctgaagaagggcaactactttggcaccatgctggtgaagatgggcgtggccgacgccctgctgggcggcgccacctactccaccgccgacaccgtccgccccgccctgcagctggtcaagaccaagccgggcaacaagatcgtctcctcctgctttattctggtccgcgcctccgccaccggcgacaacgatgtgctggctatgggtgactgcgccatcaacatcaagcccgaggaggacgagctggtggagatcgccgtggagaccgccaagtgtgccaagatcttcggcatcgcccccaaggtggctttcctgagctactccaccaagggctccggcaagggggaagatgtggacaagatgcgcaacgcctgcgagaaggccaaggcactcatgcccgatatccccgtggacggcgagatgcagtttgacgccgccgtgtcccccaccgtgggccagctgaagttccccggctcccccgtggccggctacgccaacaccttcatcttccctgacatcaacgcgggcaacatcggctacaagatcgcccagcgtctgggcggctttgaggcctacggccccatcctgctgggcctgaatgcccccatcaacgacctcagccgcggctgcaacgcccaggaggtctactccatggccatcatcaccgccgctctggcggagtaaacggccagacgaccacagactgcgccggcgggccccgttggggcccgtcgttttacagagcgggggccatggagtagacctggggccccatcaaagatggggacggcgcttgcgccgtacaagcgttttgccggaggcaaaaccttggcggaggggcggctgggccgccccgagcaatgagatcccgaagggaacccgcaaaatggaaacattttgtgggcctgctccatggccatcatcaccgccgctctggcggagtaaacggccagacgaccacagactgcgccggcgggccccagtggggcccgtcgttttgcgtcttgtgaggggacagggaagaaacggcaggcacatgggagatgcggttttataaaatcgtttcgggggcctgtaccgctttttaagatgcccaccttgaaaggactgggaaaaaaacggcggattttttccctctgtgttgcattttctctgcgggtaaggtatgataataaaagcgcattctcccagttttaggagtgttgtcatgagaaaagatatcgctttgcccgtgctggccctggcggggggcggcgcctgcctcgccctgcgccgctggcagctggccgccgcgctggacccagagaccgaactgttccgctccgtcccggccacgccggtgctgatcggtgtgctggccctgctggcgctgctgttcctggtcctgatccaggggggagggaagccggaggactatcccgcagccttccgctgtcccagctccctgtatatgaccctggtgacggcggggagcctgctcctgctggccgccgcggcgctgggtaccctgggctttttccgggcgtttcagctgtggcgggacggactgggccagggactgcccgtgatggagctgctggctgccgtattgtgcatcccctccgctgcagcgctgatgatcctggggcggggccattaccggggaggcctgcccgcctgttatcccggcctgaccaccctgcccggctacgccgccctgccctggctggtggggatctatcaggagtactcccgggacccggtggtgctgcggttcgcagatatgatcctggcggtggtgtgtgcggtgctggcgctgtacttcgccgcctccttcgctttccgccatcccaggcccaggctgtgcctgtttttttccctgatggggatcgttctgaacctggaggcgctggccaacggacagtccctcttctttaccgcgctgaccgctgctgcggtgctggtcctgctggcccagagctgggcgctgctgcgcacctgcttcggcccggcttggccggagtgcctgctggaggatcgaatgcccagcggggcattggaacgggcagaaggggacaatgccccgggaggagccggggtcgagaatcatcatcgggaggacgactgaatatggaacgcaagagattttatatcaccacccctatctactatcccagcgacaagctgcacatcggccacacctactgcaccgtggccaccgacgctatggcccggtataagcgtctcaccggctgtgaggtcatgttcctgacgggcaccgacgagcacggccagaagatcgaggacaaggccaaggaggccggcgttacccccaaggagtatgtggaccgcatcgtggagggggagcggggcgtgctggatctgtggaagctgatgaacatcagcaacgaccggttcatccgcaccaccgatgactaccacgtgtccgccatccagaagatatttaagaagatgtatgagaagggggacatctacaagggcaagtatgtagggaaatactgcaagccctgtgagtccttctggaccgagagccagctggtggacggcaagtgccctgactgcggccgggatgtggtggacgcggaggaggaggcctacttcttccgcctgtccaagtacgccgaccgggtacagcacctgctggaggacaccgactttttggagccccgcagccgggtgaatgagatggtgaacaacttcatcaagcccggcctggaggacctgtgcgtcagccgcacctccttcacctggggcgtgccggtggactttgacccgggccacgtggtctatgtatgggtggacgccctgttcaactacaccaccgccctgggcttcctcaacgaccggtatgacgactatgagaagttctggcccgcggacgtccactttgtgggcaaggagatcgtccggttccactccatcatctggcccgccatgctgatgagcatggagatgcccctgcccaagaaggtgttcggccacggctggctgctgctggacggaggaaagatgtccaagtccaagggcaacgtggtagatccctatatcctggcggagaagttcggagtggatgccctgcgcttcttcctgatgcgcaccttccccttcggctctgacggcaacttctccaacgagctgctgatccagaccatcaacacggacctggccaacgacctgggcaatctcctctcacgcaccgtgtccatggtgggcaagtatttcggcggcaccctgcctgaggagcaggcggcggacgaggagaaggatggggagctggtggagctgatctcctccctgcgcaccaggtatgaagagcagatggagcactacgccttccagaacgccctggcggagatcttcaaggtgatcggccgggccaacaagtatatcgacgagaacaccccctggaccctggccaaggacatggaggccaacggcgcccggctggcccgggtgatgtacaacctgctggaggtgctgcgggtctccgctatcctgctcaccccctttatcccccagtctgctgccgaggtgctccggcagatcggtgcctgcgagacctgctctacctgggagagcgccgccggctatggggccctttctcacactgtcactgtctcccggggcgagaacctgttcccccgcatcgatgcagaaaaggccctgtccgagctggaggaggctgcggcggcggccaagaaggcagctctgcccgatttggaggtggagcctcagctcacagagaaggtggactttgacaccttttgcaagagcgatttccgggccgttaaagtcaaggcctgcgaaacagtgaagaagtccaacaagctgctgcgcttcaccctggacgacggcaccggcaccgaccggcagatcctctccggcatcgcgatgtggtacaagcccgaggaactggtgggcaagaccctggtcgccatcgtcaacctgcccccccggaagatgatgggactggagtccaacggtatgctgatctccgccgtccacaccgagaagggcgaggagcagctcaacctgctgatgatcgacgacaagatccccgctggggccaagatgtgctgaacgggactgtgggacagatcgaaaaagatctgcgtcattttaatggggcgggccgttggcccgccccatttttgtgctatactgaaagcagacgccggggggagaaactggctccggccccgcctccgggtaccggaacgggaaagcatctttgagaaaggaaggatggacatgtaccgatatgaatatgtgacctatcgcaccgggggcggcttctggatggataacagcgcctgtgagcaccgggagatcatagacgagtacgcggccaagggttggcgttacgtgggatatctgcccaccatgttttccggggagggcggcactaaggaagtggacctgatctttgaacgggaggagccctgagccatgtggtccaactgtttgttcgtggccctggggggcggcctgggcgccgtggggaggtatctgctcagcctgattgccgccccatggtcctttccggtgatgaccctgctcaccaattttctgggggcggtggtcatcggcgccgtggcccaggcggcgggacagctgcccatgtccaaaagtgcagttctgtttttgaagaccggactttgcggtggttttaccaccttttccactttttcactggagacggtggagctgctggagcaggggagatgggccgccgggggcgggtacatcctggccagcgtgggtctgtgcctggcgggggtgctgctggggggggccctggtgtggaagatcctttgaggatggagacccgcatctgagggcggcgcctctatccaaatgagggctgccgcggggagaaaatcgtgcggacggggttgacagagaaaggatcttctgctatattagttaagcaaatttatataaattcgcttaatgaaatgaggggaacggatggacctgcgggatagtctgaaccggtattactacgatgtaacggtcagtgatctgaggcagatcagccgcaccggcggcggagagctgtcttataatagcatcatgtatctggatgtgatctcctaccagcgggcccagggggagtgtacggtgagcaccctggccaatacccttcacatcacaaagtcagcggtgaccatcaaggtcaacgagctggagcggctggggatggtgaccaagacccgcagcgagaccgaccggagggtgatccagttggacgtatctccgcagatgacacagtcgctccgagcctatgagggcccgtttgagcgggcgatccgactggtggaaaggagcttcacaccggaacagatcgcggtgttctgttccattttgaatacgtttacttcggaatatataaaggatttttaaaatgacacagcatgaaaaattatttgagagccttccgcccacccggctgtttttccggtgcgccttgcccagcatgataagcatggcgatgctctccctgtacacagtggcggacggcatctttgtggggcgctatgtgggccccaacgctctggcggcggtcaatctggtgatgccgctgatcatgatgagtttcgcactggtggacctggtggcggtggggtcctccgttcagatctctatccgccttggggaaaaaaatgagagggcggccaaccggatcttcagcttctgcaccgggctgatcgtggcgctgtcctgcgtcatcgggctaggcggctttttcctggccgggccgatggtgtccctgatgggggcggaggcggaggtcaccgccatgggggcggagtatatgcaggtatatgccgtattcgcgccagtcattatggtattctttgcagtggacaactatctgcgcatctgcggccgggtgcggtacagcatgatactcaatgtggttacagcactgttgaacatcgtgctggattttctatttttggtagttttccgctggggggtggccgcggcagcggcggcctcctgtctgagcattgccctgggtacagtgctgggcttcctgccctttgtgatgggccgtctccctctgcgttttgttcgggggaccatctctgcccgtcagctggggaatattttggccaatggcagctcggagttcttttccagtattgcgggatctgtgatgatggtcattctcaacagcgtactgctgaggctgtccgggtctatggcggtggcggctttctctatcgtgatgtatgtggacagcatcgtgggctctctgctgtttggtatggcagattccattcagcccgccatcagctacaactacggcgcccggcgccgggacaggatgctggccctggaaaagagggtgcttttgacaggcgcggcggtgtcgctggcggctttgctgtggatgcagctggggggacagtatgtcatccctctctttatccagggggatgaccccgccctgctggagatgagcttgcgggccatgaggctgttctccctgtcttatctgctgggctgggcagggacctgtctgagctccttcttcaccgcattgaaccggccgggacgctccctgatcctggccttcagcaagacgctggtctttccgctggcctgtctggcggtgctgccagccgcgctggggctggacggcgtgtggctgacggcgccggcggccggagtgctgaccgccgctctggcagtctggtttttgatcgcagtgctgcggcaggagagagcccaggaccggcaggagggggagggtacaccccaggcgtgagacccggtcccaacatcagaaaaaacaggtcctgcgctcagaggagcgcaggacctgctttaatgaatcacggcggttcacgcctcctgggccatgacggccagggcctcatccacggcggagaggaggtactggatgtcctcctctgtgtgggcgggggagaagcagaggcggctgttgtgcaggatgccgcggtccttcagcagggccataaagcggctgtgcttggggaagctggcgttggccagggcgtcccggtggttgatgatcttctccttcttggtgaacacaggaaagagcgcccccggcatcccctggacgatcatgtccacgccgtgctttctggccagagcctccatgccatccttggccatctgggtgtaccggcggatcaggcggaacgcctctccgtcgttggcctccagctgccggatagtctccagcacagccgcggcggccaggggatggccattgtaggtgcccacggccaggacgcggttgtcctcgatgacctgcatgacctcccgccggccggcgaaggcggccacagggaagccgccgccgatggccttggcaaaggtgcacaggtcgggggtgacgccgaagtactcctgggcgcctcccagcgccaggcggaagccggtgagggtctcgtcaaagaccatcagcacgccataccgggtacacagctcccgcagtccctccagaaagccgggctcaggcatgcagccggtcatattcagggtcacgggctccatgatgacgcaggcgatctgatccccctgctgctggaacagggcggccagcccctccagatcgttgtattctgccaggaggcagtcatccagggcgtggggggcgcggccctcggtgtagcacatggcggagtagaagtcgtccgggtccacgccgtcccgggcctgaagatcgccgcggtcggtgcggccgcccagaacgaagtccatgcccccgttgtactgccccttgaactttacatacagggggcgtcctgtataagcccgggccacccggatggcgttgaagactgcgtccacgccggagacggcgaagcggaccagctcggcgcaggggaccacctgctggatcttttccgcggcttcgatggccgccagacagtcccggttcgtgtaggcctggtccagctgctccctgagggcccggcgcagcccctcgttgctgtggcccagaatagcgggcccggcggagagggagaagtcgtagtacacattgccgtcatagtcggtcatgcggcagccctcggcgcttttgacatagaccggagcgacgcctttggccttcttgaaattggacaggacaccgccggccaggcagcggctggcgcgctggaacagagcttcattttccgtatggacagtcatgtgagtggcctccttctggatcgttgtgctctgagtataacagatgtatacatcttggtcaatagaaaaagtctaaattaaaaaagaaaattaaaagatgcatacaataagagatcccccggcagtgtcgggggatctccagatcaatattgaatgtggttctccagcagctctgtcagccgcgccagatcccggcggcggatgcagtccaggatggccaggtgctccgtaaggctctcctccacccgggagagcaggcggaccgacaggtactgataccggcgcagcacggcccgcaggtcgttggtggccttctgggcatagcggttgccgctcttttgcaggatctggtcgtggagggcccagtccgcgtcggcaaactcctccacgcggacagtctccccctgttccagccgtacctggagggagcggaagcgggcctccagggcgtccagctcctctgaggagaaagcgccaatggcggtccgggcggccagcacctccagggcctggcgcaccgcgtaggcatcctcgatgtccttctgggtggcagatttgacgaaggtgcccacgccgtcccggatctccaccaggtcgtcccgcatcagcatcttcagggcctcccggatgggggtgcggctcatgttcagcttctgggccagggccacctcgctgagcatggcgccgggggggagctgattgtccaggatacggcgcttcagggtgtcataggcgaactctgcgcggctggtctttttctctttgacgggcaaagggccacctccttcaagacggaatgactgattataacacggaaggggagagggaacaagagggggattcatagggagaggggggcgggctctcccatccgggccaccacctgggccagctccgggatgctggggatgccgccggggtgctgagtggagaggctggcggcggtgacggcaaagcgggcgatctcctccaggccgccccggtccagctcctccggggggacgcggaagtccagcaggcggtggagggcgctcccgccgaagatgtcgcccgcgccggtggtatccacaggggagacctggggggcggtcagggcacagctccccctccggttctggaggtagcagccccggggacccagggtgaccatggccagggagacgccgcactcctccagcaggcggcgggccccctcctggggggagcagccccagagaaagtccacctcctcgtcgctgagcttgaccacatccgcctggcacaggctccacaggatctgggcccgggcctccgcgggggagggccagagggggagacgcaggttgggatcaaaggtgacggtccggcccagctcccgggcgtaggccaccgcggtccgggtggcggatcgggcgggctcgtcggtgaggctgagggagccgaagtggaagagacagcagcgctggatgagggagcggtccacctcctcccaccggagctgggtgtccgcccccggcttgcgtgcaaagctgaaggagcggtcccccgcggcatccagggtgacaaaggccagagtggtgaaggcggaggaggtgaggcggatgccccgggtctggactccagcccggcgcagggactccagaaggaggtggccgaaggcatcctctcccaccttgcccagaaaggcggtgcgccggccatatctgctcagggcggccagaagattgcccggcgcgcccccgggattggccttgagcgtgggacagcccgccccatcggtggacacgggggtaaaatcaatgagcagctcgcccagggccacaacgtcatagacagcttcctcacacataaaaacacctccacagcggccgtggggcccacggccgggatcatatttccattatatccgagagtaagaagaaaatccagaaaaagcgggggcgcgcacgatgcgcccctcaaaaatgcccatgggtcctgtggaggcgggacagaaatgggcatagtcccgcttgatttccataatttgtattgaaacgtctcacaaaaagctctttccctccggttttgagcgggtccggatctgccgggcccagtcaggacaggagggattttttatggcaagaggacagactcagtattatggactgaatcaatgggaggctgcggaccaggtgctccggacggagtttaacgcggataatcaaaagatcgacggggcgctgaaagccatgcgggatctgatcgtcagccccagcgttctcaatgcggtactggataagctgcgcagtgatatcaacgccctgtctgcccgggtggataagctggaggggaagtgagagaatcccccggagcaaatgctccgggggatataaggatttagctgagatatgagctaaaattaaacatccagctcaacagtcacattaccggtgggattgctgatggtcccggtccagacagcggcctggccctcgacggtgatccaatacacagtcatgctaggggtgacagctccggccacaggattctcacaagcggcgtcggaatagatggtgccaaactggttctggaggaccttcagttcagcttcagtgctgatggtggtgctgtcggtcttctgatccacgccgttcaccttcgtgaactcgccagtggcgccggtcaccttcacctgggcgttggtcgcaccgataaaatcagtggtcagctcaacagtgatagaaccgtctctctcaatggtggtctcgccgctggtcttgatcatatgacgaccgctccaccactcgctggtctcatcataagtcacagtgtacacgtcaggatcagtatccacgtcgatcaccacgttctccagaccggcgggaatggtgacggtccagttcttggtgtcaatcttggcggtaacattacaatcaacggaagtgatggtgtagccctccttgggggtcagtgtcaccacaacctcctcatcggtcttagcgctgtccttgtcgccagtagcattaccattcacagtgatggtgcggccgttggcggtggccttcgcgttgagcgtcaagggggcgttaatagtgtactcgccgctcgggtccgcagcaaaggagtagccgggcttggcggtggcggccacggtgatcttggtgccggcaacgatctccacaggcccggtgtagggctcgccgtcgatggtcacgtcggcgttctcaacatcgacagtcacggtgtaagagatgatggggtccaccacgggcttatagatgatatataccagctcggcgtactcctcgtccttctccaccacggtgacgtaggtcagatagtcgatgccgtcctgctcctcgggctcatcctcaaggatcatgtcgctgatgccgccctcagagacggagtacttccagccgcccgtataagcggcataggaaccagcagccttaaactcagcgggcttcttgggctccatctccacgtagacgaagacggtcccctcatcgccgctgtcggtgtcgaacttgacttccttggactgggtggtggtcagccagaaggcgtcatcgccggtggcgttgaccacgttgtcctccagcgcgacctcccggtactcggtgatgtactgctcatcggtggtcttcacagccttgtacagggtgccctcttccagcgcgttcagatcctggtcgatgaacacggactgcttctggccgtccacataggcgttgaagtactcccagtagtagtcgccgtcgtacttcagggactcgcgcttggtgctggtcaggtagaagtaggtgctgtcctcgtcatagatctcgccatccaggatgaagacgatctcagccacgcggccgtccatgacataagccagctgggccttctccacgttgggcacctcgtcatagccgatgtaggccacgttgttcatggtgtccacgaagatggtctgcttgtcaacgatgaactcgttgtcgccctgggagacataggccttgccgttcttgatctcggcatcgggatcagcaacaaaggcgtcatccaccttggcgggcaggtacttgtcgttgacctccttcagggagtagacattgctgctctcgctgacggtgtaggcccagacgcgctcgtcgatattggtggcgttcttgataacgtgctcggaggcgtccttgtcccaagcaatatcaacactgtctccatcggtattcttgaaggtgtccttcagctccaccttggggctggtgccgtcggccaggtcaacacgggcgacccagtcgcgcagctcctcgtcggagtcctgaacgtacaggtacttggtctcggactcgccggccagcttgaagcccagaacgtaaccgttgggatccaggtacaggtcgtagtcctcacccagctcggggtgctcatcggtgttgctgtccagatcgtagacgatgtggtttgcaccggagtaggggtacttggtgccgtcgtccagcttcagataggtgtcgtcgtcggtgcggtcgttctccacgcggctgacctcaccggtcgcgacctcgggagtgatgacctcggcaatgtagaagtcgtcgtcctcgttctggtcgatggtgaagacgatgtagtcgtcctcctcatagccctcgacatagaagtcgcggtcgtccagtttggcgtcgtcctggctcagattggacagggccttgacgttgatgtactcgccgtcgtcgtcggtcttcaccttggagacctggcccatgtagtagttgatggcgaccacagtgacggtggcgtcagcgtcgtccacatagatctcggtgacggtgcccttgccggtgtactgatagtcagcatcttcgccccgctcaggaacgtcgttgcccacgctgttgtcatagacggtgtcagcgacatcggtgccctcgtcatagaccttctcgccgttgacatagacggtccagtcataatcggtctcgtcgcagacggacttgcccagatccttgtacacatcgtcctcatcggtgccggtggtataggtgtaggtgggggtgttgggaacggtgatgatctcgtccttgtccagcatgcggaccatggaggcgatcaggccgccgtcctcggtcagagtatcggtcttgctggtgtcgccggcatcggtcttgacattgtaagagccggtgccccaggtggtggcgggacggccatagatggtctcggtgtcggtcttatagaccaggtcgaagttcttgtagcccagggtctgcaggtagttgaactccagggagtagatgatgccctggttctcgttgtagtacacacccagcagctcgttgtactgaacaggcacggccttggtcagggcgttgaacaccagctcagccacgttgtcgcgggtcagcccggcgttggcggtgagcttcaggtcgccatacaggcccagagcggtgcccttggcggtggcggccagcatccagtcattgccgaagtcagcggcgctctggaagtagcccagggcgcggcacagcatcagaacggcctgcgcggtggtcacggtggcgttggggtcgaacttgccgtcgcccacgccggccacgatgcccaggctggagcacaggttcacatagccctgcgcccaggcggggacgtcggtgaacacgctggtctccgcgaactggttgacgttcacaccggcgccatacagcatggtgcagatgatgaccgccatctcggcgcgggtgactacgttctcggggccgaaggacccgtcctcgtagccttcgaacatgccgatggcagaggtgaccgccacggcatcctgattgacgatctcggccttgtcggtgaaatcgtcgatacccttagcgctggaacccacgaccatcatgcccaggagcataacggaagccagagccaggctgagagcacgcttcaggtttctcattggatattcctcctttttatattgacaaaagtcgctgttttctgacaaaccgggccttttccagaacatttcagcccactatgcctgtacaacacttctgacacaggaggaattggttataaaaagggggagatcaagggaaaaatccccgagattacgcctaaaaagtttccctggtagacatttggtagacacatgaaaacagaaggggcagcaaggccctgaaactccaggccaccgccgcccttttttggtagacttttggtagacgaaaattcaaatcgcatagcacatagggagttccgcaggtcggagcatctcctgcgcttgagggacaagaagagaagcggagtaggaaccttgtaaaagtaacggaaattttgtgaaaaacttagcggcggacaggcgaatagaggaaatttcagagaaatgggaagaagggccttgaaaagtgggcgggagtgtgttaaggattatatagtagagatagagtgtgaccagagaaggtctgaagctttcgggatagatggaaaggaatggcggatcgacccatgagaagacagagcaagggctatgaaatcgatatgtgcaacgggacgcttgccaacaagatcctgctgtttgcgctgccgctgatggcctccagcctgctgcagctcctgttcaatgcggcggatgtggtggtggtaggccagttctgcggaaaggcgtccctggctgctgtgggctccaacaccgcactgatcaatctgctggtcaacctgtttgtaggtctgtcggtgggtgccaatgtggtggtcgcccaggacctgggcgccggacggaaggccgaggccaaccgcgctgtgcacacctccatcctgctggctatgatcagcggcgtggtcttgatgatcttcggcgtcattatggcccgccaaatgctggagtggatgtcctccccggaaaatgtgatcgggctggcctcggtgtatctgaggatttacttcatcggcatgccggccaccatggtgtacaacttcggcagcgccatcctgcgcgccaagggagacacccagcgcccgctctatttcctgctggctgcaggtgtgctcaatgtggtgctgaacctgttctttgtcatcgtttgcaggttggatgtggcaggtgtcgccatggccaccagcatttcccagtatgtctctgcctggctgatcctgcgctgcctgatgcgggagcacggggcgctgcacctgaaccttcaccggatgcacttgaacaagcgggtcatcggtcggatctttcaggtgggcctgcccgccggcttccagggcgtcatcttctccctgtccaatgtggtgatccagtcctccatcaactccttcggcgacacggtaatggcggggtccgccgcagcccagaatatcgagggcttcgtttacgcggccatgaacgctttctatcagagcgccctgaccttcagcgggcagaactatggtgccggcaaatgcgaccgcgtggacaaggtggccctctactgccagggctttgtgattctgaccggcctgatcctgggtaacctggcctttttcttcggctctcagctccttggcatctacgcacctggggagccggacgtgatccagcaggggctggtgcggatgtcctatatcggccggctgtacgccatctgtggtattatggataccatggtgggcatcctaagagggatcggctattctatcgtgcccatggtggtctccctgctgggctcctgtgtgctgcgcctgctgtgggtctggttcgtgttccccctggacccggttccagggaacctgtatatctcttatcccatcacctgggcaatcacaggagcggtccacatcatcatgttcctggcgattcggaaaaaggcgtacgccaaggtacaggggagcggtccctcctatctgtctgtggatggacaccatccggaagcgacggagcagtgaaaagaaaaagcggctggggtctctgcgcggagatctcagccgcttctgcctgtttaaaaagaaaaaatcgaccaacagaaaacttttctggcgtcatgaccgtctgaactaggtagaagggccccttctctctgcatggccccgtggcgcggggattgtaacaaaattgttgcttgcatccggcagtgaaacccggtattctgttgcaggaggagggggaggctatggactatgacagactgctcaatctgaccacggatctgggataccagctgatggccagcggggcggagatctaccgggtggaggaatccatgcatcgggtgctgaatgcctatggcctggagcggccggaggtgtttgccatcccgaactgcatcatcgtcagcgtgactacgccccaggggcatcctatcacccggatgcggcgcatcccgggccatgggacagacattgagctgctggagcggtgcaatgacctgtgccggcatctatgcagccaggtcccaccactggaggatgcccagagcttggtctccgccctggagagagggtatccccgctactcgtcccatcaggtactgatggggtatggtttggcccccgcttttttcacccttctattcggaggtcatttcctggacggcctgtgtgctttcgtgtgcggcttggcggtagggatctgccttttatatggggggcggttcattgggagcaacagcttcttccgcaccgtagtatgcagcacagtgggctcgctgctctccctgctgctggtgcgcctgggcttcggatacgacgtggatactgtgactatcggtgtgctgatggtgctggtgcccggcgtggcgctgaccaacgccatgcgggagatcatggccggggacatcatctcgggcctgagccggacagcggacgccatcctggtggcttcggccattgccctgggcacggtggtggggctggccatcggccagatgctttaggaccgttggaggtggatcgggatggagcgaatttttctggactatgtcttgccctgcctctgggcctttctggcctgcgtaggctttacactggtcttcaacatccacggcgtaggaaagctgatctgcggcttcgggggaggactgggctggctggtgtatctgctggcgggcagcagcatcgtggccgcgttcctggctgcggtggccataggcgtcttttcggagatcatggcccggctgcgccgctgcccggtgaccggctatctgctggtagcacttctccccctggttccggggggaggtatctattacgccatgagctactgcgtggcgggagatacagaccggttcctggctgagttgctgcacacctttgggatggcggcggccctggcggtgggagccatgctggcctcgtctgtatttcggacggtgtttcctcggctgtaccaccggccggccgggtcctgagacggggcaaagagagagaatcatgcgactggaatttttggaggtaatctgatgaagcgttttccttcctttctctgtttcctgatggcagcggctatctcggccagcctgaccgggtgcggcggcagccccggcgcaggcagctccgcccagggacagtcggctgacccgcctgcccagagtgctcagccggaggccggtaccccggcggctgacccctccggggcgccggatcataatgtgcctggagagggccctgccggagctgtgccggagggagagccctccaccctgtccggcggatcagaacaggggcggaacgtcccaaacagcccggaggacaagcctgcccatgtgggagagagcggagagagcagctacgacttctcccagcccgcgccggagagtccggcagtggacaacacctactttgaggacgccgcttttgtgggggactcccgcacggacggcttcctgctttacagtgggatcgggactgggaccaacctgacctccaatggcctgtccatcttcaagctggcggagaaaaaggtgatcacgattgatgggaccgcctatacgctgctggaggccctggagctgggcgaatatggaaaggtgtacctgtccctgggcgtcaatgagctgggctactacaacgacgaaggcttttaccaggcatactgtgacgccatcgatgctatccgggcttgccagcccgacgcggtcatctacatccagggcctgatccctctgaacgagtcggtggtggcggcatctggcggccccagctatctgaccaacgagcacctccgggtgtacaacggcctgatgcagaaagcggcagaggaaaagcaggtggtgtttctggacctgtattccgaatttgccaatgagaacggggaactgcccgaggaggccagcaaggacggggtgcatctgaagagcgactactgcaagcagtggctggagtatctgaaagtccatactgtggacttcgaaacactttatccggagggaactgagacatgagacgatttgctgggatagcggcggtactgtttctgcttttgctgccgctggccgcctgcggcggcgcggaggagaaggctgggtttgacccggagatcaccctccaggcgctggcggacgctggagccttctctgaggaactggaggagctggacggcgacactgcctttaccctctacggcttgggaaactccgggctggagcgggaggatctgaccgccgccaaggtactgcgctcagcgggcgccacctgtgaggagggggctgtcctggtcttcaccagcggggaccaagcgcagacagccgtccaggtgctgggagactatgtgcagaagcagatagactccaaccgggactaccgtcctcaggagctgcccaagctggagagcgccgtcatccagcagcgggagaacactgtgctgctgctggtggccggcgacctggaggcggctcagggcgtgctggagcagtaaagggagatagactggggggcgggccgcagtgcggcccgccccttttatgcctgactgcctggaagaaaacggagcaccaaaacttacagcttgcctttgcactgcataaaagttacaatttggttacaaaatagagcaaaggagcacgagagcatgagacgactgtttttccgatgggccgcggccgccctgctggcgggcgctctgatgataccggccgccgaagccgcccaactccagatcgatgacaggatagtggagccctccgccgcatggacggaggaggggacgccctatgtgacgctggccgccctgtgccaggcggcggacggatacacgctgagctggaatgggacagtggcggcgctgacagcggaggacctggaactgacggccacccccggcgccctctatgtggaggtcaacggcagagccctgtatgtggagcacggggtacaggtccgggatgggaggatcgccctgcccctggaggtgctggcagaggccgccggtctccagctgacctgggacgaggtggagggagccgcctggctgtccactgaccaggcccagcccgcctctgccagctacccggcggaggacctgtactggctgtccaggatcatctcggcagagagccggggggaacccctgctgggccagatcgcggtgggcaacgtgatcctgaaccgggtggagagcagccagtaccccgacactgtggagggggtggtctttgacacaaagtacggtgtccagttccagccggtgtccaacgggaccatctatgacgccccggcctcctccagcctggtggcggcgaagctttgcctggaggggaccgacgtggtgggcgagagcttgtattttttctcccctgccctgtcggcaggcagatggatcgtgagcaacgccacctattataccaccatcggtggacaccagttttatgtctgaaaaactgaggcgcggagcagatgctccgcgcctcagtttactcttcttccagatatccccttcggcctccggcggggacacacaggggaaaacaggacggaaagggcccaaccgccgggttgaccggctcagacctccataataacaggcaggatcatgggggagcgcttggtcttcttatagaggtagttggacaggtcccccttgaccgcacccttgatggcggaccagtcggtggaatagcgggcgtccacgctgttgatggcctccagggccacctggcgcagctcctccatcagcccctcggactccttcacatagacgaagcctcgggtgatcaggtcggggccggagaccaggctgccgtcctccccagacatggacatgaccaccacgatcatgccgtcctgggccagatggcggcggtcccgcagcactacgctgcccacgtcgcccactcccaagccgtccacaaagacctggcccgcagtgacagtgcccgccagacgggcgctgttctgggtcagttccatgacccggccgatgtcgctgatgaggatatgattggagtccatccccatctcccgggccagctttgcgtgggtctggagcatgcgctgctctccgtggaccgggatgaagaacttgggcttgaccagggcgtggatgatcttcaactcctcctggcaggcgtggcccgacacgtggagggccagctcccgctcgttgagcacctccgcccccttgcggtagagctcgttgatgacgttgccaatagagtgctcgttgcccgggatggcggaggcagagatgatgatccgatccccggggaggatatccacctgccggtgggtggagaaggccatgcgggacagggcggacatggtctccccttgactgccggtggtgatgatgcacaccctgttcttgggcagggacttaatctggttcaggtccatcagcactccatctgggatgttcatatagcccagctcggtggacaccttcatggcgttctccatgctgcggccagtgaccgctacccggcggccatagcgggcggccacatcgatgatctgctggagccggtccacattgcttgcgaaggtagtgacgatgatgcgctcctcacagcccttgaaaagtgcgtcaaaggaattgcccacgctgcgctcactgcgggtatagccgggacgctccacgttggtggagtcggccagcagggccagcaccccctcgttgcccagctggcccagccgggccaggtcgatcatgccgccctggatgggggtggcgtcaatcttgaagtcaccggtgtggacgcaggttcccaccgggcacttgatggcaaaggccaccgcgtcggcgatggagtggttcacatggatgaattccacggtgaatttgccggccttgatcacgtcgcccgcctcgcaggtgatgatcttggtcttgtccagcagccggtgctcctccagcttcaggcggatcaggccggcgctcatccgggtggcatagatgggggcgttcagggagcggaggacatagggcagcgcgccgatatggtcctcgtgtccgtgggtgatgaaaatcccccggaccttgttctggtttttgatcaggtagctgacgtcggggatgaccacgtcgatgccgtacatgtcgtcatcggggaaacccatgccgcagtctaccaccacgatgtcaccgccgtattcatagacggtgaggtttttgccgatctcgttgagaccgccgagagaaatgatcttcagtttttcagccatacgatactccttgtttttgatttgtcaagttctggtctatgtacggctgggcgcaaaacaaccgggcgaaggacgcccctgctttccggccctgcctcgccgggaaacggggtgtctcttcgcctgatggagcgggggccaggggccgcgccgctcccgggaggcccgccggggcatccggcggctgcgctctcgtccgtactgtgtgtccccatggacgggtgaccgcctgcgtgcgggccctgcatgggttatatttaggcgcggggagggggcgcctgccaccctgacgcgcataaatccaaaaataagcaaaatacagtataacacatggggctggaaaagtacagcctaaattttccgccctttttcctgacaggcaggtcctcggcttacagccgctccccggccgggctctccctctgctccggcggagggagctgccgggacagctcccggtccagctgggcggcccggcccgcgtagaagtcgcacagctcagcggctacctccaggtcgggactctccgccaggatacgcagggcgggccggcgggacagggggaccagatagacccacccgttccccgtgtggatgcggaccccctcgccgcctgcagcggccttcccctccgccagggtctgcatcagcaggccccggttcccgtggaggggaacctcccgcttccaggaggagaagcggggtgtcttgctcatcaaggcctccagcttctcaccggaggagcccatcctggaacagatgcgggcagcagcaaaggcggcgtcccgcagccagggcagggcggcatacagggacagggcctgctcaccgtcccggcccagccgcagagcggtgccgtggaatcctgcggccaccaggtccaccgcggcgctggccccatcgggcaccgctacccgccccccgccgtcctccatctcgatcaggcagaccagggtgagcagctgccctgggtccagaagagtgccagactcgtcctgagcggagaggtagagcccgccgtggagcccagagaaggcgggcacccctttccgccagcggtccaataccgtgcagcccaggctggaaagggcctgccggatggcccggtcagcgggagcggatccggggacggccacggtgatggagcgcatggggaaacggtggagacggctgcgcctggccgcgtcggcggcgtagtcatcacagcccgcatggacccggaccacctcgccaatctgaccggcggggacccggggggcgtccccctgggctacggcgtgttccagcttccgctccctggcccggcccagaggcaggccgctgcggccgaagagatggagatagatgcggtccccctcctgctccaaaaagagagagacagggatctgatggtgctccgccagccaggcggcctgggcggcgcactccaggtcatgggccagaggggtcccgccggccgcggcgatgccgctggcggccgcctgggccagcatgcgggcaccgttcccgccccagtagccaaggcccaccttgccctcgcaccccagcacgccgccgatggtcatcagggcctccgggcccagatcttctcccagtacgccccggatcaccccgccgtccccgaacagaagaggctcccggcggccggaggaagtgatggagcgggacagccgcgtcccagcaggggcaacccgggctggccagaggcgcaccccctccagcagtacggccttctcctccgccaaggccctctctccaaggacggtcccctcgttgaggacggcctccggccgggcggcggcccccttgcagaggatggctccgtagagggtggtccgctcctccgcccgggcgccggggaggagcaccgaccgctggaccaggctgcggcgtcccacccagctgttctgctccagcacggtatgggggccgatcagggcgcccggctccaccgccgcccccgggcccagccagcagggcgggatcacggtgacaccctctgggatgggctgggcgctccagacgccgggggactgctgaggcaggcccatatccagcttcaccttcccagagagggcgtccgccgcacagtccagataggccccgcagtcccccatgtcgcaccagtagccgccgccggggacgccgtacaggccgccgccggactccagcagggctgggaacacatcctttccaaaatcccagggcctgtccggagggatctgctccagcacctggggggagagcagatagatgccggtgttgaccagatcggtcaccacctgcccccaggagggcttctccacaaagcggaccacccgctgctcctcgtcggtgaggaccagcccgtactccaggggcgcgggatgacggaagaggaccagggtggcctgggcccgcttggcctgatggaactccatggcggcagtgagatccaggtcgcagacgctgtccccgctgatgaccaggaagtcctctccctccaggaagggggcgcaggcccgcacgctgccggcggtgcccagcggggcctcctcgatgaagtagtgcaggcggaccccccacttctgtccgtccccgaaataggactgcactgcctccggcatgtagcacagggtgacggcgatctcgtcgatcccgtggcgcttgagtaggccgatgatgtgttccatcaccggccggcccagcagagggaccatgggcttcggcatgcccagggacagggggcgcaggcgggtcccctctccgcccgccataatgacagctttcacgatgtgtttccacccttccggccgggctccgccggggcggagcgggaacggccctgtatttgtagcatctcctagtatgaccagccgccggggaaataaaccggttccggagcggttttgacttgtgccctgggagggaatatgttatacttagatatacataatttaacagcctgaggaaggacacagggaccatgcaggccgccctgcccggcgggggcaggggacgaggcggcccgcgcttccggaggatatcgtaatgaacatacagatttttggcaggtccaaatgctttgataccaaaaaggcggagcgctggttcaaggagcgccgggtgagatttcagtctgtggatgtggtgaagtacggcatgagccggggggagctgtccagcgtgaagaacgcggtggggctggaggccctggccgaccccaagcacccagactatcctcttttccagcatctggcctatgaccaggacaagctggaccggctgtgggaggaccagaccatgctgcgcacccccatcgtgcgaaacggcaggcaggccacggtgggctactgtcccgaggtgtgggccgcctgggagtgaatagtccgttatatgggacacaggttccggtatgctgagtgcattaccggaatgaggaggatgacccatggcgaagagtcccaatcaaaagctgaaactgctgtatctgtatcagatcctgctccagcgcaccgacgaggagcaccccatcaccgtcccccagctgatcggggaactggacctgcggggcatccgggcggagcggaagagcgtctacgacgatctggaggccctgcggctgttcggcctggacgtgcagagccggaagggccggtccccgggctggttcgtgggccggcgggagtttgagctgccggagctgaagctgctggtggacgtggtgcagtcctcccgcttcatcacccggaagaagagcgacgccctgatccgcaagctggaggggctggccagcagccaccaggcccgccagctccagcggcaggtgtacgtcagcggccgggtcaaggccatgaacgagagcatatattataatgtagacaagctccacacggccctctcggcccggaagagcatcaccttccgctactttgactacgacatgcaccggaacaaggtctttcggcgggaggggcggcgttacgccgtctctccctacggcctgatctggaacagcgagaattactatctggtggcttacgacatctccaaccaggagatgcgccactaccgggtggacaagatggcggagatcgtggtcaccggcctgccccgggagggggaggaccgctacccggattttgatgtggccgcctatggccagaagcacttcggcatgtacagcggggaggaggccagcgtcaccctgcgctgccgcagccacatggcgggggtggtgtgggaccggttcggccaggacgtgatcctggtgccggaggacgaggaccacttcaccgtcacgctgcctctggtgctcagcccgcagtttttcggctggctgttcgggctggaggacaatgtggaactgatcgcgccccaaaaagcggcggaggaataccgccggaagctgaaggccgtgctggagcagtacggctgaaccccgccggaggaggggcgggggacaacaagacacggaggaggtcgcccgatgaaacggatcttagtcgtagacggggatacgggtgtgcgcgcccggatcgcaaaacatgcccggatggagggctatgatgtgacagaggcgggggacggcgagaccgccctcagcctgtcccggcagcagaacgcatttgatctcatggtcctggcggtgaatctgccggggatggacggctttacggtgttgaaggcggtccgcaccttctccaccatcccggtgctgatcctgtccagcaaaaacacggcggaggaccgcatccatggcctggagctgggggcggacgactatatgaccaagcccttttcggcgcgggagctgctcctgcggatctcggccatcctgaagcggtgcagcaccctggcctcggaggaggcggaggtgctccgcagcggcgggctggtgctggacctgactgcccggcgggtggaggtggacggccgccagatcaacctgacgcccagggagttcgacctgctcaccgtgctgatgagccacccggacgtggccttctcccgcaagcgcctgctggacatcatctggggcggggagctctccactgacacccgcaccctggacacccatatccagcatatccgctgtgccatcgtcccgtacagcgaccggatcgtcaccctccgcggggtgggctatcggttcgagaaggaataaaaaagaggccggaccctcaaaaggtccggcctcttcctctcgtgatccatcaatacaccgtgccccgccccaaaagccttcccccctgtggggggaaggtgtggcggcgcgagccgcggcggatgagggggcctcctccccccgtaccagtcacagaacatgccagagacaggcgggggcaagccccgcccctgcgcagaggcccaaaatctcccgcaggcttccagccgccccaaaagccttccccccacaggggggaaggtgtggcggcgcgagccgtgacggatgagggggcctcctccccccgtaccagtcacagaacatgccagagacaggcgggggcaagccccgcccctgcgcagaggcccaagatctcccgcaggcttccagccgccccaaaagccttccccctgtgggggaaggtgtggcggcgcgagccgtggcggatgaggggtcctccttcccccgtcccagtcacagagcatgccagagacaggcgggggcaagccccgcccctgcgcagaggcccaagatctcccgcaggcttccagccgccccaaaagccttccccccacaggggggaaggtgtcgcggcgcgagccgctgacggatgagggggcctcctccccccgtaccagtcacagaacatgccagagacaggcgggggcaagccccgcccctgcgcagaggcccaagatctcccgcaggcttccagccgccccaaaagccttccccctgtgggggaaggtgtggcggcgcgagccgtggcggatgaggggtcctccttcccccgtcccagtcacagagcatgccagagacaggcgggggcaagccccgcccctgcgcagaggcccaagatctcccgcaggcttccagccgccccaaaagccttccccccacaggggggaaggtgtcgcggcgcgagccgcggcggatgaggggtcctccttcctccgtcccacccacaggatatgccagaggcgggcgcgcaaagcgcgcccctgcgaagagaccgaaaacgcccctgcccccagctccctcccccaagttgcacccccgcgtacaaccctgcgccgcctcatgataatatataaggaaggaccctctttttgggggcgccggccccccctcaaaggccctctgtaacaaagccgacgcaatgttaccgttttgttacatcttgctccggccgcttgacgatttcgagcttttgagatatcatacacacacaggcaaggggagttgtactttcctgattttggtaaaacccctaaaattcaagaaaatagctctcatttgccaaatataaaaggaggaatatccaatgagaaacctgaagcgcgctctcagcgttgctctggcttccgccatgctcctgggcatgatgatggtcggaaccagcgctaagggcatcgacgattttaccgataaggataagatcgtcaatcaggacgccgtggcggtcaccgccgagatcggcgtgttcgacggctacgagaacgggtcctttggtcccgagaacgtagtcacccgcgccgagatggcggtcatcatctgcaccatgctgtatggcgccggtgtgaacgtcaaccagttcgcggagaccagcgtgttcaccgacgtccccgactgggcggagggctatgtgaacctgtgcgccagcctgggcatcgtggccggtgtgggcgacggcaagttcgaccccagcgccaccgtgaccaccgcgcaggccgtgctgatgctgtgccgcactctgggctacttccagagcgccactgacttcggcaacgactggatgctggccgccaccgccaagggcactgagctgggcatgtacggcgatctgaagctgaccgccaatgccggcctgacccgcgacaacgtggccgagctggtgttcaacgccctgaccaaggctgtcaccgttgagtacaacgacaccttcaacatctacttcaacaccggcagcacctgggccaacggcgtgaagttcgactacaagcagaccctgggctacaagaacttcgacctggtgtacatgaatgacgaggatgacttcggccgtcccagcaccgtgtggggcaccggctccctggccaacgtgtctctggacgacgagggcaacatccccgacagctacaagggcatcgctgacgacgacatcatcatcagcatggccgacaccgctacccacacctacactgccaaggtctcttccaagaccctgtacaacgatgtgggccgcactgccgctcaggactatgactggaccgtttacaccaacggcgaggccaatgagtactccttcgacggcaacgacctgtatgacaaccgtaccagcactgactgcttcctgaaggaggccgctggcgagaacgtgaccggcaacggcgttctgactcaggtctatgttgactccaaggagaaggaagttaccgtctccgtcatcgacagctatgtggctgaggtctacaaggtcgatgagaaggacggcaccatcaccctgtccgacctggtggacggccccgccgacgccagcgacgacgagtttgctaccaccgcttttgcggaggacgacgtggtcgtctacacctacgccaacgacgagatccagtctgttgtcaaggctgagtccgtggaaggcactgtcaccaaggtgaaggacaaggacaacttctccctggacggcaccagctactcctactccaagaacatggatgccagcgacaagctggacaccgatgatgtggacgccgagaccgtggcctatctggacgcctatggctatgtgatccatctggacgctgacgccgtggctcaggattacgcctacgtggtgggcgttggctccgccaacgacaagtacggcgatgacgccgacttcggcgccaccctgctgctcaccgacgccaccaagctgaaggtggacctggattccgacagcacggacaagtatgatagcactcaggaggcccgtgaggctctggagggctacatcgtgtcctactccaaggacagcgacggcctgtacactctgaccaagaggagcgacaaccgcatcgacctgaaggataataccttcaacgccaccggtctggagatcaagtccggcacctccgccatgaagatctttgcgaccgacgactactatgccaacagcagcactatcttcctgctgtacgacggcgacgactacaccgtctacaccggcatcaagaatgtgcccgacgtgaagggtgacgcggacaccaacgccgttgtcttcgacaagggcggcgtggccaaggtggtctacatcgagaacgccaacgtggacggcgacgacgaggtcatcttcgtggtgggcgacaccggcgccaaggcccagaaggacaacgagaccaacaccaagtactatgagtaccaggccatggtcggcggcgagatcgtcaagctgaaggtccgcgacggcgacgcctatgacttcttcaagaccatcaagactgatgagatccaggtgctcagcggcctgacctacaacaaggacggctttgtcaccgactatgacaagaacttcaccgattggaccgtgaagaccggtatcggcaccgagggcgaggacgacgaggtcatcggcatcggcgatgccgccggcaagaactatgcgacctacgcctatgacgaggacgtggtggttgcccgcttcgacggcgacgacctgaccaagtccaccatcggccgcatcaaggacgacggcaacgacaaggtcacctatgtcctggacggcaaggtgctgatgggcgtgtgcattactgaggtcaagggcaccgatgcccccgttgcctacaccgtgaaggtggacaatgccaccaatgtggactacaccatcaccgatgagaacaacaacagcaagaccaatgagagcctggtcctgaccgagaagaacctggatgtcaccgtgaagatgactcccaagaccggctatcagtgggctgacaacaagggcactgagacccgcaccgtgactctgaccaaggtcaccgaggacaagacggttaccgctgatgcggttgaggccgttgccgccactcaggcgaccctgaccctgaatctggacggcgcctatctgaacatcaacaacaaggcctactggaatggcgacaccatctctgctgactttgacagtgttctgaccgccaccgtggtgcccaccagcgcctccactgaggagaacaaggtcatggcgaagcccactatcaccgggaccaagaacgacgtttctgtcgctggccagactctgaccattgttctgggtgagaatggtgaactgactgtggcttatgtctacgataagtatgatctgactggtactgactctgtcagcaattccacttataacgtggagaatgtgaacggtaagtatcaggccggcgctgacgtgacgctcaagctcacccagaagaccggggctgacctggctaccgacgctcaggtcactgtcaccatcaatgacggggccattaaggctaccgcccaggtgaccaaggctggtcagactgccgcctcggctcagtgggacggcccgaagacttacgcgagcgctcaggaactcgagaatgccattaatggcctgcccgagggccagaccatgtggaactctgcgaagaatacccaggtcaccagcggtctggtctggacttccgacagcgatgagttctatatccagacctccgcagaggttgttgaggctaagggtgagatcactgtgaccttcaccatgcccaacgcaaatactgaaattaccaagattgaagttcagtaagcgtcatctcacttaaacctgcggacccctgtgcataatgcgcaggggtccgcatgccttatcacccaatggcaaaataaaaatactccacgccctcagaattcatctgggtggaggggttgtcctttgaggtgtaccaggagacctgatttcccgaccaggtgacattgacatagaagtcgatgtgccccaggccgcctccctgggtgacgccccggaggaggagcaggccggagcggtcggcggaggagccggagcggcgcaccgccaaaagctggggcgggaaggaaaaggtgagggagacaggggactccgggccgctggtcccgtttccggtgtagctgccgaaggcggtgcggggcatggagccctccacggctgacaggcggcgctccacgccgctcaggccctcctgatccgccttgctgtccagccgcccctccagcgcctccaaggcggtctggtccgccttctgggccacaaggccggagagctgggagagggcggcggtctccgccttggactgtgccagcgcgtggagcgccccgtccaccgcggcgttgtccgcgttgaagtcggtccgctccactttgtccgaagcctcccactggctcaacccataatgttcagtgtgtctgcttgccatgatcgatccctctttctattaaaaatgatttcatagaagggggaaaccgggggctatgtgggacgttgaaatacaaataatgggatttcggggaaactgtgcccatttttatccccagacagcggcccgaggggatgagacgggagaaaacggatatcctaccatggggacctgctgtgatgtgcccgcctgcctgctgaggccgtccctgtatgggaccctctccgcacagcatattcttgcaggaacgtgtctgtaccatgttccaccgggacgccgcctcccgtgcgggggcggagggcgggcgcatcaccgcaggcctcttctgaatatcaaagggacacagagcacaaatagcccggacacggcggaggccgcgtccgggctatttgtatcgcgctgtttactccaggatggccccccggtcggcggaggaaaccattttggcgtaccgggccagatagccggtcttgatcttgggctcggggcagacccacttggcccgccgggcctccagctcctcgtcggacaccttcagggtgatggagtgggcggggatgtcgatggcgatgaggtcgccctcctccaccagaccgatggggccgccggaggccgcctcgggggacacatggccgatggaagccccccgggtggcgccggagaagcggccgtcggtgatgagggccacatccttatccaggcccatgcccgcgatggcggaggtggggttgagcatctcccgcatgccgggaccgcccttggggccctcgtagcggatgaccactacgtcgccggccacgatcctgccggcatagatggcctggatggcgtcctcctcgctgtcgaacacccgggcagggccctcgtggaccatcatctccggggccacggcggactgcttcaccacgcagccgtcgggggccaggttgcccttcagcacagcgatgccgccggtcttggaatagggagcctcgatggggcggatgatctccgggtcccggttgaccacgcccgccaggttctctgccaccgtcttgccggtgcaggtcatcaggccggtgtccagcaggcccgccttggacagctcggccatgacggcgtagacgccgccggcccgctccaggtcctccatataggtgttgcccgccggggccaggtggcacaggttgggggtcttctgagagatctcattggccatgtcgaaggagagctcgatgccgcactcatgggcgatggcaggcaggtggagcatggtgttggtggagcagcccagggccatgtcgatggtctcggcgttgtggaaggcggcctcggtcatgatgtcccggggacggatatcccgctccaccagctccatgatctgcatgccggcgtgcttggccagccgcaggcgggcggaccacacggcggggatggtgccgttgccccgcagccccatgccgatggcctcggtgaggcagttcatggagttggcggtgtacatgccggagcaggagccgcaggtggggcaggcgttgttttcatactcctccaggccggcctcgtccagcttgccggcgtagtaggagcccaccgcctcgaacatgtggctcaggcaggtgcggcggccgtcattcatagtgcccgccatcatggggccgccggagacgaagatggtggggatgttcacccgggcagccgccatgagcaggccgggcacgttcttgtcgcagttggggatcatcaccagaccgtcaaactggtgggccatagccatggcctcggtggagtcggcgatcaggtcccgagtgaccagggagtacttcatgcccacatgtcccatggcgatgccgtcgcacacggcgatggcgggaaactccaccggggtgcctccggcggcacggatgccggccttcaccgcctcggcgatcttatccaggttcatgtggccggggacgatctcgttgtaggaacagaccacgccgatgagaggccgctccagctcctccttggtatagcccagggcatagagcagggagcggttgggggcggcgggggccccctttttaatgacatcgctgcgcatgggaattgacctcctcacagatccagactcaagttgtctgatttctcttgcattgtctgactatatagtataagatagaggggaaaatgtcaagagggagctgcgcctccggcacagagaaaaggagaagagagaccatgtcgaagcggaatctgtcccagcagacggcggaacgcctgtataacagcatcgtggcggagggcacgctgcggcccggggacaagctccccaacgaggtggagctctcccagcagctgggggtgagccgcgccaccctgcgggaggccatccgagagctggccgcccgtggagtgctggaggtccggcgggggcgggggacctttgtgtcggaggaagtggcggacatcgaggacttcggcttctctgggctggagcggcttcagggccagctgcgggacctgtttgagctgcggtccatcttcgagccaaaggccgcccggctggcctgccagcgggccacggaggaggagctgcgggatatcctggagagaggggaggcggtggagcggtgcatccgggcaggacaggaccggacggaggcggaccgtgactttcatgccgccatcgtgcgggctgcccacaacgaattcatggtccggctgctgccggtgatccaccaggcagtggccgccgcagtggagagcggagagcacggcgagcagctggcagaggacaccctgcgggaccacgccctgctgctggaatttttggcaaagcgggacggagagggcgcagagcatgccatggccatccacatgtgccgcagcatggaggtgatggggctgggatgagacgggcagaacgccggcctccctgcctgcacaaatcttgaactgggacggaaaaggtaaagtcttgacgaaattggtgtaaaatgctatgctaaacctagaggtccacaggggaatggacattcccggcggaagatgctccgtgctgtggttccacgacaacttgaagaacaagggggatgctccctgatggaggatgacaggacttcgcaccggaccgggtcagcaagtcctgttatttttatgcctctcacgggcaggagggagcgcgggagatcgtatggaactgtcatttgcatcatttgtacagcaggtcttttccagcccggccatgctggtcacagtcctgctgacgctgggcgtcattttcgtcaacggatggacggatgcccccaacgccatcgccacctgcatcgccacccggtgcatcaacgtccgggcagccatcctgaccagcgcggtgttcaacttcctgggtgtgctcatcatgacccacatcaacagctcggtagcctccaccatcagcaatatggtggacttcggcggcaacacccatgaggccctgatcgccctgtgcgcggctctgttctccatcgtggtgtacagcgtgggggcggcccgcttcggcatccccaccagcgagagccacagcctgatcgcgggcctcacaggggcggctatcgccatccagaacggcattggcggcatcaacatgggcgagtgggtcaaggtgctctacggcctggtgctgagcctggcgctgggcttcctggccgggtggggcatctgccgcctggtcatcctggtgtgcgccgggatggaccgaaggaagaccaacggcttcttccagggggcacagatctttgctgccgccgccatgagcttcatgcacggggcccaggacgggcagaaattcatcggcgtgctctttctgggcatggccttctgcggtgggcaggagagcgtcaccgggatggtcatccccgcctggctgatgctgatgtgcagcaccgtgatgggcctgggcaccagtgtggggggcgaaaagatcatcaagtcggtgggaatggatatggtgcgcctggagaagtaccaggggttcgccgcagacctggcggcggcggcctgcctgctgctctccagcctgttcggtatcccagtgtccaccacccacaccaagaccagcgccatcatgggtgtgggggcggtgaagcggctctccgccatcaatttcggcgtggtgaaggacatgatgctcacctgggtgttcaccttcccgggatgcgggctcatcagctttgtcatggctaagatatttacggcgatcttctgatcgatcatggggaggaagagtgttatggcgaaaaagagtgattccttttatttcggcaacttctacgcttgtgcggactgcgcctatcaggcggcccacctgctggagcgggtcatgcgggatttcgatcccctgctgatccgggagaagctggacgacatgcacaaggtggagcacgccgctgacgagaaaaagcacgaggtgctggacgctctggtcaaggcgttcatcacccccatcgagcgggaggacatcatcctgctcagccagaacatcgatgaggtgacagacaagatcgaggatgtgatgctccggctctactacaacaacatccagagcatccggcccgactccctggagctggtctccatcgtggtgaagagctgcgacatggtcaagctcatgctgaaagagttcgcctccttccgccactccaagagcctgcgggaccacatcatcgccatcaacaccctggaggagcaggcggatcaggtctttgtgaccagcatgcgggagctgcacaccacctgcaccgacccggtggagatcatctgctggcgggaggtctatttctaccttgagaaatgcactgacgcctgtgagcatgtggcggacgtggtggagcagatcgtaatgaagaactcctgaccaaagacgcatatgttgcgctttcaggacccggccatccaggggagaccgggtctttttttgcacaggatgtaaaaagcatttgacatctccgcacatccatgttagaatcgagatgtcaaaagaatttgacattttgatttgacaaggaggcagcgtcatggaatccaacgggacttctatttttgtggtgatctttctggccgtgctgatcctctccgcagtgctgatcgtgtggatgttcgtctccctggtccggtcggagctggaggacgagcggcggcagatgatcgtgggcaaggccagcacctgggccttcatcgccgtggtgggcggcgacctgatcgaggtgatccggacggcggtacagcagcccagcggggagccggcctccccctttatccagctggtaacggcggcggtggtgtatgcggcctttttgggctggttcaagcacaagtacggaggctgagcatggagaacaagatccgggcgctgaggagcgagatgggcctctctcaggaagagctggcccgccggtgcggagtgtcccgccagaccatcaacgccattgaaaacaacaagtacgaccccaccctcaccctggccttccacctggccggggtgctggggaccacggtggacgagctgttcctggggccggaggaaaaatcctgctgaaattggcggggacccgtttacaaaatgggtccccgctgttaagcttgttttagaaaagactctctctggaacagatgggaggcgcgggaaatgaagcacggaacgatgagcctgcgggaccgggcggcggcttgggcctttgccctgttctcggcggcggccctgctggcggtggccgcccaggttttcctgggggcccggccgctgcaggggatgctgccccctctggaccaggtcacggagttctatgtatccccctcccacaaggatatggtcaggttcacagtggaggagaacggcctggtccaggccctgggggagctgcgggtggcctggcgggggccctatcaggccatccgctatgagcgggggcagcatacctatcatatcgatctgttccgcacctacgagcccttgggggatgtggtcctgtatgagaacggttttctctgcttcgaggggagcctcttccgggtggaggagggagcggcctgccagcggtgtctggagctgtgccgggaggccctgccctgaacgggcgggccagtacacactggcgattcgcaacaatgcgtcctatgccgtgacgggggacggtggagtattgggaaacagatgacagtccatgccactgaacgtaacgaaaagagcgggccgatggattgcgccaaaaaatacaacaaagtgccattgtaccctgggagtggatcaattttccatatataaaattttcggacagcgacttggttgcttatggtacatttacaaaagcagaagataatgacctaatagaagagcttgaaagtcgatgatggttttaagcaaaatttaggtgggtgatttcggatgctagttcttaaaatactatcatttttattggcaatatcctacatcctgctattcccgatgtttccgcaatatccctgggagagcggtgttttagctgaatatcttggagaaagtctatttttacagatctatattgtgatctggatccttgcaattatatatgagctcatcatattattaagattttactgccgaaaaaaatatcaatgtactttttcgatttttttacctgccgcattttatcaattatatcaatattatccgccttttcctattttgagtcagtttttttgcttttttgtcctttcagtaaaagtaattgagattattttttggcataaaagagtaaagaataacgctcctaatcaagggatacaaatactgttagagttccttgtgatgacttcaatattgataacaacctttctttgctgaatgacaacactatagatcataacaaaagggttcttgagcatatgctcaagaacccttttgtcatacatgaaaggtcagcggcaccgctgtcactggcttgcgcccggttagttggaagcggtatccaggtccttgtcgccgccccagatcatattcttgcgcagctcctcgcccacgatctccatctggtgcttggccagctgggcgcgcttggagttgaagaaggtgcggccgtttttgttctcggcgatccactttccggcgaaggtgccgtcctggatgtcctgaaggacagccttcatgttcttcttggtttcctcgtagggcagcacgcggggtccggagacatactcgccgtactcggcggtgtcagagatggagtaattcatggccgccacgccgcccttgttgatcaggtcgatgatgagcttcatctcgtggatgcactcgaagtaggcgttctcaggctcgtagccagcctccaccagggtctcgaagccgcagcgcatcaggtccaccacgccgccgcacagcacggcctgctcgccgaacaggtcagtctcggtctcgtcgtggaaggtggtctccatcacgccggcccgggcaccgccgatgccggcgatgtaggccagagcgatcttataggcgtcgccggtggcgttctgctccacggccaccaggcagggcactcccttgccgttgacataggtggagcggacggtatgaccggggcccttgggggcagccatgaacacgtccacgcccttggggggacggatctgctggtagcggatgttgaagccgtgggcgaaggccagggcattgccttccaccaggttgggctcgatgtcccgcttgtagacgtcggcctggacctcgtcgttgatgagcatcatcacgatgtcgccccacttggcggcgtcggccacggtcatcaccttcaggccggcgtcctcggcattcttccagttcttggagccggcgcgcaggcctacgcacacgtcacagccggagtccttcaggttcagggcatgggcgtggccctgggagccatagccgatgatggcgatcttcttgccgttgaggtagttgatgtcgcagtctttctcatagtacatttttgccatagttatattcctccttgatcttattgtcgtcgtatatggtgctacgccctctttcgatggcgatggtacccgttcttgcgatctccagcacgccgaagtccctcagcaggcggaccagagcctcagtcttgtcccggtccccgaagatggctacggtaagagtctcccggctgacgtcgatgatgttggcccggaagatgttggccatctggatgacctcgtcccgggcgttgcggtccagggtcttgactttgatgagggccatctcccgctggagggaggtggactcgtccaggatcttcactgcgatcaccggaaggagcttgcggcactgggcggcgatttgggagatcatcagctcgtcccccagcagcacgatggtgatgcgggtcacgccggggtcccccgactcgccggagacgatggattcgatgttgtagcccttgcgggagaagaggcgggccacctggctgaggacgccggggatgtcctggaccagaatggacagcgtgtagggcttgatgtccttgttcatatcaggtctcatgatgaagccccctttatttcagcagaaagtcggtgatatgggccccgccggccaccatgggccggaccatctcgtccatatccaggcggcagtcgataacacagccgcaccccgcctggagggcctggccaaaggcctgctccatctccgcccgggtggagacccggaagcccttcagtccatatgcctcggccagcttgacgaagtcggggccacggtccagggtagtctgggagaagcgctggtggtagagcaggttctgccactggcgcaccatgcccaggcagccgttgttgaagatgacggtgatgatgggcaggtggtagtgctccacagtggccagctcgtggcagttcatgcggaagcagccgtctccagtggtgtggaccaccaccttgtccggattgcccaccttggcaccgatggcggcccccagtccgaagcccatggtgccgaagccgccgctggtgagcagctggccggggtagtcgaagtggaaatgctggatagaccacatctgatgctggcccacatcggtggccacgatggtgtcctggggggccatgcggcggatggtctccagcacctgcctgggagtgaggacctgggaggtctccacctccggctcccgcttcagggaaaggatctgctccttccaggcgtcccggtggtactgggggacccgctggttgagcagttccagcacccgtttggcggagccgatgatgtggtggtcggtgaggatgttcttgtcgatctccgaacggtcgatatcgatctggacgatcttcgcctggctggcaaaggaggcagggtccagagccacccggtcagagaagcggcagcccacggcgatgagcaggtcgcactggtcacaggcggtgttggaggcctgggtgccgtgcatccccaccatgccggtggtgagggggtgcgcgccggggaagccgccgccccccatgacggtgatggccacagggcagtccagcttctcggcaaactcccggaactgccggtccgcccgcccgcggaccacgccgccgccgcacatgagcagcggccgctgggactgggcgatcatctccaccagcttgtcgatatcccccaggtcaggctccggcggcttgaggccgtggcgcaggttcagctcccggatgctgccgcaggagcggttctccttccaggggatgaactcatagtcgatcatagtggtggggaaggtgacgttcttcagaaagtcgatgagcaccgggccgggccggccagtggcagccacggcaaaggcctgacgcatcacgtcggggatggtctgggggtcccggaccagataggtggccttggtgatgggcatggcgatgccggtgatgtccacctcctggaaagcgtccttgcccagggtctcctcagtgacattgcaggtgatgaagaccacaggagaggaatccatataggcggtggcgatgccggtggtgagattggtggccccggggcccgaggtagcgaagcacacccccaccttgccggtggatcgggcatagccatcggcggcgtgggaggccccctgctcgtgggcggtcaatatgtggtgtattttatcttggtagtgatacagttcatcatagagattcaggatggtcccgcccggatagccgaagacggtgtccacctcctgctccagcaggcactccaggatggcctgggtggctcttactttcaagctgctgcctcctttggttcagataggaacgatgagataggagctgaggcgcccggcttcgccggaccgctttatatttgtgcgccggaagcgcacttactgactcagaacttttatctcctgactcacgatcaaattttccctccgcccttctggacggcgatgaccccggtgcgggccacctccaggatggagaaggggcgcatcatggactgaaaggtgtccagccggtcgggagtatcggacagctccagggtgagagaggtgggagagatatcgtccaccttggcccccatgatctcacagatggtcatgatatcctggcgggtcttgttgttggcgttcaccttcaggatcatcagctcccggccgatcaggctgttctcctccagggtgcggaccttgatgacttcgatcagcttgttgagctgcttttccacctgctccaccacgctgttgccgctgtccacgatgatggtgatgcgggagatggtggggtcatcggtgacacccactgccagggattctatgttaaaggcccggcgggagaacaggccggtgatccggttcagaacgccggcctggttttccactaggacggaaatggtctgtttcatggcttatccccctctcagtcattggtcccaacgtcagggtggacctcacagatcagcagacagctgccctgtgtgcccagaaaacggtccagcgcctcgtccaggtggtcctcgtcccccacctggatgcaggggacccggtacgcggcggcaatggtctcaaagtccggggagccgtccagcgccacgccgaagggcccgtggtagggggcgctgctctggatctggtggaccagacccagggtgtggttgcggaacaggacgatcttgatgtccatgtccgccgcccggatggcggccagctcgttcatggccatctggaaggagccgtcgccgcagaccaccagagtctggcggtcgggaccggccaccttggcccccacagcggcagggagggcataccccatggtgcccaggccgccgctggtgagcaggcgtccgtgcttctgggggatatatttgcaggcgaagatctggttctggcccacatccacgcagatgacggcatcgtcgtccagccgggctcccagccggcggaggactgtgcccgggaagaccgagcccgcccggcgggggaagacgcggttcagctccgccttccggtagtcacgcagcttttccagccaggccgccgagtcggtggccgccacgtcccggtccaggatctgccggaggatgaccttcacattgcccaccagagggatggcggcctgcatattttttccgatctccgccgggtccacgtcgatgtggatggtggccatgcggcgctggatctcccccgggtccaccatggcccggtcggcggcccgggtgcccaccatgatgagcaggtccgccttggccagggccttgttggcgcagtggttgccgtgggccccgatcatccccatgttcagcgggtggtcggtgggcaggagccccagccccatcatagtcttgaccacagggatggagcaccgctccgccagctccagcagctcctctttggcgtcggccagccacacgccgccgccggcgcagatcaaaggctgtttggagcgggagatggcctccaccacccgcttgatctgcaggtcattgccctttacgctgggcttatagccccggatgctgacctcctcggggtagtagaactttttcagggactgctcctgtacgtcgatggggatgtcgatgagcaccgggccgggccggccagtggaggcgatgtgaaaggcctccttgacgatgcgggggatgtcgttggcgtccttgaccaggtagctgtgcttggagaagggggccaccgcgccagtgatatccacctcctggaagatatcccgccccagcagattgctgggtacctggccggtgatggctaccatggggatggaatccatataggcggtggcgatgccggtgatcaggttggtggcgcccgggccggaggtcaccatgcacacccccaccttcccgctgatccgggcatagccggaggccatatggcccgcgttctgctccgtgcggaccagggtgtagccgatctccgggtgggacttcaaggcgtccaccgccgggcagatggtggcgccggcatagccgaagatatgcgctacctgttcccgcttcaaactctcgatcagggcctgtgctcctgtcatgagaagatcacctccaaattgcatgccgcctgggcggcggggtaaaaataaacggcttcgtcctatctcgataggacgaagccgtctgctccgtggtaccacctaacttcacagcggagcggccagaacaggccggcgctgcgcgctcatgcccctgtaacggtgggtctccggccccgcctactgcggcaaacggttcagcgggactgctcgcgggtgatgttcggcgccctgttccacaggtggagcttacaccaaccgctccctctctgtaccctttggaactgcctactggcccggtcatcgcgttttgtcatcttccgggtcgccccggtaaaagttatttactactttatcgcacggggagctgtttgtcaattccctttttgtctccggaacatttttctgctgggctcagccctcgatctccatcatcagctctacccgcttggtgtggcggccgccgtcgaattcggtggacagaaacacgtccaccatccgctccgccaggttggggcccacgatacccgcccccatagccagcatgttggcattgttgtggcggcggcacatctcggcggacagggtatccccgcacagggcgcagcggatgccctttaccttgttggcagagatggagatgccgatgccagtggtgcagatgacgatccccttctcacactggccggaggccacggcctgggcggcagccttgccgaaaacagggtaatcgcaccggtccggcgtctcacagccgaagtcctggcaggtgatccccttagcggcgagataggccttgatgtgctccttcagggcgtaccctccgtggtcggaagcgattgcgatcataatgaaatcctccttcttctctcttcttcaactattcttctgtcacagccggatgaattggggggtccggcggtggtagacggtgaaataacggaagccgactgtccggagcaactcctgggcctgggcgatccccttccccacgtcctctggcctgtgggcgtcggaccccagagtgatcagctcgccgccgcagtcccggtagagctccagcaggggctgccactgggtcacagtgcgcccgcaccaggtgttcacctcaatggcccgccccgcctgggccaccccggtgaggagcgcgcgcaggcggtcctggtacctctccagagtgacaggatgcccagggatcttctgcatataccgaagggggtagatgatatggcccatcgtgtcccagcagtccagatggaccagctgggccaggctgtcgaagtagtcatccagggcctcatagcaggcccggggggtggtgtagtccaggaaatagaagtccttcccccccttggcggggctgaggttgtggatggagccgataacaaagtccaggtccgcgccggaaaggatggcggcggcgcagtccgggtccaccggggcaccgcccagctccaaacccaggcgcagcttcacgccggcggggcagtccccccgagccgcctgatactgggtcaggatgggggcccagtccagccctgtgacccgtcccccgtccagatccagcaggtcgcagtggtcagtggcacacaggtcggagaggccggcggcctgggccgcccggagcatctccgagaggggcgcctcactgtccggggagcagcaggaatggatgtgatgatcagcaagatacatacagagacctccggcgggcaaattctgtggatcagtccgcttcgccctctattttattgcatttgttgacattttgcaagtaattttcttggaaatcccttcctaccatttctggaagaggaacggcgttccagccagcgctaagccggacggaaaaagccgccgcagacccgtctgcggcggctttgaaaggatcagtcgaaccgggtggggacatgccagatgtcccgggcgtagtcccggatggagcggtcggcggcgaagatgccggaccgggcgatgttgatgagagatttctgatcccaggctctccggtccttgtagacctccagagagcgacggtgggcctgacagtagctgtcaaagtcggccagtagcatatattcatcggcgatcccgccccctccgccgaagagcaggcggttggtcaggtcggtgtaggccctgccgtcggagaagccggcggagatctggtccagcacccgcttgagcaccgggtcctgctggtagtaatccagagagcgatagccctggcggcggcgctcctccacctggtcggcggtgaggccgaaaaggaagatgttctcatcccccagctgctggtgcatctccacattggctccgtccagggtgccgatggtgagggcgccattcatcatgaacttcatgttgccggtgccgctggcctccttgccagcggtggagatctgctcggagagctcggaggcaggcatcagcttctctgccagggagacccggtagttctccaggaaaaccacctggagcttatccttgcagacggggtcggcgttgatctgggcggccagggagttgatgagctggatgatctgtttggccacgtggtagcccggggccgccttggcgccgaagaggaaggtctggggcgtgaagtccatattgggatcgtcccgcagctgctggtacaggcacacgatatgcagcacgttgagcagctggcgcttatactcatggaggcgcttcacctgtacgtcgaagatggcgtcggtgttgaggatgatcccggactcccgggccacatagccggcaaaacggcgcttgttctcctgtttgatggactccaggcggtccaggacggcggagtcgtccttgtacttctccaggccggagatggattccgggtggagcaggtaggcgtcgctgccggtgcactcccggatcagggcgtccagcttggggttgatctgagagagccagcggcggtggtcgatgccgttggtcacgtttttaaactggtcaggctggcggaggtaggcgtcatggaacacgtcccgcttgaggatatcggagtggagggcggacacgccgttgactgcggagcaggcgcacacgcacaggttggccatgcggacctccccaccccagatgatggccatccgggagacccggttcatgtccccgccgaagtatccctccagctggcgctggtagcgggcggcgatctccttcaggatctcccagatgcggggcagcagggactcgatcaggttctggggccagcgctccagggcctcggccaggacagtgtggttagtgtagcagacggtgttggtgacgatgtgccacgcctcgtcccagctgtacccctccacgtccagcaggatgcgcatcagctcggggatgaccagggtgggatgggtgtcgttgatctggatgacatgcttctggtggaagttgcgcagcgtcccatactgggcacggtgctggcggacgatagactgggcggtggcggagacgaagaaatactgctgcttcagccgcagggacttgccctcgtagtggttgtcatcgggatagagcacttttgcgatgacctcggccatggcctgctgctccaccgccttcaggtactcaccccgggagtagagggacatatctacggggaccgggctcttggcgtcccacaggcgcagggtgttggtgtggttggtcttgtagccggcgatctccatgtcacgtggaatggccagcacggtcgtgtagcccacgtgctccggtttattgtggccgtccacccaatggtccacgatcctgccgccaaagcggacctcctccgcctcgtccatcttggcgataagccaggcgtcgcccaggccaagccagttgtcggccagctccacctgcttgccgtcaatgatcttctgcttgaagatgcccagctcatagcagatggaatagccggtggccgggatctccagagtggtcatggagtccaggtagcaggcggccagacgacccagaccgccattgcccaggccggcgtctggctcggtctcgaacaggtcagcggcggaaaagcccagatcctccagcacctgggtcaaggtgtccagcagccccagattataggcgttcttctccaaagagcggcccatcaggaattccagagagaggtagtggacctgccggccctgggcttcccagacgtggttgctggtctcgatctgatgaccggacatgatatcccgcaggaccatggcgcaggccttgaacatatgattaggggtggcctcatccactgtgcggccaaaattccgcaggagcttgcccacgatcatctcagtgagctgggctttgttgtattcagccataatttgcctccctgttaatttaaaatgaaaataaaaatcacggagcctgtatggcgaaaaatttttccatacaggctccattgtagcagaccggagtgggcgcgtcaattggcggaagggccaaaacagccgccatttcagcccgtttccggcgggatacccagacgggccctgaatctaccagcccaggatacgctgatagatctccagatattggcgggcggagctgttccagctgaagtcggcggtcatgtcctccttctggatgccgcgccatgcctttttgttgttgaaatagaggtccactgcctcccgcaggacccagaccatatcgtgggcgttgatgtcagagaaggtaaagccccggccggtgccctcgaacttgttgtagggggtgacggtgtccttcaggccgccggtctcccgcactacggggacagtgccgtagcgcatagcgatcatctggctcaggccgcagggctcgctgaccgagggcatgaggaacaggtccgcgccggcgtaaatggcggtggacagaggcgcggaataggtgatctgggcggaaaagcggccgggatactggacctgcgcctcacggaaggcggcctcatactgccagtctccggtgcccaagaccaccatctgcacattcatggccatgatctcgtggagggcatcagtgaccagggagaatcccttgtggcccaccaggcgggagatgcaggcgatgatgggcacgtcggcgttctcctccaggccaacggcccgctggagggccagcttgcactcggccttccccttcaccagggagcgggcgctgaagttggcggccagcccggaggtggcggcggggtcatagagctgggtatcgatgccgttgaggatgccctggagctttccgctctgctcgttaatgactccggccaagccgtgggcatagaagggcagacgcagctcctgggcgtaggtgggcgagacggtggtgacgaagttggaggccatgatggcgcccttcatcaggttgacgtccttgtagtagcccagcatcccctcgttgagatagctgcggtccaggccaatgacgtcctccagtacctggtcgccgtagcggccctgatattcgatgttgtggatggtgaacaccgtcttggtgttggccagctcggggacgtggtaccgctcctccagcatgtagaccgggaccagggcggtctgccagtcgttgcagtggatgatgtccggggcccagccgaagtggcccggcgtctcgatgacggcccgggagaagtaggcaaagcgctcacagtcatcaaagtggccgtacagctgccagcgtttgaagtaatactcattgtccacgaaccagtaggtgacgccgtcctgctccagggagaagacaccgcagtacacgtgccgccacgacagagtgacgttgtaatactgctcgaacttcatctggctgcgccactgttctccgatcccctcatacagcggtaggatgaccttgacgtcgtggccctcctgggccagcgccttgggcagagagccggccacatcggccagcccgccggtcttgataaagggcgctacctcagacgaggcaaacagaattctcatagatcagttcctttcttcatatcagcgcggagggaggccccttgtccggtcaggggcctcccctgcgatcagacgatggaatccttggagatggccagcggataggtggagtggcccatcagcatccggtcctgattcacctggacattcttgtcggtgatggtgtaggacagggaggcacctgcgcggatgatggtcccctgcatcaggacgctgttggagaccttggcgcctgcctccacaatgacgccgcgggagaggatggagttttccacctcgccctcgatgaagcagccgtccgccaccagggagtggactgatttggcgtctgggccgtagtaggtggaggggttggactggtccttggtccggatggggcggtcaggatcgaacaggtccgcccgcaccgctgggtccagcaggtccatggagtgctggaagtagtcggccacggactggaagcgggccacataacctctgtggagatagggcagcaccttcagggtgctcagacggggaagcagaacgcccctgctgaagttgtggatgttatgggcggcgcagtagtccaccatgtccagcagcagctttttggagatgatgtaggtctccagcgactccagggcgttggccgcgtgagcgggattgatggacagatcgctcaccagtccatcgggaccctgggtgatgtagacggtgttgcggggggcgcccttcagctcctgggtgcagaggatggtgatgtcagcaccgctgtccagatgctgctggaacacttcggccacgggcaggttgaccaccatgtcgccccagcccatgatgacatactcctgacggatgttctggagataggtgtagatgcccgccagcgcctccatgttgccgcggtattccccactgccgccccgctctgccacgccgaaggggggcaggatgcgcaggccgccgtgcttgcggctcaggtcccagtccttgccggaacccacatggtccagcagggactgatagctctcgtggacgatcaggcccacgtcgctgatgcccgcgttgacatagctggagagcatgaagtcgatcaggcggtaccgaccgccgaagggcagagagcaggtattgcgggggcgggtcagctcacctagattggagtcagaatggtaggcaaacaggatgccgtggagatcgttcatacccgctcacctcctttcacatcttcccggaccatggcgctgggcgtcacggtggccttctctcccacggtgacgccgcctgccactacggcgatgccccagccgggagaatcgtccggaggcgcgcccaccacggcgcccgcctccaccacggcgtcctccgccacgatggcgtaggagatgctggcaccggctttcaccacggtgccgggcatgaggatggagtactccaccttggccccctcctccaccgtgacggaatggaagaggaccgagttggccaccgagccgtccacctggcagccgccggtgaccagggagtgggagatcacggcgttggggccggtgacgtggggaggtttgatgggggtgcgggcgtaaatgggccagctggtatcataaagatcgatgccgctgtggggggccagcatgtccatgtttgcgtcccacagagagttgatggtgcccacgtctttccagtagccatggaagcggtaggccatcagcttctctcctgcggcgagcatgttggggatgatgttctttccgaaatcgttggaagacttgggatctgcctcatcatcgatgaggtagcggcgcagcttctgccaggaaaagacgtagatgcccatagaggcgaggttgcttttgggctgggggggcttctcctcgaactcatagatctggtcgttctcgtccacgttcatgatgccgaagcgcttggcctcgtccatggtgacctccagcacggagatggtgcaggcggcaccggtcttcttgtgcaggtccaccatgtcggcatagtccatcttgtagatgtggtcgccggagaggatgactacatagtccggatcatacaggtccaggaagccgatattctgatagatggcgttggcagtccccttgtaccaggtgccctggtcgccctcgcgcatgtagggggggaggatatgtacgccgccatcggagcggtccaagtcccagggctggccagagccgatgtagctgttcagctccagcggacggtactgggtcagaacgccaactgtgtcgatgccggagttgacacagttggacaggggaaagtcgatgatgcggtacttgccgccgaaggggaccgcgggctttgctacatggctggtcagggcgtaaagccggctgccctgccctccggccagcagcattgccacaacttctttcttcatctcattcatcacctcttggattgataagcacacacagggaagtatcgtataacagaccaggagcaaacggagaaactggtccggttatgcctcttttttccgcttggaggcgccgggcttggcggggcgcttgccggcggggccgtttttttccgatttggacgccttgggcttgcgcttggggaacttgcgggtacagcggtagatgacggcggccatggggggcaggtcgatctccatggactggtcctggtcgtggcaggggatgtactcggtgcgtacagggtcctggtcgccaaggcctcccccgccgaaggacacgtcatctgtgttcagcacagcggaccacatcccagcgaagggggtccccacccgataacccttccggtgtaccggagagaagttgcacactaccagcagggggctgccctccttgtcccagcggaggaaggagacagtgttggcctggttgtcatcggcgcacagccactggaagccctgccaggagtcatcctgctcccagagggcgggctgctccagatagaaggcgttggccgccttaaagaactcctgggtctggcggtggggctcgtactggagcaaatgccagtccagggaatattcatagtgccactcgttccactgggccaactcggcacccataaaggtgagctttttgcccgggtgggcaagcatataggtatagaagacccggacgccggcaaacttcatggggttgtccccgggcatcttgccaaagaaggagcccttcatgtggaccacctcgtcgtgggagaggggcaggatgtagttctccgagaaggcatacaccagggagaaggtgatgtcccggtggttgaactgccggaagtatgggtccattttgatgtagtggcagatgtcgttcatccagcccatgttccacttgaagttgaagcccaggcccccgtcgctcaccggataggtgaccttgggccaggcggtggactcctccgcgatcatcagcacgtcgggatgggcaccgaagaccatctcgttgaggcgctggaggaactcgatggcctccaggttctccttaccgccgtggatgttgggtatccactctccgggcttgcgggcatagtccaggtagagcatggaggagaccgcatccacccgcaggccgtcaaaatggaactcatccagccaaaacatggcggaggagtagaggaaggagcgcacctcgttgcgtccgtagtcaaagacgttggtgccccagtcggcgtgctctcccttccgggggtcagcatactcgtaggtgggggtgccgtcaaagtgatagaggccgaactcatcccgggggaagtgggcggggacccagtccatgatgacgccgatgccagcctggtgcatctggtccacgaaatacatcaggtcgtggggggtaccgaagcggctggtggcggcaaagtagccggtacactggtaaccccaggaggcatccaggggatgttcggtgacagggaggagctccacatgggtgaagcccagctccttcacataggggaccagataggcggccagatcccggtagctgaggaactccccttcccccgtgcggcgccaggagcccaggtgacattcatagatgttcatagggcggcggtagggggcgtttttggcccgatagtccagccaggcccggtccccccactggtaaccggagaggtcgtaaagcttggaggcggtgcctgggcgagtctctgcgtggaaggcaaaggggtcagccttgccggtcaggcggccatccttggtatgtactgcatatttatacgcgtcatactgctgaaggccggggatgaacccctcccagatgccgccctgaacaggggtcagagggttggcgttggggtcccagtcgttgaaataaccaaagacacacacctgctgggcgttgggggcccagactcggaaatagtagccggggacaccgtcccgctcgccggcatgggcgccgaagcactcccaggcatgggtgctgtgtccatcactgaacgctctcagttcatgttccggggcataaaccggggcatttttcttcgttttggccaatgaaaccacctcaaatcactcttttgtgtcacaaatggtcgaaaagcacgaacaaaaaccaaaaattctcctctatatttataaaaattatacaacagaagagaggacgcgtcaagtgaaaagccggtaaaatggaatttattcggagccccccggcggccggggagctccgaacagggcgtcagcgggccatcagcagccgctgaaacatctttccaaagatgccgggaatggtgaggcggtccacctgctgggaggcgacgatggggatggtgtcccggacctcgccgtccacagtgaccaccatctgccccagtttctgcccccgctccaccggggcctccaggtcctgggcgagctggatctgggtggagatcaggccctcctcccccttccggaccaggagggaacactcccgctccaactgaggctggacctgggcggtggtgcccagcagcacctccacgggggccagtgggacatcgggatagacccgggcgagcgtatagttggcgaagccgtaatccagaagggctttggcgtcttcaaagcgctgagcggaggtgggagacttcatcaccacggcgatgagttccatgccgtcccgctcggcggtggcggagacgcagtacagggcggaatcggtggaaccggtcttgaggccggtggctccctgatagaagcggaccagacggttggtgtttgtgagaccgaaggcaccgtcccggatagagtccatccagatggtggtgtactcccggatgctgggatggttgaggatcagctcccgggacatgagggcgatgtcgtgagcggaggtgaggtggccctgggcggggaggccggtgcagttgacgaagttggtgtcagccatgcccagctcacgggcccggaggttcatctcggcaacaaaggcggcctcgctgccggaaagatactcggccatggccacagcggcgtcattgccggagaccacagtgatgcacttgagcagctcggagacggacatctgctccccctccttcaggtagacctgggaaccgcccatgccggcggcataagcggagacggtcaccatgtcgtcccgggcaatgcggccgctgtccagggcttccatgatgagaagcagggtcatgatcttggtgacgctggcgggctccagcttctggcgggcgtctttttcgtagaggacagcgccgctctccttctccatcagcaccgcagaggcggcggctgtctccggcccggagggggcggcggaggcggggaggtcagcagcagatacacagggcgccagcagcagggcggccagcgccaaagaaaggaaacggttcatggcgggtccctccaaatccaaatgtttctgtgaaaaggatgtggaggggcgaggacttctatacgccgcagcggaccggtatttttttctgcgcaaatcgttgcatgatgcaaaaattttttgaaaatttttggcctgcgtggacgggtctgtacaactttttccgaagtcggaccaggggtgaggagggtgatggggtgagcaaggcggaagaaaagcggcagcgagagcagctgatccggcaggtgcgacgactgactcgggcgagagtgaatgacgccgtcaagctggcctatctgtccggggaggcgctggaggccatcgacgggctggacctgacggctatgacggagttcaagcgggcggggaacggagcggtggagatcaagttcaccgaccggctcaaggccctggaaaagctgatggagctgatccgggagaaccgggagacggaagcggaggagctgctgcggaccctgggcgggacggcggaggagccggaatgggagcgctgaggttctcccccaaacagcggcaggtgctgacctggtggcgagaggggtctccccactgggagaagagcgccatcatctgcgacggcgcggtgcgcagcggcaagaccctgtgcttaggcctgtccttcttcctgtgggccatggcccgcttccaggggcggagattcgccctgtgcggccggagcatggagggggtgcggcggaacctgacgggagaggtgctgcccctgttgagagggatgggattccagtgccgggagcagctgacccggggggaggtgacggtgtccctggggcggcggcggaacatcttctgcctgttcggccgaggggacgagcgcgccgcggcacgcatccagggggtgaccctggccggggcgctgctggacgaggctggtctgatgacccgctcctttgtggagcagtgctgcgcccggtgctcggtccagggggccaggctgtggttctcctgcaacccggaggggccgggacactggttctatcaggagtgggtccagaaggccggggagcgcaacgccctttacctccacttcaccatggaggacaacccgggcctgtctccccaggtgcgggagcgataccggaccatgttccaggggaccttctaccgccggttcgtgctgggggaatggaccgcggcggcagggctggtatatgacttcttctcccgggagatggtgtgcgagccgccggaggggcgggcggcggagtggtatatctcctgcgactacggtacggtgaaccccacctctatgggactttgggggcggtggggggaggcgtggtaccgggtggaggagttctattacgactcccgccgggaggggcggcagaagacggacagcgaatacgccgacgcgctggaggcactggcggacgggcggcccatcagggaggtggtggcagacccctccgccgccagctttctggagtgcctgcggcggcggggctggcaggtgcggcgggcggagaacgaggtgctctccggcatccgcaccacggcggagctgctgcggacgggccggctggtcatctgtcccgggtgcggagacgccatccgggagttcgggctgtaccgctgggacaccagcgccggagggcgggaccaggtgtgcaaggaacatgaccacgcaatggacgacatccggtattttgccgtcacggtggcggcaaaggagcgcggcggcagctgggccgggagcgtggaacggaggatattttgaccggcaggggccggaagaggcaaaggaggcttttgcgatgaagcggcgggaacgaaacaaggggccggctcgggcggaggcggtgcagatccgggagagcggacggcatcccttcggcgtgctggaccggtatgtgcccctgggggcgggggagctccagctctaccgggccatccgggaggcggtgcccatcctggacgcggccatctggaagctgatccggctggccggcggagtggcggtgaagtgcggggagcccgccgcccaggcggggctggagcggttcctccgtactgtccccaccgggcggggacagcggggcatccagtcctttctggactgctatctggactccatgctcacctgcgggcggggggtgggcgaactggtgctggactgccagggccgggagatcgccgctctgctgtgcgccggaccggagcaggtggagatccgggagggggactcgcccctggactttcagctgtgtgcccggggcccgggcggaacctgtgagcccctgccctggcaggagctgctgctgttcaccccttttcagccggagacagagcacccctacggggtgtccctgctgcggtccatgcccttcctcaccgacatcctgctgaagatctaccaggccacggggatgaactgggagcgaatgggcaacgtgcgcttcgcggtcatctgccgccccggagagggagagggagcctatgcccaggagcggtgccggcaaatcgccggggagtggtccgccgccatgcaggcgggcaagcagggggccgtgcgggactttgtggcggtgggggatctggacatcaaggtcatcggggcggacaatcaggtgctggacagccaggtgccggtgcgtcagatcctggaacagctcgttgcccgcaccggtatccctcccttcctgctggggctgtcctggtccagcacggagcggatgagcgcccagcaggccgatctgatgaccagcgagatcaccgccctgcgccggaccctggagccggcggtggagcgcatctgtgagatgtggctgcggctccacggctggggcggcgatgtgacggtggactgggcagacatcaacttgcaggacttcgtggaggaggctagagcgaagctgtatctggcccaggcggaagccatcagagaggaggaacggacatgaaggtagaaaaggaggcccttgggggccagagggtggagcccacagaggaggagctggccctcgtcaaccggcagagccggaaggagctgacagcggcggaggtctatctgttcgcggtgcggctgtgcgacaacgaggtggaccgggacggggagcagtttccacaggccaccctggagcagctggcggagctgtttgtgggcaagagcgggatctttgaccacaggtggagcgccggcggtcagacggcccgcatctaccggacggaagtggtccgggaggaggggatacgcacggcgctgggagagcccgcctgctatctgaaggggtacgcctacatggtgcggacccagggaaaccaggacctgatcgcggagatcgaagggggtatcaagcgggaggtcagcgtgggctgcgcggtaaagcgggcagagtgctccatctgcgggtcggacatgggcaggtgcgcccacgagaagggaaagcggtacgacggcaggctgtgctgcgcgcgtttgctggaggccacagacgctttcgagttctcctttgtcgcagtgcccgcccagcccagggctggagtgatgaagcgggccggagggagcccttcgctgaagcagctggcgctgggagagcccgccgccgcagccgagctggaagatctggagcgggcggccgagctggggcgccgctatctgacgggactgcggaacgaggtggtccggctgggcctgctggcggagcgccaggtaggggcggagaccctccggcacatcgcggaccggctggaggaaaaggagctgctggagttgcgggagaattatcagcggcgggcggcggagcgctaccccatcgccccgcagctgtcctacggtaacggggacgggatgccggagcggccggacggggcttttttgatctgacggcggggccgtctttacaaaataaatcgggagggatcgggaatgaacaaggtttcctttgaggagatcggcgcagtggcggccacctttttcgcccagaaggaggtcaaggcaggacaggtggtgaagatgacgggcaacggccaggtggggccctgctcggccggggacaagttctgcggcgtggccctgtccaatgagaacgggtgcgccggcgtacaggtgaagggattctgcccggtggcggtgacgggctccatcgatttggggtggaacgtgctggcggcggatggggccggcggtgtccagacggcgaccgccggggccgaagagtccccatctggggtggagtgtctggtggtcagtacggacacggcgggcaagcgcgccgtgatctgcctgtgagacagagaggagagagctgagatggcctattgctacgacaatctgaagctggagaaggggatgtatcatgaggcggggcggtccttcactcaggtgctggagagccgggacccctcggagcagtaccggggcaccgccctggaggggctggatgcctttcagcggcagctcaagcgctttgatatcaaggtgaaggggacgggcagcgacgtggtggaaaagttcttccgcactgccgactccgccgtgctgttcccggagtatatcgcccgctcggtgcgccagggtatggaggaggcggacctgctgccccagctcaccgccgcggtgacacggttcgacggcatggactaccgctccatcacctccgaggcgggaggcgaggagaaagagctgcgccgagtagacgaggggacagagatccccagcaccacggtcaaggtgcaggagaatctggtgaagctgaacaagcggggccggatgctggtggccagctatgaggcggtgcgctgccagaagctggacctgttttccgtcacgctgcggcagatcggcgcccacatcagccggatgcatctggaggacgccatccaggtgctgatggagggggatgggaacggaaacgccgccccggtggacagcacggcaacggaggacacggtgacctatgaggacctggtggacttctgggccaagttcgacccctatgagatgaacacccttctggtgggcaacgacgtgatggtgaagatgctcaagctggaggagttccagaacccgctcaccgggctgaacttccagggcaccggcaggctgtccacccccctgggggccagcctgctgcgcacctccgccatgcctgccgggaccatcatcggcctggaccggcggttcgccctggagatggtgcagggcagcgatgtgctggtggagtacgacaagctcatcgaccggcagctggagcgggcggccatcaccaccatcagcggcttcgccaagctgttccagggcgcggcccgggtgctggagctgtgatggaggaacagatcctggcctttgtggaactgatgggggggcgcgggaatgaggagctgctccgccccctgtgtcaggcagcggagcgggagatggcgggccggctgagggaggggctgtcccccgaggcgtgcgggcccgccttcccggtggccgcagcctggctggtgctggccggactggaggcagggacggacggcgtgacttccttttccgctggcgacctgacggtacataccggaggagacggggcgggagccatgcgacgccaggcggagcggctgatggccccctatttggcggacggatttgcctttcggggggtgctggggtgagagtggacaccatttccgtcctgctggaccggtatgggcagtgtgtgacgctttaccgcggcggcgtggagccaggaagagaggtgcgggccttcctccagcccctgcgggaggcggggagggaacaggcccgcccctcccccctggggctgcggcgggaggaccggtatctgatgctgggggagccggacgtcccggcggcccccggggaccgggtggtgtggcgggagagcggatatgaggtccgcaccgcccaccccatctatctgggggagcggctgtcccactggtgggcagtgctggccccctggggcaaggaggagacatgagcggcggactggaacagatccgggaggggctgaccgcccacctcaatgggaagggtatccgggcagtatctgcctggagcgggacggcgcggacgttcccctgcgggccggtggccgcagtatccctgcgggggtgccgctggggcccggccggctttcaagactatctgggggagcgatatgacccggaggcggggcgctgggaggagctgtatgggcgcagggtgaagctcaccttcggtctggacctgtacggggagcgggcgcagggggaccaggcactccaggcggccttcgatgccctggcgggggcgctccatcgggaaggtcccccggggatgcggctgctggagctctcctgcggggagacggagtatgaccagggagggcagctgctgaggcggccggtggaggcggtatatgaggcgtgcctctatgctgcggcggagccgggcggccttttccaggactttgagatcagaggaggattggagccatgagcgtgaccacacatgagcggccgggggtgtattcggagtatgatgcctcctcggtggtgcagggcagacaggggcgaaagatggtggggatggctgccatccacgccacggccccggcaggggtgccccagacggtgaccagctacgagggcgcgctgatcgccttcggcagcaccggggggcaggatatgacagaactgatccggctggcactgaagaacggggcggccggcgtggtggcggtgccggtggcggacgaggagggttatgaggcggcatttgccgccctggcggcgatggacgatatcggagtggtcatctgtgacagcgtggaccgggaggtgcagcagtccctgcgggacagcgccgccgccgcctctgccgcccgccgggagaggatcgcggtggccgccggcggggcgggcgagacggtgacagagctgctggagcgggccaaggcgctgaacagcgagcgggtggtgctggtggcccccgggggcaccgacgaggaaggggaggccgtctccggcctctccctggccgcagctgtggccggggctattgccgggacaaccgaccccgccctccccctggggggcgcggtgctcagcggactgtatgggctggagacaacctatggggacaacgacctggacctgctcatccggggcggcgtgactccggcagagcggacgggtggggtgacctcggtggtgcggggagtgaccacacgcaccactaccgacgggacggcggacaccacctggagagagctgtccaccatcctggtggtggacgacgtgatccccggcatccgctccgccctgcgcagcaagttccaccgggccaagaacacggagcagagccggggggccatccgctcccaggtggtgctggagctggagaaccgaaaggagcgggagatcatctccggctatgacaatgtggcggtgtccgccgacccggacaaccccacggtgtgccaggtggagttctccttctcggcggcccaggggctgaaccagatctggctgacggcccacatcaccgtatgacaggccgccggcaaaggacagacagtgaggagggagcagagtgagtatcgcaggatttcccaccagcagcgacatctatctggaggtggatggagtcaaggtggcggtggtgcagagctattccgccaaggccagcaagaccagctcggcggtggaggcctttggagagagcgagccggtggccacggtgccgggccagaccagccatgtgctggagctgacccggttgtacgccaccgacgaggccatccgggacggcatcgacttttacgggctgagcggtttctctctggtgatctgcaagccggaccgaaagatcatctattccgactgccagtggagcagcatcagcgaggcgggcaccctgggtgccatggtggtggagaaggtgaccatcgtggcctccaagcgcattgagacgggggtgtgatagtggtgtggtcgattttggcgggcgcagaccgcatggaactggagaatggcatggagctgaggctgctgtccgccctggaagttctggaggcccggcgggaggcggcccagctggcggagagccagggggagcgggccctgtgctccaacgcatgcctgctggcccgggcgctggagagcggagaaaagccggtatttgacagtggacgggcggtgctggcagggctgacggtgagtgagatcgccgttctggccggacggtggagagagttcgaccggaaggagaacccctccgccgcaggaacagcggaggagttggaaaacgtaaaaaaaaactagccggcagccccggggatcgcctgcgttggaaggtgctgaagcagttcggcgctctgcccaccgagaggcgggccagacagatgaaggagcgggactacctgtggtgcctgctcaaccaactgctagatgaccaggaggagctggatcagctgtgccccacatgccgggcggaggcggagcaggagcggtgccccggctgcggggcgctgatccaggcttccggggtgaacccctcctttgacatggagcggtttcgacggctgaaggagggcgagggcacttgagagactatctggaggagctgctggccgggacggaggacgtgctggaccaggcggaggcagagtggacggagggggcctcccctcccctgccccgccgatccagggagcggccggaggcggcgggcggcccggcggagccggagagaagcgccggggccgaagaggcggccgggggtggggaaaactggattgaaacagagctggaggggcagtctcgatccagagagacaggggcggttctggagtccggggagcgggcggaacagccggaaggtccggcagggctgagggcggtcctgtccgaccgcccactggagggggatgaggcgtccaccttgtcctggctgctgtgggccggacggcaggggcgtgccgtccctcggaagcggagtctggggagacccgaggcgggggccgggactgtgccggagatccggggggaggaacgcgactccctctgggagacagagggggtggcgggcacccgacggctccaggccgccatggaactggcccggcgggcagcggggtaccgccgggagcccagagcagaccgggcggggccggtctcccttcggccaggatcggatgagccgcttctccgggagcatgactccgcacggacggtggaccggatctttcgccgggatgcccggcggtacgacgggggctttgccctgttctgagaggaggatctccattgaagctggcgcccatgcgctacaaggactatgtgtggccccacaacccaagggtgtactccatcgactatgagcggaagatggcggtgaacaaggtgcccttcggcacctaccatctccaggacctgggccggacccgccgggtgatgcggggagagggggaatttgccggagagggggcctattcccagttcggcctgctggccaacaccttttatgacccagggccggggctgctgatccaccccctctggcagacggccagtgcctattttgtggagctgcggctggagcaggagcccagaccggactatgtgcgttactccttcgctttctgggaggccagcggcctgtacagcggagcggtgcaggaggtcacccggaccggagaggcggcatccggcgggaacggcggagtgctgagccacacggtggagcagggggacacactgtgggcaatctcggcccgatacggggtggggatgacggagctgctggcccgaaatccccagatccgcaatccaaacctgatcctgccgggagagaaggtgacagtccggtgacagcctatgtgaccacggcggcaggccggacctttcagctccccgttccgctgtcctgggagctgaactatactgccggggtgcccagcgacagcttttgggtgcgctgtccctggcaggcgagccaggggacggacccggcggagtgggtccgattctccgcagcggaggcgggcgagacggtgttttccggggtggtggacgagtgcgaggtgaaccaggggacggagggcctgcggctggaagtatcaggccgggggatggccgccctgctgctggacaacgaggccctgggacaggactacgggaccgccaccctggaagacatcctgcgagaccatgtggccccctatgggatcgaattggcgggagaggccagcctgccagcggtgagccccttctccgtgcccactgggagcagcgagtgggcggtgctctatgagttcgcacaatactgcggcggtgtgtgtccccgctttgaccgggcagggcggctggtgctggaggggtggaccgaagtggaaaatctggccataagcgatgccacaccggtgaccagcctgacggtccgagaccggcggtacggggtgctctcccagatcctggtgcgggacagggtgcgccagacggtggagcaggtggaggccactgactttctccggatgggcggcaggtgccgccgggtgatgaccatgccggggcggagcagctatcaggccatgcggtacagcggacagttccagctggaccgctccgccgcggagctggtccggatggaggcggtggtgccggtcctgttctatggaaagccgggggacctggtgcgggtacagaggtccgactgggaccgaaatggcagctggcgggtggtggaggcctcagtacaggcggacgaggcagggggacggacccggctggagctggcggtccccgacgttgtgatatgaggtgagcgaaatgtggacatcagaccggagaaaaacacggcaggccggtgagagctgggtggactggggagaagtgaccctggagggggacccggcaggggcctatctggacggtgagcggcggcagctggcggtctatgggccaggcggctactgctggaagccggccctgggggaccgggtcctggtgctgaaggcgggacaggggggcgagtccccctgcgtcgccgggaagcggcagggggaggcagagacgctgggcgctggggaggtgtccatctccagcagcggggcggagagcgggctgctcctacgcacggacggccgtctggagctgaacggtcaggtaatggtgaacggccagtcgctgaacggcctgatccggcagatcgtgctggcaatcctgggaggcgggtgaagggaatggagcttcagatccaaaacggagactatgtgcccgacggactgggaggcttccgccggctgaccgggggcgaggcccttttgcagcgggtcctgttccgcctggtcccgcggcggggggctttcccctttatgccggagctgggcagccgcctctatctggtgctccgggagaaaccggcagcccgccaggcgctggcggagcagtatgtggcggaggccctggctggagagagcggactgcgggtgacagaggtatcgctgacccaggagggggaccggggcctgctgactgtccggctggactggcagggagaggcactggccgtccagacgctgctgtgagagggggagcggaatgaaggagctggaagagatctatcaggagatgctggactgctttgcccagaggactgggctggaggcggcggagagctgcgatctggcggtgcgcttctacgcggtggcggcccaggtgtacgccctgtacgcccaggcggactgggtgctccggcagtgttttccccagacggcggcgggaagctgcctggacagccacgcccagctgcgggggctgagccggaagcaggccaccgccgcggaggggagcatccggttttctgtggcgagggcggcggatacggaccggcctatccccgccgggaccgtttgcatgaccccggggctgatccggttcgagacggcacaggcggcggttctggaggcgggggcgtcctgggtggatgtgcccgcccgggcgctgacgccgggcagtgcgggcaatgtcccggcaggggcggtgaccgccatggcggccgcgccggtggggatcgccgcctgcaccaaccccgccccctttgctggcggcggggacgaggagggggacgagggcctgcgccagcgggtgcttagcaccttccggcggctgcccaacggggccaacgccgcattttacgagcagggggccctctcctttgaccaggtggccgcggcgtccgtactgccccggagccggggcaggggtacggtggacgtggtggcggccaccctggaggggatgccggacgaggagctgctgggccagctgacggactatttccagcagcgcagggagatcgcggtggatgtgctggtgcgggccccggaggcggtgacggtggatgtggcggtcaagatcgacgggggcgcggaccaggcgggggccgcagagcgggtgaagaccgccctgcggcagtggttcaccggagagcggctggggcaggatgtcctccgggcccggctgggaagcctgatcttcggctgtgaaggggtaaaaaactacgagctgacggcgcctccagaggacctgtccttagagcccgaccagcttccggtgcttgggaccctgacggtggaggcaatgcaatgagctacaggagatatttgcgggagctgctggccccgctgaggctctatgatctggaggcccccttcaacggcggggagctgaatgtccagggcggggcgctggacggggtggacacctggctggcggagctgcggcgggagagcacgctggcggaggcggagagctgggggctggagcggatcatcgccctgctggcccggcggccggtagcggacacgccgacggggatgcggaaagccctggctgcgctgatgcggatcggcggggacagcttcaccctggaggccatcaacgccaccatctccgggtgcggcgtccatgcccatgtggaggagaaggagatcccgggagaggtggcggtctccttccctgatattccaggcatcccaaagggatttaaggagatccgggagatcattgaggatatcctgccagcccacctggggatcgaatatgtcttctggtatattacatgggaggaactggagagaaagatctcctgctgggcggagatcgaagagcgccagctgacctgggagcagctggagacgctggtggatgaaacagaggagtgggcggggacctgacagtcccccccactcctctgtctgggtcaggtgctctgctccctgagcagttcctccagaaatcgagacatctccaggaccaagctgtcgcagtggtccttgcgcagctctccccgttccttggaagcccggagcaggtcggcgcagtccagcgcgccgtgacgtgtccggaagtctcggagcagtgcggtggactgcttctcatcgcagcccagcaggcccagcaccatcagagcgccgctcaccgcgccgcaggtggagccgtgacgcatcccggacccaaagtgggcccccagagcattggcctgttccggcgtgagtcccagccggtcggcaaaggtcaccaggaccgcctgacaacagttgtagtggaccgcagggtctgcccggagtgcccgggccttttcaacatagtccatttcaagttttcctcccacaataaatcacgatggcctgctggtcaccggtccagcaccatctggtcgtagcgcaggtactggaagccgcacttctcatacagatgggcggccccctggttcatctgggtgacctccagacggaagcggcggctgtccgggtactgggtaaagatccactccaggacctgccggcctaggccgcggccacggaactccggcaggagatagacctcctcaatgaagacgcaggtcccgcccacctccgcggagtaacacagggtgacatacagatagcccgccagccggccttcctcaaagatcagggtgccccggagcaggggctcattcccggcagcagccagaaaggaccgctccacgatctcccgggggaccgggtggtctaccgcgttggaccggtagaaggcatccaccatgggcaggacggtgtcccggtcgtccagtgtcatatcgcgaaaggtcagcatagcgatccccctttgtttcattgtctgctattataatatcacagaaaaattttttcaaccggaggtgggcaaaacatggacctccggcgtctaatggtcaaaaagggagggatggagcatgacggaacaggaattcgccctccgggcccaggaccagcggagtcggctctaccgcacagccttcctctacctgggcggggagcacgctgcggtggacgcggtggacgaggcggtgtaccgcgccttccgggaccgccggaagctgcggcagcccgagttcttcgagacctggctgacccggatcctcatcaatgtgtgcaaggacgagctgcgccgccgccgcagagagtgccggatctgcgtcccgccggaaccggaggcggagcacatggatgccctctccctgcgggaggcggtgcgggcgctgccggaagagctgcgctccgtgatcgtcctgcggtactttaccggcctgacgctggaggagacagccgccgccctggagatccccagggggacggtatcctcccgccagcggcgggccctggagcttctcaggctggacctgacagacggacaggaggtggggtcatgaaccggagagaggaatactgggtgctgacagaacaactgcgccgggagcccccggaactggagagcgcggtccggcgagggatggaccgcgccaggcggaggcgccggcggccagcggagctgctggccggactggctggtgtgtgcgccgctttcgtggtgatggtgaacgcctccccggcctttgccatctcctgcgccaaggtgccggtcctgcgggagctggccgcggcggtggccttctctcccagcctgcgggcggcggtggagcacgactatgtgcagtatatcggccggacagagggggcggacaggatctccgttactgcggagtatgtcatcgcctccccagccagggcacacctgttctattctgtggagggcggcggccgggtgtcctgggagctccagacgccggacggcacccccctggagggatacagctccgcccagtacagcggaacggccggagaggcggaggaattgcggcacacggagttccatttcagccggggggaactcccggaggagttcctggccgtgtgcaccgtggaaccggccggaccagcaggggaagcggaaaacagggccccggcagtggacgggtctggagaggccggagagccggcggagggggaagctgtggccctcacgttccccatccagctggaccgggacaagatggccggtcccaagacggtggtgatggacacctgggtggagacggacggccagcggctgaaggtggaccagctggaggtctaccccacccacacggagatccatctccaggaggacccggaaaatacctgctggctggcgggggccgagtttgcctttgtagacgggaatggaaaagaatacgacacaggggacgggtatatcactgccaccggcggggaggattcccgctccatgctccactattaccggcagagcctgtatttcctggagggacaggagatgaccctctctatccggaggctgaaatggctggacaaggagcaggagtgggcggacatcgacctggccgccggaaccgcctgcggacttccggaggggactgagctgcttcaggtctgccgggaaggggaccgcaccatcctgcttttccggcaggcggagggagggccggacgcccccttcaccttcctctttcgggacccggaggggacggagcgcacattcgacggcgtgaccacctctgggacagcggaggaggtggacgggaggaagcatgtcgagtatctgtatcacatccaaaactgtgcctgggatcgcatccagatccagctggcacatacagagacggcggaccatgaagacctgaacatcccctttgtcctgccgtgacagaccgaggccgcggcttgagccgcggccccggtctgctgttttagttgaagatgtccggcgtatcggagaacagtgcccgtactcgctccagcacagggcggttttcccccaaggccaggcgggggtcggcggagagcaggtcccgtgccgcctgctgagcctcgctgagcaggcgcatatccccggagagatcggccagccgcagggtgggcaggccatgctggcggcggccgaagaagtcgccggggccccgtagcttcaggtcctcctcagagatcttgaagccgtctgtggtggaggcgaagacccgcagacgggccaaggtgtccgggctgcggttggaggtgaggagcacgcagtaggactggtgccggccccggcccaccctgccccggagctggtggagctggctgaggccgaagcgctctgcgttttcgacgatcataagggcggcgttgggcacgtccacccccacttcgatgacggtggtagacaccaagacctggagctccccactggcgaaggcggacatgacggcctccttctcccggggcttcatcttaccgtagagcagccccacccgcagctgaggaaagatctgttcctggagctgccgggcgtagaccttcaccgccttcaggtccatcaggccgggcggggccccgtccccggtgctctcctccaccgcagggcagacgatataggtctgcctgccctctccggcctgtttgcggacaaagttgtacatccgctgacgcttgctctcccccaccacaaaggtctgcaccgggacgcggcccggggggagttggtcaatgacggacacgtccaagtcaccgtagatgatcagcgccagggtgcgggggatgggggtggcggacatgaccagcacgtggggggaagaggactgcggtgccgcccctttggcggccagcgccgccctttgggccacgccgaaccggtgctgctcgtcagtgatgaccagccccaggcgggcgaagtccaccccctgagacagcagggcctgggtgcccaccgccaggtccacctccccggagcgcagggcggcccgggccgcccgcttttcagccgcggtcatggagccggtgaacagggccacccggacgccggctggggagagcagctggttcatggtgcggtaatgctgctcagccagcacttcggtgggcgccatcagcgcggactgccagccgctttgggcggccagccaagccccccaggcggccaccgtggtcttaccggagcccacgtccccctggaccagccggttcatggggcggccagaggccaggtcccgggcggtctcctccatggcccgccgctgggcctgggtgggtgcgaaggggagcagggcacagaacgcctccaaggggcggggggcaaacaccgcggcggagcactggctgtcccggcggtccttcagaagggtcaggccggcggagaggtagaacagctcctcgaaggtcagccgccgccgcgcctgctccagggcgtcaaagtcctccgggaaatggatgtcccggcaggcccgctccgccgggaccagccggtgcgcggcccgaaggctggccgggagggattctgccccctggccggcgcactgctctactgcctggcggatcagggagaccatcagatgattggagatccctgcagtcagggggtacaccggtacgatgcgtccagtaaagtcccggtccccttcccgctcaaagaccggattgaccatagagcggcgggagccctgctcctggatctccccataaaacacatactcctccccaggctggaaggaatttttcagataggactggttgaagaaggtgaggtagagggtgcctgagttgtctaccaccctcagcttcaccagctccatccccttgcggatgtaggagaggacagggcgctccgccgcaagggcggagacgcagaccttctcccccagcggcgcagcccgaatggaccagatccggcgccggtcctcgtagtcccgggggtagtaggtgagcagatcggcggcccgaaggatgcccagcttctccagtttcttggcccgggcgggccccacgcccggaaaatccgtcaccggtgtgtccagcgtgatggtcatgtggctcccccctcccttttttcatgcggcatggcccggcctgtcagccgggcaggatgtgcctattttaccacagcgaggaggaaaaaagcaaaggaaatggaagcggccacttttgccctgactgcaggggaatcccccttgaaaatcattttaattccgcttatgatgggtcaaaacagccgcagggcggaacagaaagggaggattaccattgaatatggaagaaatggaggctgttgagatcgcctatctgcgcaggacaggcccctacggcccggaaaaccgacagctgatggagcgcctgaaggtattcctgaaggagcggggcaggatggggtccgggaccgtcctgctggggatcgccctggacgatcccagcagaactccgccggaccggtgccggtatgatgtgggcatcatcatccgagagggggagcggctcccactggacacccgcagggtccggggcggacggtacgccgtctttgagatccctcatacggagcgggaggtctcccggttctgggaagatctggagcgcctgaccgccgggctgccggtggaccgcgccagccccgttttggagcgctactctgcagaaaaggtggccctgcaccggtgtgagttctgcatccctctgaagtgagcataggccgtaccgccagaggagggaacgtgccgctcttgccatcaggggagggactggggtataatcaatatcatctgtcttttgaaaaaaggaggctcccccatggctgagtatattctgaatttgctgccggtgacggaggaggaaaaagctgcctttcaggaggcagccccccgggccgtccacgtctgcgccgggcggcgcactgtgacagcggagcagctggaacaggccaccatccttttcgggtggccccggcccgccgacctgagccgcgccccccgcctgaagtggttccagtccatgtgggcggggaccgacgagtatctggcccccggcgtcctgccggaaggggtggtcctcacctcctccgccggctccaacagccagtcggtggcggagcacgccctggcctgcctgctggccctgtgccgccgcctcccccagtgccgggatcagcagcgggagcggctctggacggacccaggaaagatgaagaccctctccggtgccaccgtcctggtggcgggggcgggacacatcggctcctggtttgccggactgtgccgggggctgggtgcccatactgtggggctgaagcgggatgtctcccggccggtggagggctttgatcggctggcggtgatggaggagctggacggcctgctgccccaggccgacgtggtggccctgatgctgccccactccccccagacggaaggactgatggacgcgcggcggctgcggctgatgaaggaggacgccatcctgctgagcatggggcggggctccgtgctggatcaggaggcgctggcggccgtcatgggggagggacgcctgtggggcgccgccctggatgtcacggtcccagagcccctgccccaggacagccccctgtggacgatccccaatttgatcatcaccccccactccgcgggcgggatgcgcctggaggtcacccgggccaactgcgtccggcaggcgctggacaacctgaatcgctggcaggctgggaaacccctggaaaatctggtgcggagatagaaacaaactgaggcgcgctgattcatcagcgcgcctccctgtttttagaaaagtggaccagtcagtcccttcccatgggcgcggcccggtcagcccagcagcagggccgccgggagcaggacggccagaaagagcaggttggccccggtaaagaagagaagataggctccccgcttctgggggtgctcccggacgaagaacttataggagatcaggctggccatggaggcgatcagggtccccagcccgcccaggttggtccccacgataagggcatcccactccgaggtgaagccggagaggagcaaggcggcgggcacgttgctgatgacctggctggcgcacacggcggtgaccagctcgtggccggagatggcctgctccagcagcgagcggaaggcgggtacgcggcccatgtttccaataaagacgaaaaatgcggcgaaggtgagcagcagggaccagtccacccggcgcagcacccgccggtcggcggccaggacacacaccaccacggcggcggtgaggagccacaccgggagcagcttggccacagaggagaccgaggccaggaacagaagcaggtacatcccggtccgacgccggcgcagagagggctccgccccgccgggggccagaccggccaggggggcgctccgccccggcaggagacagagcagcagcatcaggccggacagaagggtgtagggcagcatcagggacagaaaatcccccagtccccggccggactgggcgtaaagatacaggttctggggattgccgatgggggtggccatgctccccaggtttgcagccacagtctgaaagaccaccaccggcaccgcccgctcctcccgtccggccagtgtcagcacctccatggaaaaggggacaaaggtgagcagggccacatcgttggtgatggccatgctggtgaaaaagcacagaaagaccagcacacactccagctggcgggcgctcctgacccggcggagcagctgccggcccaggcggctgaagacccccagctcccgcagcccagccatcaccgccatcaggcagaacagctgggccatggtcctccagtccacataggacagataggccccgtcgggcggcacccacagcatggacagcagagccagcgccgcggcggcggacagaacggcttcccgcttcatcagggaaaacagacgggccagggatatcacagtgctcctccctcccccgccaccccggtcaggtcaaaggggggtgtatattcccgctgggcgctggtccgctcctgggtaaagccctccagccccagatttgccatatattccgccgccgcccgcatctccccggcccggagccgccggtggatctcgggaaattccgccgaccggccccagggggtgtactggctcatcagggagaagagcacagtccctgggccgaactccgccgccacccagtccatcactgccttggcctgactgacctggccggggaggatcaggtggcggatgactaccccgcgggtgagcaggccatccccgtcaaaggcgcaggggccggtctggcgcaccatctcccggatagcggcctgggctgtctgaggatagtcggaggcgccggaataccgccctgcggcgtcgctgtccagatatttcaggtcgggcagatagatctggatctttccctccaaagcccgcagggtgtctacccggtcgtatcctccggagttccacaccaccgggacgggctgagggtgctcctccagcagccgtcccactacatgggcgtaatgggtggggttgacgaagttgaggttgtgggccccctggtccaccagctcgccgcagatccgggccagccgctcaagggtgaccgctttcccgaagccccggtggctgatctcctcgttttggcagaacacacagcccagggagcagcccgagaaaaaaatggtccccgagccccgggtgccggagatagggggctcctcccagcggtggagggcagcacgggccagcaccggcagctccggcatccggcagcggcccagcccacgctcctctgtgcgcagcgccccgcagcgtctggggcagagatcgcagatcatggcgtttcctcctccggtcaaaaatgtcccagcctctcctccaccgccccttgaaagggctggaaggcgttggggacggcgtattcccgggccagggcagcccggtccgcccagacccacccctccggcagcgcgggggagctcgcctccgccgccagggcggacatgcgccactcgatgtgggtgaagatatgcttccccatcccgacgctccggagggaggcaggagcaatgccccagcgggccagggcgtccccggcgggagagagctcgttggggtactcccacagcccggccagaagcccccgtcccggcctgcgccgcagggccacccggttttcgtggaagatgagaaagacggtgcgctcctccaccctccgggccttcttggccgccttcaccggcagctggccggtccggccggtgaggcgggcagtgcagaacgcccgggctgggcagaggtcgcacaggggcgccccgttgggcaggcagacggtggcccccagctccatcatggcctgattgaagtcgccgggggcgtccagggggatgatctctgccagggcggcggtcacccgctttttggtggccggcgcggcgatgtccccctcgtctcccgtgacccgggcagccacccgcagcacgttgccgtccaccgccgggacggggaggccgaaggcgatggaggagatggccccggcggtgtagtcccccacgccggacagggcgcggatctcctcataggtggagggaaagattcctccgtgctcctccatgatctgacgggcagcccgctgcaggtttcgggcccggctgtaatagcccagtccctgccacagcttcatcagtgcgtcctccgggacggcagccaggtcggccaccgtaggcagagcctccagaaagcggcggtagtagtccagcacagcggccacccgggtctgctggagcatgatctccgacacccacacccggtagggcgtggggtggctgcgccagggcagcaccctggcgttctcccggtaccacagcagcagggggatgggcagctccttcagctggtccatagcatcccctcctctctcatcagattcccgggcattatacaccatgggaagaaaaaaggcaacggaacagggcccggttccctttttacatttgaatcgatgggttttaactccatcgattgtaccaaacattgatgcaaacagataaatatgataaagtaaacaaaacaatagattggaatttgtggagcaggatttataatggcgaggcataatgtcgtgagaaagataaaaaatcgaacaacgattatacttgtgatgcttctgatttcaattatggtcagttgggtgatttggggaaatctgtcggtagaaacaaccaaattaacagtaacatctaaagacttgcctgaagcgtttgacaaattttctattgcccatatttcggatttgcataatgcagaatacggaaaaaataatgaaaagttaattgatatattagaggcagaaagcccaaatataatcgctattactggggatttgatagattctaaccatacaaatcttgaagttgcattatcttttgctcagcaagccgtaaaaattgctccttgctattttgtcacaggcaatcacgaggcatggatcggctcacaatacgaagagttaaagacatcattacaaaatacaggaattactgttcttcaagatgaagccatcgaattgaactatggtgatgtgtgtattcagctaataggattaaatgaccctgatttttcagaacgagaccgtcttttatcggaaagtattttggaagtaaaactttcgcaggtaaatattagcgatggctttactatacttttatcgcatagacccgagtattttaatgtctatcaaaataaaaatattgacttagtattgtcgggtcacgcccacggtggacaatttcgattgccattggggggaggagttattgctccaggccaaggacttttcccgaaatatgacgcaggagcctatacagagaatggaacaactatgattgtgagcagaggtattggaaacagtatcattccggtgagaatcaacaatccaccggaaatagttattatagagttgaactgtggatgaataagtctgtatcctgattttaaacattagcatcaggaacacgaaagaaagcgggagaatatataaattctgctttatcaattagctgccaactacgaatatacctcccacgtcattttgacgaagggaggttatttataccccaaatcagtccaaagggtaaaagggaggggcccggaatcatttttgatcccgggccctgtgttcaggtcaggcggaggatgctggccgcctcgatcatggcggcggcgaacaggagcaggaagcccaaagcaaggaccagcccatcctgacgggacaggcggatatcccgcagccgtccgacggtggtccggccccccagggtctggacgaaagagatgtccgccgttcccgaggcgatgcagcagaaggcggacatctccaccatgccggaggcctcgctgatatggagcatgcgcagcagccgggccgcgaaagggggcgcttctccgcccatttggaaggaccaggtgcccaccatcagcccatagagcaggaacagcaggaggagacaggagtagccgcaggggatcaggggccccccctgcggtcccctggcgaagaggttggcccccacgaggacgcaggcaaagatcaggttgaacccgaagatctggagcccgcccacaagggggcgggaggagaccgcccagttccacaggggattggcgtttttcaggagcccctctgggagcagaggccagctgaggcaggccgccgccagcgtcagggccatgcctgccccgaacaaagctgccgcccggagcagggcgttgggctgggtgatccagcgccggatcacattcacggctccttctctcctttctgatgggtcagcaggcgcgccatatcctccggaagggggagggtaaaggacagctcctgcccagtgacgggctgccggagggacagctgggcggagtggagggcagggcgggagatcagggaacggtcctcgtacccgtaaaggaaatctcctgtcaaggggcagcccagagaggccatgtggacccggatctggtgggtgcgcccggtgtccagctccagacggaccagggaacgccccccggagcgggacagggtctcataccgtgtgcgggcgtccttgccgtcggggcggaccatctgctccaccagggagccctcccggggccccagcggggcgtctaccacaccggaggggggctgaggcccgccgtcgcacaccgccagatagacacggcggaaggcgggggtgtggagctgccccttcagcacctcctgggcgtgggggtgcttggccactgccatcagcccggaggtcccccggtccagccggtggacggggtggaaatctccttcaattccctccgaattgtaataattcagcaaaaaattacctatcgtatcattaaaatgtccggggccggggtggaccggcacccccggggccttgttcaggatcagcaggtccccgtcctcgtacacgatatccaggggacccggggcgggcaggatgccgctgcgccgctccgggtcggacaggcggacggacagagtctgtccctcccgggggcggaaggcggtattcacccgggccccgtccaccaggatgccgtcggggagccacttgatccggcggatcaccgtgccggacaggtgcagcctccgccgcagcagggtgtccaccttgacgcccccgtcctccggccccaggaccagctccaggcggcgggtcttcctctgtatctgttccatcccgccaccctcacatccgcttggacagccgggcgcggaagatggccagagcggaaaagtagaaaaacagcacgatggacagggtcagggagacatccgaccagccgagccatccggccgccaggagaccgaggaacagggcggtctgggtagcccgggcagccttccacacggcccggagctcgatctcctggctgcgctcgtcgtcgcgggccacccgggcggagcgcagctcctccggccgggcgagggtgtgccagctccccgccatcatgctgaagccgaccagaaacaggcagaagatcacctggccatacacatccgccgccctcccggtgagttgggcctgaaggggaatgcccaggagcagaagcagcagggcggcggccaggagcaggaggcccagacggcctgaccggctcacatcacggcggtaggactggtcggcctccgtctgggggccggctctgcgggcctgccaggtccgctccatagcctccggctctgtaagcagagtctgataccggccccaggccctgccccctagcacggcggtcccgccggagaggacaaacaggcagacccagacggcctccatcaggggcggcccgtcaacaccccggcggaggagcagcaccgccccggcgatgcccaggaccagggccaggatgctgaggacatagcggcggagcaggaaggaccggaaggcggcgcgctcctcctccgtcatgggtggaattgggtttggacaggacacagggcttcctcctttccaggataaagttctcaccgccgccgggccagggcggcccgggcgccgaggaagaacaggatgtaggccagcatggagcccagcagcaccttcaccagcatcgggtccactgccaccaggacaaaggcggccagggcctggagaaaaaatgtcgccacccccgccagctgggccgcctgggcggtgagacgctggctgcgctcgtcggtctcctgaatcctggcctttttccaccgctccgggtggcggagcatccactcgttgcgcagcaggttggccagtgcggcgccggtgatgccgctggcgccccccagataaaagcctcgggcgtggccgctgatgccgctgccgggcaccaggaagaaatagcacaccaggcccgtcgcgcccaccgccaggagggcgaggaatgcccagcggcgctggatcagattttttccatagtcagggccccgtccggtcgtttttatgagcatgatttttcctccttacagctttttggcccagcggcccatattgaccatataaaagacgcagtggaggaccgttacggcggaggagagaaggatccaaagcgtctcctcccgcaccagagagatcacaaaggggacccacagcaggtacagggtccagtaccagctggactgagcggccttctcccggatggcgatgttgcgctcgtcggtctcgctgcgctggagctccttccgctcctggggggacatgtgccgctccacggcgcccatgatcacgctggagccccccaggcccagcagggctccgcccatgccgcacatcaggccggtgatcccgccgggcagatccagcagggcggccgccgccatcagggccagcccgcccagcgcggcggcggcgagcaggatcggtttcagcttcttcatgtctcttcctcctcgaacagaaatatctcctcaatggagctcccgaaatatttggcgatcttgtgggccagcagcagcgaggcgttgtagcgcccgttttccagggagatgatggtctgccgggtgacctccacagcgtcggccagctcctcctgggtgatgcgccgctcctttcggagctgagcgatgcggtttttcacggcggtcctcctcacgcaaaaatgtttagcttgctttacatctagagtatagcacgctttacattttgtgtcaagcaggctttactattttgcccttcttttttctggggaccagatcttggagcacttctggggcggaggagggaagagcttgccccgcccgcctccatccgcaggatgctcccaaaagggtcccgccccgcagggcgggaccgccctttcatgccagccccggcggcggggcatatttgatgaaaaagtgccctcccttccgccgcctgccctgtccgggtccacaaaatttctgcctgccccttgcaactgggctcagctccgctataatacctttgagatcataaggagggcggccccatgagacagagacagaccggacaggcggacaagctgggcatttacatccatatccccttctgccggagcaagtgcgactactgcgacttctactccctggcggggcgggaggaccggatggacgcctatcagaaggcgctgctggcccacatccgggagactgcgcccctggcccagggcatcccggtagacaccatctatttcggcgggggcacccccagctggtacggggcccggcgcatccaggagttgctctccgccctgagcaagctttttcaggtggagaaggacgcagagatcacggtggaggcaaaccctgacagcgtggacctgcgtgccctgcgccgcctgcggaaggcgggggtcaaccgcctgtccctggggatgcagtccggctgcccccaggagctggagtccgtccaccgcccccacaccgtccgacaggtggacgaggcggtggcggccgcccggaaggccaagctgaacaacgtctctctggatctgatctacggcctgcccggccagaccatggacagctggaaagctacggtggagcacgccctgtccctgatcccccagcacctgtcctgctacggactgaaggtggaggagggcacccctctggcccgccgggcggcggagggggagatcctgcccgacgacgaccagcaggcagacctgtacctctggaccgtgggccggctggagcgggccggctacccccagtatgagatctccaacttcgccaagccgggctatgagtcccggcacaatctgcgctactggctcacccggccctatatcggcttcggccccggcgcccactccgacttcggcgggcggcggtactcctttgtccgggacctggaccggtacatcgacggcgtgctcaagggcggggagatcatcgacagcgaggagctcatcccccagcgggagcgggggggcgagtacctgatgctccggctgcgtaccgcccagggcgtcgaggagtgggagtaccgcagcgcctatttcatggactttgcccccctggagacccggctccgccagttccaggcccagggctgggcggagcaggccggcggccggtggcggctgacgcccaagggctttctggtgtccaatcagctcatcggcgacctgctggagcggcaggaggagtccagcctggaccagctgctcccccgggccagggcccgcttttccggcagccaggatggtccctttgtggattctgtttaagaatcgggaaaatgtttccggcctttggaccgattttacacacttttcacgcaaatgtaattttatttgccttttggatataatagtgttacaatatagttgtatcagaccgcccacaggcgggatctgtttagactacttatggcattttgccgtatagacataaggacctcattacgtttgaagagggtgcagctttgaccaaatatttgattgagggcggacatccgctccatggaaccattgagatcagcggagccaagaacgccgctgtcgccatcatccccgccgccctgctggtggacggggtctgccgcattgaaaatgttccccagatcagcgatgtgaccctgatcctccagatcctccgggagctgggggcggacgtgcgcaccatcaaccgcaccacggtggagatcgactgttcccacattcggaaccgtcaggtcccctatgagctggcccggaagatccgagccagctattatctggtgggggccctgctgggccgcttcggctgggcagaggtgcccctgcccggcgggtgcaatctgggcggacggcccatcgaccagcacatcaagggctttgtggccatgggggccgaggtggacgtgcgcaacggcctgatctatgcccaggtccccggccggggctgcctggccggcgggcaggtctatctggacatcgtctccgtgggcgccactatgaacatcatgctggccgccgccctggcggagggcatgaccgttatcgagaacgccgccaaggagccccatatcgtggacctggccaacttcctcaactccatgggggccgacatcatgggcgccggcaccgacgtcatcaaggtgcggggcgtccagcgcctgcggggcggctcctactccatcatccccgaccagatcgaggcgggcacctatatggccgcggtggctgccgccgggggcgagctgctggtgaagaacgtcatccccaagcatctggactgcatcagcgccaagctggtggagatgggggtggatgtggaggagcaggacgacgcggtgctggtccgccgctccggccccatcacccgcaccaatgtgaagaccatgccctatcccggctttcccactgacatgcagccccagatcgccgcggtcctgtgcctggcccaggggaccagcgtgctcaccgagggcgtgtgggacaaccgctaccgctatgtggacgagttccgccgcatgggggccaagatccaggtggacggcaaggtggccgtcatcgagggggtccccgccctgaccggcgcgccggtccacgcctgtgacctgcgggccggggcagccatggtgatcgccggtctggctgcccagggcaccacggagatcgacggggtgtaccacatcgagcggggctacgagaccctggtggagaagctgtccggcgtgggggccaagatccaggtgctcttcctgcccgacgacgaggcccagacccaggcgggctgacctttgcacatgctccgggcggcggcgatctgccgccgcccgttttcgcgccctggggggcgccactctttctccgggaggcggcacatggaagtgtgtactctggccagcggctccagcgggaattccctgctgatctgctgcggttctacttatgttttgctggacgcgggcatctccgcccgccggatcacctctgccctgaaggcgctgggggccgatcccacccggctcagcgcggtgctggtcacccacgagcacaccgaccacgtctccggtctggccaccctgaccaagcagctgggggtgcccgtttacgccaccgcccccactctggaccgcctggagcgaaaagtcccagcactggcgcagctgggccgggcgctggaggccggcaccggcttccagctgggggaattgtgggtggagtccttctccaccccccacgacgccgcgggcagtgtgggttacgccgtcaccggcggcggggcgcggatggccctggccaccgatctgggccacctgaccccccaggtgtgggatgcggcgcggggggcggacctgctggtgtgtgagaccaatcacgacgaggactgggtccgctccggcccctatccctacgccctgaagcagcgcatcctgggggacttcggccacctgtccaatgaggcgggggccgagctggccggccgggctgccctggccgggacccggaccatcctgctggcccacctgtcctccgagaacaataccccagcccgggcccgagaggtggtctcccgccgcctgtccgccctgggggtgcggccggaggaggacatcaccctggcggtagccccccggtcggagtgcggggcgctgtaccggctggagcggggcggagctctccgggcctttccggcaagggaggcatccctgtgctgagcgtctatctgatctgtgtgggcaagctgaaggagaaattctatcaggaggcctgtgccgaatacatcaagcgcctgtccccctactgcaggctcaccctggtggagctgcctgaggagaagctgccccaggacccctctcaggcgcagatcgacgccgccctggagaaggagagccaggccatccgggccaagctgccccccagcaccagcctggtgtgcctgtgcgtggagggcaggctgcgctccagcgaggagctgtccgctttggtggggacctgggagcacagctccgccaagcacctggcctttgtcatcggcggctcctacggcctggcggagcgcctgaagggggagtcctgggtcaaactgtccatgtcccccatgaccttcccccaccacctggcccgggtcatgctgctggaacagctctaccgggccttcaagatccgggagggctccagctaccacaaatgacagggtcccgggcctgaaaacatgctcaccgtggatccgtccaaaaatccgctggaaattcatgcctgcctgtggtacaatgtccacaacagcatgtcccagcggattttattgattggaggtcctacgatatgtcctatcttgatgcttatcatgcatggctgaacagcccggccctctcggccgccgagaaggcagagctggcatccatccagggcgatgacaaggagatcgaatcccgcttttttgatcagctttccttcggcaccgcgggcctgcggggcaccatgggggtggggctgtaccggatgaatgtccatgtcatccgccacgccacccaggcctttgcccaggtcatcctggaggaggggccccaggccgccgccaggggggtggccgtctgcttcgactgccgcaacaactccgacgtctttgcccgggaggccgcctgtgtcatggcgggcaacggcatccccgtgcgcctgttcgagtccctgcgtcccaccccggagctgtccttcgcggtgcgggagtacggctgcatcgccggtatcaacgtcaccgccagtcacaaccccaaggagtacaacggctacaaggtctactggcaggacggtgcccagctgccccccaagcacgccgacgaggtggcccggaagatgaaggagctggacgtgttcgactgcgtcaagactatggactatgaccaggccgtggcccagggcaggatcacgctgatgggggcggagacggacgagaagttcctggccaacgtgatggagcaggtgaacgacaaggcggtggtggagcagatggcggacaccttcaccatggtgtacacccccttccacggcaccggctataagctgatccccgaggccctcaagcgcctgggcatgaagcacgtgatctgcgtgccccagcagatggtcatcgacggcgatttccccactgtggtctcccccaacccggagaacccggaggggttctatctggcggtggagctggccaaggagcacggcgcggacttcatcctgggctctgacccggacgccgaccgggtgggcatcatggtgcgcaccaaggaggacgacttcgtggtcatctccggcaaccagaccggcgtgctgctgctggactacctgatcggggccaagcgccgcaccggcaagatgcccgacaagcccgtggccctcaagaccatcgtcaccaccgagatggcccgcaaggtggccgaggtcaacggcctgcagtgctatgacaccttcaccggcttcaagttcctggcggagaagaaggacgagctggagagctccggtgcggggaaggtcatcttctcttatgaggagtcctacggctacatgctgggggactatgtccgggacaaggacgccgtctccgcctcggtggagctgaccgagatggcggcctggtatgcctcccagggcatgaccctgtatgacgccctccaggccctgttcaagaaatacggctactatggcgagcgcaccatgaacctggtcatgcccggcctggacgggctgaagaagatggctgacctgatggccggcctgcgggagcagcccccggcggagatcgccggtgtggcggtaaagcagcagaaggactacaaggacggcagcgtggtggagacagcgaccggcgccaggtctcagatggagctcaccggttccaacgtcctgcgctatgagatggccgacggcaccagcctgatcgtccgtccctccggcaccgagcccaaggtcaaggtctatatcctggccaacggcgctgacaaggaggagtgcgacggaaaggtggccaagtacgccgcctgggccgagagcctcaaagactgaaaagacaggccggacaccgggcccgctcctttggagcgggcccggtcagcttgtggaaagagccgtcccgcaaggagttcctgcacccgcaggcggcggaataaaattggatcacatcatttccggggacgtgtatctgggaagtggcgcctctcacgcaggataggccgcctccatgatccctggacatcctgcacaggcggggtagaaataggcatagttctgctttacttccataatttgtattgaaacgtctcacaaaaagctctttcccaccggttttgagcgggtccggatctgccgggcccagtcaggacaggagggattttttatggcaagcggacagactcagtattatgaactgaatcaatgggaggctgcggaccaggtgctccggacggagtttaacgcggataatcaaaagatcgacggggcgctgaaagccatgcgggatctgatcgtcagtcccagcgttctcaatgcggtactggataagctgcgcagtgatatcaacgccctgtctgcccgggtggataagctggaggggaagtgagagagccccccggagcaaatgctccggggggcttatattaggataccaaaaactcgtctagactcttagcccttccagacaaactccacggtcacatcaccggtgggattgctgatggtaccagaccagacgggagccttagcctccttggtcacccaatacacatcggtagcctgagtcacattcgtgcactcagtctggcactgcttatcagtgtaaatcttaccgaactggttctggagaaccttcagctcagccacggtagagatgttggctgtatcagtctcctgagcccagccatcctccttggtgaaggagaaatcagcgccggtcacctttacttcgaatttggtggtgcccacccagggagtggtcagttccacattgatttccccgccagtagtgatcttctcgggagcattcaccttggtcagctcacgctgatctccactgttgttgtcataccaatactggggataggtcacagtgtactcgtcggccttggtcgccacattgatgacgaccgtctcggtgccagcgggaacgctgacagtccaggtgccgtcgccgttgctcttgatcttggcagcctgagcgcaagtcacatcggtgatggtgtaacccttctcagcagtcacggtgatgtcagcggcctggttcgcagtaatgcttgtggggttggcaacagcatgaccctcgaccttgacgctgagggtgtcagcgctagcggtagcggtgatggtggtatcagaattggcagtcaccttgccggaagcaggggtagtcaggttgtagccctccttggccttagcggtccagttgagctcagtgcccttcttaacgctgatgctgccgttctcagtgtactccacgccgttgacggtcacggtggcgttggtcagcgcgagagtgaccttcaccatctccaccacgggcttgtggataatgtagacgagatccgcggtgttgtggtcgttgctgtccttcacgacggtgacataggtcatgtagtcgaacttcacgccgtcgtaggtctcctcttcggtgcccacatacatgtccttcacatcgccgtcggtaatggtgtagtcgtagcccttggacagattctcaccgttcttgggctccacatccacatagacaaagacagtgtcatcgtccacgtcatacttcaccttagcatcctccacggtggtcagccagaaggcgccgtcgccgcgggcgttgacggtgttgtccttcagctccacatcctcaatgccggtgatgtacttctcatccacggtcttggtggccttgtacagatggccgacctccagggcgcccagatcctggtccacgtacacggactgcttcacgccgttgacataggcgttggtgtactcccagtagtagtcgccgtcgtacttcagggactcgcgggtggtcttgctgagcatgaagtaggtgctggcgctgtcataaacatcgccgtccacgatgaagacgatctcagccacattgccgttcttggtgctcagcacataggccagggtggcattgtccacatcgggcacctcattgtagccggtataggcggtctcgccctccacgtccacaaacacggtcttcttgtccacgatgaagtcgttcttgccgtcggagatataggccttgccgttgttgatctcggcgttggtcatggtcttagaatccacagccttcagggtgtagatcttgtcctcacccacggtgtaggcccagaccttctcgtcgatgttggtcttatccttcttgtcctggtccttatctacccagtcgatcttgaccttgtccttgccgtccttgtactcatcgtccaggtcggccttgacagaggtggcgtcagccagaacgaccttggcgacccagtcacgcagctcctcgtcggagtccttcacgtacaggtactgggtgctgccggtctcctgcacgaagcccagcacatagccgttgggatccagatacagggtgtactgctcgttcagagcggggtgggccttcacgttgtcgtcgtccagatcatagacgatgtggccgtcgccggagtagctgtacttggcaccatcggccagcttcagataggtctcgccggtctcgcccttgccggtctcggcgtccttatccttttccacgcgggtgacctcgccgttgacggtctcgggagccatcagctcgcagatgtagaagtcctcgtcctcgttgtagtccacggtgaagacaacgtagtcgtcctcctcatagccctcagcatagaagtcgttgtcgtccagcttgggctcggtggagatggccttcacggtgacatactcgcccttggaatcgctcttcaccttggagacctggcccagatagtaattgatctcgaccacggtcacagtggcgtcggcgtcgtcgatgtagatctcggtgacggtgcccttgccggtgtacttccaggtggagtcgtccttggaggtggggatgttgtcatccacgtccttatcttccttgccgttgacataggcagtccaggtgtagccctcgtccttggcattgtcgcgcagggtgcacacagacttgcccaggtccttgtagacctcgtcgatgtcctggccggaagtataggtgtaggtgggggcgttgggaacagtaatgatctcgtccttgtccagcatgcggaccttggaggcgatcaggccgccgttctcggtcagattatcggtcttgctggtgctgccggcctcggtcttgacgttgtaggtgccggtgccccaggtggtggcgggacggccgtagatggtctcggtgtcggtgcggtacaccaggtcgaagttcttgtagcccagggtctgcaggtagttgaactccagggagtagatgatgccctggttctcgttgtagtacacacccagcagctcgttgtactgaacaggcacggccttggtcagggcgttgaacaccagctcagccacgttgtcgcgggtcagcccggcgttggcggtgagcttcaggtcgccgtacaggcccagagcggtgcccttggcggtggcggccagcatccagtcactgccgaagtcagcggcgctctggaagtagcccagggcgcggcacagcatcagcacggcctgcgcggtggtcacggtggcgttggggtcgaacttgccgtcgcccacgccggccacgatgcccaggctggagcacaggttcacatagccctgcgcccaggcggggacgtctgtgaacacattggtctccgcgaactggttgacgttcacaccggcgccgtacagcatggtgcagatgatgaccgccatctcggcgcgggtgactacgttctcggggccgaaggacccgtcctcgtagccctcgaacatgccgatggcagaggtgaccgccacggcatcctgattgacgatctcggccttgtcggtgaaatcgtcgatacccttagcgctggagcccacgaccatcatgcccaggagcataacggaagccagagccaggctgagagcacgcttcaggtttctcattggatattcctcctttttatattgacaaaagtcgctgttttctgacaaaccgggccttttctagaacatttcggcccactatgcctgtacaacacttctgacacaggaggaattggttataaaaaggggaagatcaggggaaaaatccccgagatcacgcctaaaaagtttccctggtagacatttggtagacacatgaaaacagaaggggcggcgaggccctgaaactccaggcccccgccgcccttttttggtagacttttggtagacattttgcttttttacatttcaccgctgcggcacttccctccgggatacccccctgctttgccggcagttctcagcagccatggatcaaaaaattttcagggggtacttgacatggagtggactccaggtgctaatctgttatcaggcggtcctgcgtgagccgctgtctaattgcagcaggaggcggtttctatgactattgcggaggtcagcaaaaaatatgagctgtccgcagatacactgcgctattatgaacgaatcggcctagttccccctgttccccgcaataaaagcgggatacgagactacgatacagagtcctgccagtgggtcgagctgatgaagtgcatgcgttccgccggggtacagatcgaggctctgatcgaatatgtcgccctgttccagcagggggatgagaccatcggtgcccgcaaggctctgctgatagaacagcgcgatcagcttgtggagcggatggcggagatgcagcgctctctggaccggctgaatgacaaaatcgaacggtacgatcaggggctgatgaccaaggagcatctgctccgtcatctccagtcgcagcagtcccggccagactaaacctggaactggataaaatgcaggaggacatccctatgaaacatgagatcattcacacaatttttgaacgcggcggtgagaatactgcctttgcccagtattttgtgggacagagctatctgaatatgctctccacccagggagtagccatcggcaacgtaacctttgcgcccggctgccgtaacaactggcacatccaccatgcctccaaaggggggggacagatcctgctgtgcactggcggccgggggtggtaccaagaggaagggcagcccgcccgcgcgctgcgtgccggggacgtggtccatatcccagcaggcgtcaaacactggcatggggcggaagcggacagctggttcatccatctggcagtggaggtcccaggggaaggcacccgcaatgaatggtgtgagccggtcagcgatgaggaatattccaaattaaacttattggaagcactttgagcatcttctctttctcccgttcatgcttgcgttccctctcttcctctggtataatgagcgcagtatcctccccccgcaacgacgtatgtaaattgaggtgttgtaattatgagaaagagaatcgttttttcccttatggcaagtattctgctcctgctctccgcctgcggctccatccccggcatggaggggggaagctcctccggcggcagtgccagcagcagcgacggcacctaccatgtaggcgataccatttccaccgctttctttgattttacagtcaacagcgccgtggcctccgccgatcatgagggttacactgcccaggacggctataagctggtggtggccgatttgactatcaagaacaccgagacttattccatgccaatgggacaatatgattttatgatcgcctggggtgacggagatgaggactttgcctatcctctgaaccagtattgtgagtcccaactggctgatgagtatgagattcccattgccggcagtgcggaaggctctctggtctttgaggtcccctctgatcagaaggactttgctctcggctttgaggagtactatgaggatgagtccgtcggtgatctgtatgtggtgtactttaccgctgaataaggaatcatttcatgtattttgatacccatgcccactacgactccggggccttcaacgccgactggaaggaacttctggcctctatgccccagaagggggtggagctgatcgtcaacccgggctgcgacctggagagctcccgcaccgcagtggccctggcagaggaatttccccatgtctacgccgcggtgggggtccacccctccgactgcggagaatggggggaggggaccctgctggagctgcggcagctggcctcccgccccaaggtgcgggccatcggagagatcggcctggattactactggaaggacaacccgccccgggctctccagcagaacgtgttccaccgccaactggagctggcacagtccctccgcctgcccgttatcgtccacgaccgggaggcccaccaggactgcctctccatcgtgcgggagcatccccaggtcaccggggtgtaccactgctattccggcagcctggaggatgccaaggtgctggtcaagcttgggtggatgctctcctttacgggagtcatcacctacaagaacgcccgaaaggccctggaggtcatcgactggctccctatggaccggatcatgatcgagactgactccccctatctgacccccgagcccttccggggcaagcggaacgactccggctatgtccatctggtggcagaggccatcgcccaggtgaagggggtccccccggaggaggtcgctgcggtgacgctggaaaatggccggcggttttttggcatttcctaaggtgacgcatcaagcaggggccgccagaacggcggcccctgggctattttaaaaaaaggatgttttctcatgaccataacctacgagtatgaagacgccctctatgtgaatctcaccaacaagtgcaactgcaactgcgaattctgcctgcgtcacggccggaaggaaggctccatttatacggaggactccctctggctggaacgggagcccacccgggaggaggcgctggacagcttcctcagccgggacgtctgctcctaccgggagatcgtcttctgcggctatggggagcccacctaccgcctggacgatatcctctggctggtagaccagctgaaggagcgtttcggccgaaggctgccacctgtgcgcatcaataccaacggccacgccaacctgatcctcgggcgggacgtggtgcccgagctgaagggccgcatcgacactctctccatctccctcaatgcggtcactgctgcagaatatacggctctgtgccatcctgctcagggagaggcggcctatcaggctatgctggactttgcccgggaggccacccggtatgtcccccatgtggtgcttaccattgtggacaaggacaagagctcggaggagatcgagacctgcaggcagatcgccgctgagctgggggtgaagctgcgtatccgcagcttcatcgactcctgaggtgttgtccggccctgcacccatgcaataaaagaggctgtccatcccgccggggtatggacagcctcttttactgtgatttttacgccgtcagctccagctcctccagcgcttcccgttcattgtcggccgagaagcaaaaccggccggcccagtcgtagacctccacgtggccccttacccatacgatgttataatccatactgtcttgctcctttccgttttctgtgctctcagtatagcggaaaagaagtcctataaaccggacttttatcgcggcggaggaagagagtattttgttttttgcaggacgtcacggggacatggtcttacaggactgtcctctcttgatgctcgcgcagggacagacttggtccttcacgccggtttcggtccggcgcggggaaaggccccccatccgtcaccgctcacgccgtgccaccttcccccaggaggggggggggaggggcttgagggcagctctgggagccgcccttatatggcaccttcagtcacttcgtaggggcgcgcattgcgagcccgccagcttcctaccgccccctgttctgccagggcaggcgcaatgccgccgtggggtgtgcacgccatgcgccccctcccaagcgcaaaagaagatcggctgaacttgaaaagttcagccgatgttctttactcctctacgtagtcgtcatactcggagggacagccggttttctttctcagcttctctccggcgcagccgcagaactccgccaccttatcccagtaggcgatgaccgcgcataccacggcggcggtggtaagcgacagggccacgatcttcagtacgaaacgggcgaccttcataaacgggatgcctccttttccggtgattcgtgtctctagtgtacacgattctttggaaaattacaatcgtttttccaaattttcatgtgcccttttcttccgggcatcagcgggacagcacgaattgatactcatcggcgatatagttggggatgctgtacagcaccgccaccgcgtcgatgccgttgtcctggatatagccctggatgctgctcaggttatacctggggtcaaacaggtggatctgggagaagctctgagtcaggaagggggtcagactgtcggagtaggagtcccggatcagcagcaggcggggggcgtcggtcaggccggtctccaccacgcacaggggctggacaccccccagaaagtaggagtatttgtcctttacttccagatagctgtccacatagaggcttccctgggatggggtcccgtcaaaataggaggtcaccttcaccccatccgccgggatgtaggtgtcgatccggtccggggccacccagcgcaccccggaggcggagaagatggtcccatagaactggtcggtcacagtcgtcctctcatagtccgccagatccaccggctccatccccatggcctccatcagggcggtgtagccgtaataggcgcccaggctggtccagtggtggtcggtgcggtagtagagctcctccccgctgtgggcggagaggacggagagcagatccaccgtgcgggccgcggtccggctgtaaagggtctcgatgatggccgcctcgtcggcagtgggggccccgtcagggagccggtcgtgccacacctgggcggcggaggggatcaggccgaagtaaaccggcaccccggcgttgctcaccagctggtccagatactccagattctggtccagctgctcccaggtctccccgtcaggctcctccactcggttgatcagggtgtcctgggccgcaaaatagaccccgttgttctcctgcttgccgctgagccgctccccccacgcctttgcggctacccagaggtcccggcctgcgatgtggtcgctgacatacttctctgaattctccatgaatttcccatttttcacggtctctatgctcagctccggcggcttctggaggaagcggttctccatctcagagaactcctccttgggcagcagggcgctgatcaccaggacgccccctatgaacaccgtgaagagcacggtgagaaaaatgctgtacgctttggtcatgatatctcctcctcagaaccggaagtacaggaaggggttataggtcccgtccaccagataggcagtgcacaacaacagccctgccaggatcagtaccgcccccaggatatgggccgtgcggacattcagcctgcggtagaccgccgcccccagcggggtggccgccagggcagagatgcagaggaccggcagatagttggccgcgtagtacttgaaagccccatcgatcaggggcacgcctcccagaccgaacatcaccttcaggtactcccccagctgtccgaagtcctcgatggcgaagatggtccagctcaccagcacaaaaaacagggtgtagaggtggcctaccgcaccgggggcccgcttcagccaccggagcaggacaaatttctccaccagcagcagtacccaaaagtacaatccccagagcacgaagttccagctggccccgtgccagatgccggtggccgcccacaccaggaacagattcaggacccaccgccccttggagcagcggttgccccccagaggaatatacaggtactcccggaaccaggtggacagagagatgtgccaccgccgccagaattcggtgatgctcctggagatataggggtagttgaagttgcgcatgaactcaaagcccagcatccgtcccaagcctaccgccatatccgaatagccggagaagtcaaagtagatctggatggcaaaggccagcacgcccagccaggccccggccacggtcaggtcccccggcgccatggccttgtagctctcccacagcatgcccacgttgttggcgatgagcaccttttttcccaggccgatgacgaacatctggacgccggaggcaaacttctccacggtgcaggtccggctgtcgatctgatctcccagatccttgtatttgatgatagggccggcgatcagctgggggaacagggtaacgaaggtgccgaagttgaccagcgaccgctgggcccgggcgtccccccggtagacatcgatggtgtagctcatggtctggaaggtgtaaaaggagatgccgatgggcagatggacgttcaggaccggcatgaagttcagccccaccgcctgaaaggaggcggccaaaaagtcccagtatttaaaaaagcccagcagcgccaggttgaaaaacaccgacgacgccaccgcccagcgggcgcctcggtcgttgccccgggccttacatcgctccaccagcatcccatgggtgtagtcgatcagggtggaagctaccatgatgaccacatagatccgctcgccccaggcataaaagaacaggcttaccgccagaagggccaaattccgccccttcagcgggaccgcatagtagagcagcaaggtcagtgacagatagacaaacagaaacaggggggtggaaaataccataagagagtcctcctcaaagcgcaggcgggcgaaagctcgcccgcctgcggaatgggtgcttcagattcaaaagagcgcgttgaagtcgtctgcgatggcatcgcactgctcatggaccaccatcaaaatgtagtttccgttggacaccacccgggagcattcggtccagatacgggtgggctcgggataccaggcgccgccgttgatcatgccatcgatccgggcctggaggatggccttcaccccatccacgtccttgctgtccgtaacctcgatcagggccagttcccccatgttcatgctcatctggttcacatagaccagcatctgctgggaggagacggcgctcaggccggggtagaagatatccatcagctcctggtcggcctgctgcatgaaggaggggaactcatagtccccggacagctgggtataaaaagcggacaggtctgcctggtccgccgcgggcgcctgggaggagctgcctccattcccgctcccctgggaggagctgttcccgccgccggaaacgggctgatcctccggcagcttgcagcggacggtgcaggaggcacgcagctccgtcccctccacagcggcggtgatggtggctgtgccccgggccactgcggtgacggtgccgtcctgggacacggccgccaccgtctcatcgctggaggtccaggtcaccttgggggcatccaccccggacactgtggccttcagctgatagctgctcccggccttgaacagggaaaagtcggatttatccagcgccagcgccgctaccgcctccggctcgtccaccggaggctggggggcctccggtgcgctctcccccggtgcgctcgtgtccggggcgctggcatccggcagggagacgtcgggctgggaggcgtcggggctcccctggctggaggaggtgctgccgccaggctgggaggtgctgccgctctccttggggccgcagccagagagcagggagagggaaaggccaagggccaaaaacagggcaaaggtgcgatgcttcatcatttcagatcaaactcctttttagggggatcgatccgcctgggatcgtcttaccctacattggacgacggtcctgcccaaaaagttccccctgatctgaaaaatttttgttccccgcctcagcggacccaagacaccaggttcccggtcttctcccgggggccggggaagtccacggcgggccagcccagggccagtgcggccaccggcatctcctccggcgtcacgccgatctccgccagcttctcctggacctcccggtcctcccgggtgcggtagagctggttgatccagcaggagcctactcctaaggagaaggcggccagcatcatgttctccatggcacaggaggcgtcctggacgcaggtggtgctctccttctggttggtcaccagaaccagcaccggggctccatagcggaagtccttgtcccggtagttctccatcttgcggctgaccagagcggtgaggtctgccaaataatttggatccgtgatcacataaaaatggttcagctgcttgttcatcccgctgggcgcgaaacggccggcctccaggatctgttggatcaccgcctcctgcagcggctcgggacggtaggcccgggtgctgcgtcggtcgtgcatcagcttcaacatctcattcatggaacatgctccttttctccgtcattctgtccccggcgtccgtttttggccctttttcgggggcagccctcattatatcagccttttttccaaatctccaccggtatttggaaaatttaaaaattcctcttgacaaatgggctcccttgtcatagtataatatatgaacaagcgctcatatgtttaaacgttagaaaggagaccgctatggaattcgtcgatcactgtgagatcacccaggtgcaccagggcgcggtggaccaggtccgtcaggtcctgccgccggatgaggtgctcagcgacttggccgacctgttcaagatcttcggggattccacccggatcaagatcctctacgccctgctccggtccgagctgtgcgtgtgcgacatcgctgatctgctgggactgacccagtccgccatctcccaccagctgcgggtcctgcggagcagcaagctggtcaaattccgccgggatggcaagaccctctattattccctggccgacgagcacgtctgccgcatcatcagccaggggatggaacacgtggaagagtgagcggtggctttccttcattgcggatcacgtttgcctatgccctggccgaagagggggaccgccgggcggtggcggaggagaccgccgtgccagcctgctgcgcctttctggagggggcggtgcctccctccaaccgtgttccgtcccgtccagctgtatcccggtggactcagcggtaatgagaccatgacccatcaaaagttttgaggagtgttgaagatgaaaaagacgttcaaactggtagatctggattgtgccaactgcgccgccaaaatggaggccgccgtccagaagatcgacggcgtcaccgccgcctccgtcagctttatggcccagaagatgaccatcgagggggatgacgcccgctttgatgagatcgtgaaggaggcagtcagggtctgcaaaaaagtggagcctgactgcgagatcctggtgaaataaaacaggacagaggggagcttccccctctgtccccgcctctggagggaaccgccatgacaaaaaagcagaaaaaaatgctctcccgcatcctaatcagcgccgtcctctttttgctcctctacaccgtccccgcccagggggtggtccgtctcctgctctacctcatcccctatgctgttatcggctgggatgtactgtggagggcggtgaagaacatccgcaacggccaggtctttgacgaaaactttctcatgtccatcgccaccatcggcgctttcggctgcggggagtaccccgaggccgtggccgtcatgctcttctatcaggtgggcgagctcttccagagcgtggctgtggggcgcagccggcagtccatcgccgccctgatggacatccgtcccgactatgccaatatggaacgggacggccagctggtccaggtggacccggatgaggtggcggtgggagacaccatcgtcatcaaggccggcgagcgggtccccctggatggcatagtcacccagggaaacagcgcgctggataccgccgccctcaccggggaatcccttccccgggacgtagccgccggggacgaggtgatcagcggctgtgtcaacctgtccggcctgctccatgtccgggtcaccaggccctttggggaatccaccgtggccaagatcctggacttggtggagaattccagcgaaaagaaggccaaggcggaacactttatcactaaattcgcccggtactacacccccgccgtggtttttgccgccctggccctggccgttatcccctccctgctgcttgagggaggctggggcgtgtgggtccccagagcgctgaacttcctggtggtgtcctgcccctgcgccttggtgatctccatccccctcagcttcttcggcggcatcggcggtgcctccaagcatggcattctggtgaagggcagcaactacctggaggccctggctcgggcaggcatcgtggtctttgacaagaccggcaccctcacccggggcaccttcgaggtcacggtgatccacccccagcagctcagcgaacaggaactgttggagctggccgccctggcggagcatttcagcacccatcccatctctctgtccatccaggccgcctgccggcccgccccagacccggcccgggtcaccgacgtcaaggagatcgccggccggggcgtccaggccgtggtggatggcaggaccgtgctggccggcaatcagaaactgatggaccagttccagatctcctttgaggaccgctgccgccacatgggcaccatcatccacgtggcggtggatggggaatacgccggtcacatcgtcatctccgaccaacccaagccggaggccgcccaggccctttctgacctgaaggccgccggagtccgccgcacggtcatgctcaccggcgacgcccagagcgccgccgagggcgtggcccgggagctgggtctggatgagttccacgccgagctgctgcccggagacaaagtggaccaggtggagcgcctgctggcccagaagcagcccaaggaaaatcttgtttttgtgggggacggcatcaacgatgcccccgtcctctcccgggcggacatcggtgtggctatgggagcgctgggctctgatgcggccatcgaggcggcggacatcgtgcttatggacgatgacctctccaagctggcccaggcggtgcgcatcgcccgcaagaccctgtccatcgtccgtcagaacatcgtcttcgccctggcggtgaaggggctggtgctggttctgtccgctctgggctatgtgggcatgtggtgggccgtcttcgccgacgtgggcgtctcggtcctggccatcctcaacgccagccggatgctgcgggcaaaatgacaaaggtcccttttaagactaaaaaaccaggtgccgcccccggggcggcacctggttttctcacgtctgcgtctcatccttgtaccggtcgatgggcaccagcccccggaaaaaatcgtcgtactgggcgttcagcacggtcctcagggcaatcaggtcgctgacgaacagatttctctgcccggtctcgatctgggaataggcggactggagcatgggcctgccaagctgtgccatcctggcgcacacatcctcctgggtcagcccccgggcctcccgcagtttccgcaggttcctgccgatgctgaggttctgtatcagctttgccataatcgctcctttcaaattattgctattgcgattttctcgatcacagcaaatgctatggcgcaatgatcactatctggcgataattatatttttgcccaataaaagccccctgtcccgagggggaacagggggccgcagtccgcttatttgccgcagaagtccttggcgacctccacgatatgctccgcgctcaggccgaactgcttgagcaggtcggcggcggggccggagtgtccgaactcgtcgttgacaccgatgcggcgcaccagggtggggcgcttctcgctgagcagggcgcacaccgcctcgcccaggccgccgatgacggagtgctcctcgcaggtgatgatctttccgcactcctgggccgccttcagcaccagctcctcgtccagaggcttgatggtggccatgttgatgatccgggcgctgatcccggcttccttcagggccttgcccgcctccagcgcctcataggagagcaggccggtggcgatgatagccacgtcggagccgtccatgagcacctcgcccttgccgatctggaaggtgaagccatcctcctcgtggaacaccggcacggcggagcggccgaagcgcatgtacacggggccctcatgctcataggccgccttcaccatggcccgggcctccacgtcgtcggagggggacatgaccaccatgccggggatggtgcgcatcagggcgaagtcctcacagcactggtgggaggccccgtcctcgcccacggagatgccgccgtgggtggcaccgatcttcacattcaggtgggggtagccgatggagttgcgcacctgctcaaaggcgcggccggcggcaaacatggcgaagctggaggcaaaggggaccaatcccatggcggcggcgccggcggcagcagacatcatatccgcctcggcgatgccgcagttaaagtggcggtcggggaacgccttcttgaatacggcagtcttggtggcgccggccaggtcggcgtcgaacacgatcaggtcgggatgggaggcgcccagctcagccagcgcgctgccatagctgtcccgggtcgcgatcttcttcacatctgccatcttacatcccctccacttctgccaggcgggctttcagctcgtccatggcggtcttgtactcctcgtcgttgggggccttaccgtgccagcctgccacgtcctccatgaaggagacccccttgcccttgatggtggtcatgatgatggcgaaggggacgcccttagtggctctggcctcgtcaaaggcggactccatctgctcgaagtcgtggccgtcgatctcccggacctggaagccgaaagcccgcagcttctccgggatggggtaggggctcatcacgtcggtgatcttcccgtcgatctgcaggttgttattgtcgatgatgacgcacaggttgtccagcttatactggtgggcaaacatgaaggcctcccagggctggccctcctcgatctcgccgtcacccagcagggtgtagatccggcagtccttcccctggtacttggcggccagggccatgccggcggcggcggacacaccctggcccagggagccggtggacatgtccacgccgggggtctcgttcatgttggggtgtccctggaggcggctgccgatgtggcgcagggtcttcagctcctcccaggggaagaagcccttcagggccagggcggcgtacaggccgggggcggtgtgtcccttggaaaggacgaagcggtcccgctcctcccacttggggtcggcggggtccaccttcatctcccggaagtacagataggtaaacagatccgaggcggacaggcttccgccgggatggccggatttggcgccataggtggattcgatgacgcccatgcgcaccttgcaggcgttggccatcagttgctttttctcactggctgtcatgacgttctccttcttcttcgatttccggtcgcaggtccttctctctcttcccgcggccggagcgtttctatgcgtattataaaacagtccttccaaaagtgcaagggaccgtccgcttactttccatgaaacgatgggatggacccatgcataaaaaagaaaagaggctccctgttcccaaagggggagacagggagcctcagtttgccgaaaaaagcctcgcagagttcgcgcctgcgcgcggcagactgcatctttctcgaaaaagcggctttgccgctttttcgaccgtctcatgccatcgccagcccggagtaaggggtgtccatggggatggtcacgtccaggcctgggatggtgatgctctccccggcggcgtcacagtagtagatgtccagggaagagggctcccccttctccgggtccacaaagttgtactggagggtatgctggatgctgtccaggatggtggccgccagctcccccgcgtcatacacgtggaactcctccttctgggggtccggcggaccggtaaagatggagcaggtgtcggcaaaagacaccgtcatgccgcccggaccgctggtgatctcgtccgccagatccaggttccagccggtgagctccgccataccggcgatcatggcctccgcgggcaccaggccctgctcgtccagctccccttcataggtcatagggtattcctgaaatgtcccatccatgccgatgtacagggtgtactctgtcccctggggctgggcctggctcccgccggccgagccgtccgcctgttgactggaactgccggcggaggactgggagcctgccggctcctgggcggaggtgccggggtccgggctcccggacgcgctccctgtcggcgtctcgcctccgacgcaggcggccagactaaacagcagggctccggcacaaaatacaggtactagctttttcatcgtttcctccttttccacgatggccttgggtctttcactccgctctggagtgattggggctatcatagccacatccgcctccgccgtcaaggaattttccccaaccttcacactttggtcacggaatctttaccgcccggtcaaaaaagcccgctctctgaccggaggaatattttatcaaatggatgaatttgggaaaaggggcgaggcagtgccagtccttctcctctggaggggaaggactggggcgcttttctgtcaggccggagcaggcgggatttcttgactttccgcagaagtgggcatattatgaaaaatacttgatcgtcagggggaaatcagaaccatgtttcactatctggacaatgccgccaccacacagacccggccggaggccgctcaggcggctgtgaccgccatgacggaggagtggggcaacccatcctcccggtacgccttcggccaggaggcgtcgggacggctgaaggagcatcgggcacaagtggccgccggcctgggctgccgcccggaggaagtgtacttcctctcctgcggcactgagggggacaactgggccattgccgccgcagtggagaagaaccggcggaaaggaaaacacatcatcaccaccgccatcgaacacgccgcggtgctggagcccatccgggagctggaacggcagggctatgaggtcacctggctccagccggaccagcaagggatcatcacggcagagcaggtggaggcggccctgcgcccggacaccatcctggtggccatgatgctggtgaacaacgagctgggcaccgtcctcccggtggccgagaccgcccgcgccatccgtgcggcccgctgccccgccctgctccactgtgacgcggtccagggctttctgaaggtccccttcaccccggaggggctgggggtggacaccctggcggtgagcgggcacaaggtccacgctcccaagggcatcggggccctgtatatccgccgggggctgaggctgccgccgctgatccgggggggcggacaggaggagggactgcgctccggcacggagcccacggcccagaccgccgcctttgccgccgcggtggaggcggggcgggccagcctggagcgggacctggcccacatgcgggaactgaaggactacgccgcccgcaccctgcgggagcaggtgccggggctggagctgatcggggcggggaccgccccacacatcctccctgtcaccctgcccggctacaagagcgaggtggtgctccgcttcctcagcgacagggggatctatgtctcctccggctccgcctgccacaagggcaagcccagccatgtgtacgcggccctgaagctgcccaaaccccagctggacggcatactgcggatcagcttctcctacgacaccgcccgggaggacgtggacgccctggtccaggggctgaaggaggctcaggcccagctgttcaccagtttgtcctgaggggagcgtcagacacagaagaaaacaaataaagaataaaggagtggagcgggatgacaccggaactgcggatcacggtcctgatggaaaatacggcccgggaggggctggaggcggagcacggcctgtccttcttcctggagtaccggggcaggcgctttctgctggatgcgggctcctccggccggtttgcggacaatgcccaaaagctgggggtggacttggatggggtcgaactggcggctctgtcccacggacactacgaccatgccgacggcctgcgggccttttttgccctcaatgacagggccccggtgtatatacggccccaggcgggggaggcttactactccaagtcgggaggctcccccagatttgtgggcatccatcgggagatctgggagggcttccgggaccgcttcgtgccggtggatgggctgtaccccctctgccccggggcctggctggcgccggagaccgtccggggcgggccctttgccagccgggagcccaatctgctgcgcaaggtgggggaggaccggctcctgcccgacgacttttcccacgagcagtccatggtgctggagaccgggcgggggctggtggtgctcaactcctgctgccatgggggtgtggtaaacatcgtgaagggcgtgctggaccagttcccgggacagcgggtgtatgccctgctgggcggcctgcatatgctcagtcctggggccaatgcgctcaactgtcccccggactatgtccgccaggtggccgccgcgctgctggagctgggtgtggagtacctgtggacggggcactgcactggtcctgccgcctttgcactgctgaaggaggagctgggggaccgggtggagcccctcaccggcggaatgcggctgggtatttaaggagcgggatatcgtccatgtttggacggactcattagcaatttcagaagccctctgcaaaaaacagattgcagagggcttcttccgtttgttcaaaataaattcataaagtaactattgacaatttggaggtccggtggtactctatcgttagcactcatggaatatgagtgctaaaattagaaaaacaccgaggtgagcgtgcaatggaactgaccgaccggaaaaagcgggtcctgcgggccatcgtggagacctatatcaacaccgccgagccggtgggctccaaggccatcgcccagctggctggattggatgtgtccgccgccaccattcgcaatgagatggcagacctgaccgagatggggctgctggaacagcctcacacctccgccgggcgggtcccctccgccgcaggttaccgtttgtatgtcaacgagttgatggggcagcaccagctgacccttcaggagacggagcggatcaacagagcgctgaacctgaagatggaggagctggaccgggtcatcgaccaggccggcaaggtcctctcccagatcagcgactacccggtgttctccatcgcggccggcccagagcgggtgacagtgaagcggtacgatctgctgatggtggagaagggcgctttcatcgtggtggtgatgaccgacaccagcgtggtgaaaaacaagatcatccgggtgccgggagagctgtccgagactcagctccagctgctctccgccgtgctcaacagctcctttgtggggctggaactggccgagatgctggaggcactggaaaagatggaggcccactccgccccaggtgcctttgagatgatctccctggtggtggactttgccatggagatcctggaggagcagagccgcaagacagtacacaccgccgggatcacccacctgctggagcacccggagtatcacagcctggacaaggctaagccgctgatgacctatctttcagaggagtcggaggcatccaagctgccggtcgccctggacggcggcaggaacatgaacatccttatcggcccggaaaatgtgaacgaggccctgaaggacaccagcgtggtgatggccagctatgacatcggcgacaacatgcggggcgtcattggtgtggtgggccccacccgtatggattatgcaaaggtgaccgcccgcctgtcctacttcgccgacagcctgacccggatgttcggcaagggagagctcccttccggagacggagacggggacggggacgggcaggcgcaggaataggaggaaaggatagcccatgagtcagaaagaaaagaacaagacgccccccgagctggacgatcagctggaggaggcggccgcgaaggaagcggctgaggagccggccgaagcggaggccggggcccccgaccctctgatggatgagctggaggcgctgaaggaccaggcggcccggcaggaggagaaatatctccggctggcggcggagtacgacaacttccgcaagcggactgccaaggagaaggaggccatctggaacgacgccaaggcggacgccgcgctggcattcctcccggtgtacgacaatctggaacgggccctgaagcaggagactgcagacgaggcgtataaaaagggcgtggagatgaccatgaaccagctgaagactgtgctggaaaagctgggcatcaccgagatcgaggccctgggacagccctttgaccccgcccttcacaacgcggtaatgcacattgaagatgagaattttggagaaaataccgtggccgaggtgttccaggccggcttcaggctgggagacaaggtggtccgctttgccatggtgaaggtcgccaactgacgaaaaacagaatggaggagacagctcagtgagagatcccatgatccggaaaaaagcctgccggcagtgcctctgcctggacccggccgtctacgccctgtttctgacggccagcatgtgcttcctgttctcttttgtcttttatctgctctctttcatcttttgaccttgtaaatacaaatcttttcatattggaggaacgaaattatgtccaagatcattggtatcgacttaggtacgacaaacagctgtgtggctgtcatggagggcggcgaagccgtcgtcatccccaacgcagagggcaaccgcaccaccccctctgtagtggcattttccaaggacggcgagcgtatggtgggccaggtggccaagcgtcaggccatcaccaaccccgaccgcaccatcatctccatcaagcgtgagatgggctctgactacaaggtgagcatcgacggcaagaagtacacccctcaggagatcagcgccatgatccttcagaagctgaaggcggacgccgaggcctatctgggtgagacagtctccgaggcggtcatcaccgtccccgcctactttaccgacgcccagcgccaggccaccaaggatgcgggcaagatcgccggcctggatgtgaagcggatcatcaacgagcccaccgccgcggccctggcctacggcgtggacaaggaggagtcccagaaggtcatggtctacgacctgggcggcggcaccttcgacgtatccatcctggacatcgatgacggcgtcatcgaggtgctggccaccgccggcaacaaccgcttgggcggcgatgacttcgacaagtgtgtcatggactggatggccgccgagttcaagaagaccgagggcatcgacctcaccggcgacaaagtggcgatgcagcgcctgaaggaggccgccgagaaggctaagatcgagctttccggcgttacctccaccagcatcaacctgccctatatcaccgccgacgccaccggccccaagcatctggacctgaccctgagccgggccaagttcgaccagctcaccgcccacctggtggaggccaccgccggccctgtccgtcaggccatgaacgacgccggcctgtctggcagtgatatccacaaggtgctgatggtgggcggctccagccgtatccccgccgtgcaggagatggtgaagaagctcaccggcaaggagggcttcaagggcatcaatcccgatgagtgcgtggccatgggcgcggcccttcagggcggtgtgttcaccggcgacgtaaaggacctgctgctgctggacgtcacccccctgtcccttggcattgagaccatgggcggcgtgatgaccaagctgatcgagcgcaacaccaccatcccggtcaagaagagccagatcttcaccaccgccgccgacaaccagacctccgtggaggtccacgtgctccagggcgagcgtgagatggcccagtacaacaagaccctgggccgcttccacctggacggcatcgcccccgcccgccggggcgtgccgcagatcgaggtcaccttcgacatcgacgccaacggcatcgtgaacgtgtccgccaaggatctgggaaccggcaaggagcagcacatcaccatcacatcctccaccaacatgtccaaggacgacatcgacaaggccgtgcgggaggcggagcagttcgccgccgaggacaagaaacagcgggaggcggccgacatccgcaaccaggcggaccagatggtgttccagacggaaaagaccctggaggacatgggcgacaagatccccgcgtccgacaggaacagcgtggagagcgcactgaaccacctgaaggagacccagaagggcagcgacgtggaggccatcaaggcggctaccgaggagctgacgaaggcgttctacgccgtcagcgagaagctgtatcagcagaacggcggtcaggccggccccggcccggacatgggcggcgccaatttcggcggccaggcgggcggcagcggcgccggacccgacgtggtggacgccgactatgaggtcgtggacgacgacaagaaataaaaacgttcatggtccgcgcgggcggggcatcgccccgcctgcgcgcccttgcgtttccataagagggaagagcgaagtgtggcgagtgaagagatgagcaccccgtttcactggggaggcaggagctcatctccaccttcccagctccgtttttcactctgaatagaggtgatactatgccagaacagaagcgagactactatgaggtcctgggcgtgagcaaaggggcctctgacgaagagatcaaaaaggcctaccggaagctagccaaaaaataccacccggatatgaacccgggggacaaagaagcggagtccaggttcaaagaggtcaacgaggcctacgagatcctgtccaacaaggagaagcgggcccggtatgaccagtttggccacgccggggtggaccccaactacggcgctggcgggggcggcttcactggagactttggagacattgacctgggcgacctgttcggctccttcttcggcggcttcggcggagggggcttcgggtcctccgctggccggcgcaatggcccccagaagggagagagcctgcgggccagcctcaccatcacctttgaggaggccgccttcggctgcgagaaggagatcaacctgaaccgcaccgaggagtgtgacgcctgccacggctccggctgtgagtcagggaccacagcggagatctgccctgactgccggggcaccgggaccgtccgcatccagcggggggcgggcggctttgccttcaccagtacggcgccctgctccaagtgccgggggaccggcaagatcatccacagcccctgcaaggcctgcgggggggcgggcagcgtgaggaagcagaagcgcatcgctgtgaccatccccgccggcatcgatgacggccaggctgtctctctgcgcggacaggggaatgcaggcaagaacggcggtcctgccggcgatttgatcgtaggcgtccatatccagccccatccccagttccagcgggacgggaccacggtgctgtatgagcagcccatctccttctaccaggcggccatgggggctgagctggagatccccaccattgacggaaaggtaaagtacaacctgcccgccggcactcagaccggcaccaccttccggctgagaggaaagggcatcccggagcttcggggccgcgggcggggcgatcagtacgtcaccgtccgggtggcggtgcccactgggttgaatggagagcagaaggaggccctgagggccttcgccgccgctatgggagagatccctgcgcaggaggaggaagaggggctcaagggcttctttgacaagcggaaacggaaaaaataagttcggatctcaatcggtgagtccggggcggccgtacagggccgccccggacccctgttgccgggagctttgcggggcgcacatcgtgcgccccgtattttttgacccagcctcgttcttcctctgcggggcgcatgtccttctgtttccttttctccgccccttctgtatatgtttttctccacaaggggaaattttatgttataatagaaaaaacgtgatctcattcagcttgccagcgccatccctgcctgggggccggcacccatctcagctctgctgtccacggaagggagacccatatgacaaacgatgcatcgctctgctatgtggtgggggccatgcccctggaccccggtttcatcctcacgcctgtccctggcgacttggtcattgcggccgacaagggctatgagaccctgtcccggctgggcgtccaccccggccttgtagtaggggatttcgactcgctgggctccgtcccagaccatccccaggtcctccgcctccccaggatcaaggacgagacggacaccggcttcgccctgcgccaggggctgaaacggggataccggcgctttgtgctgctgggctgtctgggcgggcgtctggaccacacggtggccaatcttcagctgctctcctggctctccgcccaaggggcccagggcgttctgctgggagaaggcgaggcggcagccgtggtcactgaagggacgctctccttccccgcctccatggagggcttcgtctccgtgttctgcgccggcggtactgcccggggcgtcaccctggagggtctgaaataccccctggaccacgcggagctcaccagcgacttccccctgggggtcagcaatgagttcgtgggcctgcccgcccggatctccgtggaggagggctcccttttggtggcctgggaggaccgggggaccctggatgacctgcttcccaccctgtggagcgactgaaaaggagcaatttgcaatgaaatactattttgttataagggaggagctcccccatgcctgaccagagcagcgagaaggacctgaggctggccgtgctcatcgatgcggacaacgcctcccgcaccgccatgaaggatgtgatggctgaggtggccgtctacggcacccccaccatcaagcgcatctacggcgactggaccagtcccaacatgtccacctggaagtctatcctgctggagaccgccattacccccatccagcagtacagctataccaccggaaaaaacgccaccgactcggccatgatcatcgacgccatggacatcctctactccggcaactgtgatggcttcgtcctggtgtccagcgactccgacttcacccggctggccacccgcctgcgggaggcggggatgaaggtgtacggcatgggggagaaaaaaacgcccaagcctttcatcgtggcctgcgacaaatttgtctacattgaggtcatccgggccgcggcccagcaggcggcccagcaggagaaggaatccgttccccagaagagctccaagaagagcagcaagaaggcggcccagcaggcggtttccgctcctgccgccagcgcggtgcctcaggacatggtggagctgatcgccgactccctagagaacttgtgtgatgaggacggctacacgctgatgggcaagctgagcaatctgctgatgaagaagcagcccgactttgacccccggaactacggcttctccaagctgagcaagatgatcaaatctctggaccgcttcgaggtggatgtgcgccaggtgggtgacaacaacaccgacatctatgtgcgggacaagcagggaaaggataaataaaaggccctctgttcacagattccacttgtattttccccacggctgtggtacattatattctccccaggtatttggaggcgcagatggagaggaggtgttcctgtggccgattccgtcaaagtcgtggctaaaaacagcaaagcctaccacgactacttcattgaggataaatacgaagccgggatcgaactggcaggcaccgaggtcaagtccatccgtctgggccatgtgaacctgaaggattccttctgcgtcgtcaaggacggagagatgtccgtgatcgggatgcacatcagcccctatgagaaggggaacatcttcaacaaggaccccatgcgccagcgccgcctgctgatgcacaagcgggagatcctgcggctgtttgcccgcatcaagcaggacggctactccctgatccctctgtccatctacttccggggcccccgggtcaagctggagctggggctggcaaagggcaaaaagctctatgacaagcgtgactccgccgcagcgcgggacgccaagcgggagatggaccgggctatcaagagccgaaaccgatgaccccctccgcggggataagaaaggatatgatcccagtgagcaatcccatcatcaccattgaaatggaaaatggcggcgttatcaaggcggagctctaccccgagatcgcgcccaacaccgtgaacaacttcatccacctgatccagaagggattttatgacggcctgatcttccaccgggtcatccctggcttcatgatccagggcgggtgccctgacggcagcggcatgggcggccctggctggcagatcaagggggaattcactcaaaaccgcttccccaatgacctgaagcacgaccggggcgtcctgtccatggcccgggcgatggaccccaactccgccggcagccagttcttcatcatggtggagcaggccccgcatttggacggccagtacgcctccttcggcaaggtcatcgagggcatggaggtggccgacgccattgtctccgccaagcgggactggaatgacaagccccgtgacccccagcgcatgaagcgggtcacggtggagaccttcggtgtggactatcccgagccggagaagtgctgatttaattttaagcctgcggggcggaatgccccgcagggttaaaatatgaactcctcgcccggcggcgcagccgccatccgaagcggagcccagcgcaagcgggtccggttcggtgaggaggagcaagggagccagcgcagctttcgccgccaggcggaaacggagctgagcagactttgtgacgacgagggggcgtaccggtttcgacggggacgcggaagcaggaatagcgggcggtggcgcctgaccacctgaaaacgggcaacttataaattaaagaacgataacgataccgttctcgccgctgcttaaatagcggtcgtctgacccgggaggaccacggcccgggaacaggcgtcgtttcgtggtgcacgtgcgccggcaaagctttgaaccggccatgaacgatgaagctcacctgacccgtcggcgtgacggcttgccggcaggaaagggaactgggagagcaagactcccaaaataaccgtctgcgcccggagaagttcctggggaagcgttttcggacgggagttcgactctccccgcctccaccaaaagaaaatgcgacttgtatcgacaagtcgcattttcttttgggtttcgctcccgctggtcgctccacccttcggtgattgaaatgctcgggcgaagtgaattcgccctgtgccaaggttttgcctgtggcaaaacgcttgtacggcgcaaaggcgccgccggccagaaggccggttggatgcttctcaagaaaaattgcaaacgacctgagaggatttggattgttaccccttgccacgtcggagcaagcgtcatatcgcttgctccgactttttatgcttcgcacgaaaagtcagagcgcgctcattttgctgctcctcctttccacctgcgacccgcttcgctgggctcgcaggtggtgggcggccctgcgggcggctatttttcgtttctggcagaaatattggttttaaccgctctttgcaaaagaaaatgcggcttgttttgacaagtcgcattttcttttgagtttcgcgccctttagtcgctccacccttcgtgacttcaatgcccgggggcggcaaagccgcccccgggcaactcaccgctttgcaccgaattcatgcgccggccggttgggcagtcctcctgccgccgtttcggaatgccaaactatcggttttaccccttctccatacagctcgccggcctccttcgggggctttgccgtccaccggcaagccggcactggtcctgcggcccccgtcctgttgggctcgcgcttcgatcctgtgctgtttttcaggccgatattaggcccagatctcccagcctctcctgaagcacggcataggcggagagcatttcccgcaccggcccctcggggagatagcccagctggattagggagatggggtgatataccctgctctgcacctcctgcgtctccagcgaaatggtattgcagatcagatccagccgtccctctccctctgtgggctccaggaaaaggaagaaatagtcatggatcagcccctcctctgggatcacggcctttggaggcatagtgacatccacaacgcacccatcccaactgtcctggatgggaagctgcgccagctcatgcatggtcgtcccatcaaaacagatggcagtgatggagtggaggctgccatggctgacctgtaggcgggtggagggggctgggatggacatgggcgccccatctttttggatctcatactggtaatgggtgtctacagcctctaaagagtacgacaacggttcggcccgtctggcccgttccgactcgatgtgtgccaggcgcagctggccccaggacagcaccagacccagtaccgtcagcaccagacccagtaccgtcccaaagatggtcatataggtccccaggatagtgaggtagctcatgtgcctgctggccgttgtttcgtctctcttctcttttttcagattcatatgctcaaatactcctccattctcagtctcagtctgttgtaagttcgataggtgtgatccctgctccagcggcggtatgtccggatctcgtcgatggtatctccagccatcaagtcgtaggccataagacgggtatcccgggactttatacggtgtagaaagtcatggaggcagacgctgttttgaaaatcaccgtggggcatggacagcagctcgagccgtgggactgggatctccggactcaccgggatatccagggactcctgctcatagagccagaaatcgaggtctcgtttctcctgaaggagggcctcccgaatgataaggtaagcccttttccaacccgaaatgccgtccccgcagaacgcgaagggggcgtcccggtagactgagagaaatgcctcccacgcgcactggtgcagatccctgatcccctgggggagccctatggaccggcagatatctttaataaatccatcgatcagccggcgttcccggggcgaaaaatctcgttttttacgtttcatctgctcctcctcgccgcagatcttcggactttcttgggctgatccagcgcagagagggccgggggttcgggcaggtcctgacagcagccgatccaggcccgccgctcctggcaccactccatcgtgtaaagggcaggcagggagatcccctttgcttccaggtactgtttgaagtcaagatggagcacatttcctcctttggcggaaaaacagatgttgggcgtctcctcggagcacaggagcaagtagcggccgtctgggctagtttttgcacgaaattctctctgtgcacccacccctcttttcaaggctccgttcatcgagaccattcccttttctgtaatggagatccgggggacatcataatgccggcgcagcggcgggatgtcctccagtgcctcaaaatccagctctgagaagttcataaggttttacccccttttaaatatacgatatggaaaattatagtggggtgcaatataaaaggaaagagtcaagtcatacgattattttcgacagttttcccttaaatgtgtgcatattctatgaataattataagctatattggcgcatacttaaagtttaactattttttatgcatcttgttcaaacggggcgtatcttgcggggacgggtcccagggacgcccggagggcccttccctttagaagcgggtatcccggcacatgcccaaaaccttccccttagggggaaggtttcatggcgaagccgtgacagatgatggggtgttcttccgtctttcccagacccccggtacgggagtcaccgagcggagctctcctggacctgaccggcacggcaaggcaaggttttcgcactgaccagcgtctcacaccgctgccgccatcgggccgcctctctcaataccggggcttccgcacaggcggggcagaaatgggcacagttccgcttcacttccataatttgtattgaaacgtctcacaaaacagcttttccctccggttttgagcgggtccggatctgccgggcccagtcaggacaggagggattttttatggcaagcggacagactcagtattatgggctctcccagtgggaggccgcggacaaggtggagcgggtggacttcaactccgacaacgccagggtggacggagcgctccacaccctggcggagcaggcggggcgaaaagctgacaaatccacggtgaccaacctgtcctccgtagtgagccagaaggcggacgagaccgccctctcggcggcggaggggcgcatctccgccctggagagcggaaaggctgacaagacggagctggccgcccagatcagggccctgagccagtcccatgacgcagacacggaggccctgcggagcgaaaactgctgggtaaaattggggacagccgcactcgctgccgagcaggcggagatgaactttgatctgtccggggtcgatctatccaaattccgggcgctggagctgagtggggcgcttacctatgcggaaaacgggaccccggggctccagttcaatgagggcctgcacagcttttccggccccaacggacgtggagtaccctatgccgccttatttgaatccagccggggtttttccggcgtggcccgcatctacccgaaccactaccgagacggcggcgtctctgttctctccataggacactactacggatatgacagtgtgatgaccagccgggccaccggtagcacagacttccagtttgtccagattcaaagcgtcctggtctctgtctttgacgaggaaggacagcccggcacgctggccgccggaagctccataagcctgtatggcttgaaaaagtaagccctgaacgcaacagattgaccgcagttcacattcaggggcgttcagtattctaatccactgggtgagacttttcgttctgaacagaggataaaatgaatgaaagagctcccccgggcaaaatacccgggggagtgtgctctcacatttttcccaaatccagtcttctgaatcaggcaaaagcgatattggtaatctccaggtcaccagtgttgggcatgatcacagtaatggtgacagcgccaagtttctccaccacaggagtgaagggctggtacacagtgatgctggtagaagtccaactatccagcgttgcctcaacggaacaactagtatccgtgtaatatgtgcccttctccagcgcgtcagcaaacgcgctgatggagttaaatgtatgagacttataggtatcggagtcagcagtgacaccgtcaaccttctcgaagtcgacctcagtgccgttcacagtaactttgctgatgctgatgggagccccgtgaccagcatcctgtttcagggtaagctccacaggcttgccgccacggacgttcatcggcaggctggtctccatactatagttgctgggcagagtcgcaccgccatcaagttttaaagtagccacagggtagtcggcctcgaccttgatggtgttcacgccagcgaccagggtcacagtgtactcgcccgcgaagtcagctccggcagaagtgtcgttgaaggtcacagaagtgatttccatgtgggtctgaggcacgggcttaaaggtcagggagtcgcccaccgccagatcggtgatggcggcgccgtcagcatagcgtttgccgttgatttcgaccacagcgttggtcaggtccatctccacggaagcagtcgcctcgacatcgaagtagactacgtggacctggatgtcagcggtaacgtttttcacagtggaggtaaagtcgccgtcgcggttgaccttggcggcagtgccgtcgacagtcacggacttgacgttctgaccatcgaccaccacgattgcggtctcgccgtacttcacagtgccgtcctccacgtcattgacgtaaatcacagcctggctggcggcgggcacatcggtaccattctcatacttgtgggtagaggtagaggcaatgccgaagtcgttggagttcgcagtgacaatctccacgtcggtgtccttcttcacattgtcgatggtgaaggtgtagacgccgttcttctcgcggaccttgacctcgtccccattgaccaggaccttggtgacctcgcagttggtcccggcagtgatctccaccacggcgtccttgcccttagcgatagaaatatcggtgccggtcacgagggtatcattcaccttgatggtgctgatgttgctgggcacatccatatcgaagtcgatcttcaccacagcgcccttggtgtagttgaagatgtagaccagctcagcctcgtccttgctgttggccttggccacatagacgtagctgtacttgtcgccctcgtccacgttggcggtgttgccgtcctccagctcccagatgtcggaagaggagccgtcggagaccttccagttgctgccgtcctgggtggcggtcacaaagatggtgccgtcgtcccaggtgtagcggccgaagtagttattgtcagcggccttggtcagctcgaaggacttggagcccttgtcacccttgtcaacgtagtaggtgttggcagcgctctggatgccggcagagttctcgtccgcgtcaacgggctcgatctccacgacccggtcgccgtccatcttcacgacctggtacaggccgttgccggctccgccgttcttattgccgttgccatcgaccgtcacgatctcagcgtcggcgtccgcggccagctccatcttctgggccgtgccgtccacatagacatcgcgcatgacgtactcgccgtcgttgtcataggtgcggtacttggtccagttggcgaccatgaagtaggtgtcgtcggtgttgtacttgtactggtagtcccagatgaagacgatgtcggccacgttgtccttgttgtcatagaccacagcggcgttggcattgtcatagctggggacctcgtcataaccggtgtagatgacctcgtcctcggcgtccacgaacacggtcttcaggtccaccaggatcttggcgccgctggaatccttcatgttggcggtctcgttctcgatgtccagaacggtgccgtcgttgtaatgggtatagtccccaaagctatcagcgggatgagtgggcaggtcatagtcctgaacgctctcagtggaaccattatagtagaaggccacgccggtctcgcccttggcggtgcgctcgtccaggatgcccagggtgtagacgcccttgctgtccacggtgtaggagaacacagcgcgctccagaccaccgtttttagcatcagtgggcacgtcgccgaccttgcccttgtaggtgtccttcagcttcacggtctcgatggtgccgtcagccagcatgaccttagcctcaccggtgctcatgtacatatcggagtccagaaccaccaggtagttcttggacacgtcctcagtagcgatgtagccgatcacatagccgttgcggtccatgtacaggcggtaattggtgttcagctcggggtcgtcgcggaagttctcacgggcggccacggtcacgtcgccgatggtgacggagctgtactgatactccacatcatcgatcacggcatagccggtgtccttggtctgggtggaacgctccacggcctccacgttgccctccacggtctcgggagcggccacagtggcgatgaaggagtcgccgtcgtcgtccacgtctacggtgacgaccacatactcgccctcatcataaccggtggtgtaaatggtatcctcatccacagagcggtaaggcaccttcacggtgatataatcgccgtcctcgtcgtcgccgacgcgggagacctccgccagatagttgtggatgtagatcatggtgacggtctcttcgtcggtgtcgatgtagacctcagtctccacagccttggcggtctcgccgtagttgtcggagctgttggatctgggggcgtccacgtcctccagctcctcgccgtcactgtaagcgtaccagtcatagccggccacggtcttaccgacttccttgtacaggtccttctccttcacagccttggtgtaggtgaagtcagcgggctcgggaacagagatgatctcatcggaggagagcatcttgacctggccgggcagcaggccgccgtcgtcggtcagattgctgttcttgttgccagtgccagtggtggtcttgtcgctgatgtaggaaccggtgccccaggtggtggcgggacggccatagtcgccccggtcgccggtgcggtacaccaggtcgaagttcttgtagcccagggtctccaggtagttgaactccagggagtaggtgatgccctggttctcgttgtagtacacacccagcagctcgttgtactgaacgggcacggccttggtcagggcgttgaacaccagctcagccacgttgtcacgggtcaggccggcctcagcggtgagcttcaggtcgccgtacaggcccagctgagtgcccttggcggtggcggccagcatccagttgctgccgaagtcaccggcgctctggaagtagcccagggcgcggcacagcatcagcacggcctgcgcggtggtcacggtggcgttggggtcgaacttgccgtcgcccacgccggccacgatgcccaggctggagcacaggttcacatagccctccgcccaggcggggacgtcggtgaacacgctggtctcagcgaactggttgacgttcacgccggcgccgtacagcatggtggtgatgatgaccgccatctcggcgcgggtgactacgttctcggggccgaaggacccgtcctcgtagccgtcaaagaggccgatggcagaggtgaccgccacggcatccttgttgacgatctcagcgttgtcgctgaagtcgtcaaggcccttagcgctggagcccacgaccatcatgcccaggagcataacggaagccagagccaggctgagagcacgcttcaggtttctcattggatattcctcctttttatattgacaaaagtcgctgttttctgacaaaccgggccttttccggaacatttcggcccactatgcctgtacaacacttctgacacaggaggaattggttataaaaaggggaagattaatggaaaaatccataagattctacccaaaaagtttccctggtagacatttggtagacacatgaaaacagaaggggcggcgaggccctgaaactccaggcccccgacgcccttttttggtagacttttggtagacatttttatttttaacgctaagagactgaaaaaatatttgccgcccctcaaaaaactattgacatttttacgatagcatgataagctagataagcttcaagcggagagcggaaaagcgccggagtggcggaattggcagacgcccgggacttaaaatcccgtgggagtgatcccgtgccggttcgaccccggtctccggcaccaagatttcgcggggtagagcagctggtagctcgtcgggctcataacccggaggtcgcaggttcaaatcctgtccccgcaaccaaaatgaatgaaccccgcttttcgaacatttttatcgaaaagcggggttctccgttgtaaaaagccttgacatatcaaggctttcgtttttatatagatttctgatatgaatcaaaacttgtcaaacgcaaatacaaaacttttacggttcactgtcagttgaacatgactttttgatataagacaagtaataagcctcctcgaaggcttgcggtgtctggtatctcagcgttaggtggggacgcacctcattgtagaacgtaatgtattctgcaacacatctgcaaaaatgtttttctgatgtgtattctcggcgataggcttcttcacgcttaaaggaagaaaagaacgcttcagccaccgcattatccaatggccgcccgctggccgaaaaggactgcttggctccgcaccgctgtaaaagttcagaaaatgtcttagatatgtattgtgagcctctatcactatggaaggtcaggttgtcaggccggcctcgctcttcaaatgtttgccgaaatgttaatgtagccaaccgtgtgctcatgtggcgagataccttatacccaatcaccttgcgggaataaaggtccaggatcacacacagatatacccaatagcttttgactttaaaatatgtaaggtcacttacccagatttgatttggtcgacttgctgtgaacacccgttccagcaagttttgtttttgccgttgctgctttgccttatataatttcttagcatcggtacgaacactgtgcagatccagttcctgcataatggcagagactcgcttagcactgacacggattccgctttctgccaatatcatacggatttttgatgcaccgaatctttgatcattgtcatcaaatacctgcttcacttttaattcgagctgtttctgttcctcctgatatttacttcggtctgcacgacggaaaatgtggttatagaaggttccccttgcaacgcccagagcgtcgcatagctcatgtacactaaaagggttgtccggttgatgatagagatgctccagtgtagcaagccgtttttgaagcggcacggctgggataaagccggacaaccgaatcacatctatcatatgttccagcttttgaagctgacgtgaaatagcatcaaattctttaggcgtgtatgatctctgcggagtcgtgatggagcaaaactgctttcgccagtggtacagtgtgctttgagcaatatgtaactcttggcacagagattgaatggactcacctttttcatagcggcggatagctttgattttgaactccagcgggtaggtgtacggcataggttcgacctcctttgtatatgaacctattatagcaattgcgaaaaatagttctaagagatataatataaacaaatataaacaagtatttttttaacacctttgaccctttaagggagggatttgtctgttcacaaaaaaagtcttagctgtattggaggagctacgagatataagacatgacaataaatatgtagtattatctcaattaaaagatgcggctgaaaaagcatccaacgagcaagataaagctgcccttacaatcatcggaggcgctctttcactggggtataatcactctgaatgcaattaccgtccgctgattcaattatctgatggtcatcgttcgtatgcaatggaggacattgattcgggggccattgagatacttaaagaggcagttaatgtgatatctccagattggatgcgggcgcaattatcagatatcatatggattcaaacatctgaccacagctatgcagaatgtgccacaagagaatacatctcagtgtttgaaaatgtttttgatgcagagaattgggtgggttgctttgaggctattcaacatgcttatgatatttccattaggttagggaaaaaatctacttcgtttttgcaagtgcgagaaaccattaattctgcgcttaaaaaatggacggaaatgatccgttgtttctgtccataaagctcattgagctttcgtacaatgatgccgaatcagacgagcaaacattatatctgtttcttgctcagaagatatatcagcacaacaaatcttacgcagacgaaaaacatatccatattacagaggcatctttccaattattatgccgacttctaaaaagaacgaagcgcacaacggaacttcaattggcgtctactgaaatggcacaatattatgcgatgcgcggcaaacaactggcaaacggagatccttccagaatacaccgcgcaatagatttgctccaaaaagcctgtaggctatacaacaaatccacagacagacaaacagttttggatttaagggcctgtattagtgagtatcagcatagagctttgtcaaatatggcatcaattccctttgaatttgatgcaaaaccaattaatacccgtatttctcaattatttgaggagctgtcattaagggaaacaattgttcaatttggtttggtatccatgatccatagaaaagaggatgtgaaaaagcagatcttggataatcaacataagtttttatcaacatccctctttacaaataagaaactaaatgatgaagggcataccatcgaagtgattccgccgcttgatttacaaaacccagaaggtgatccagagacactattcaaacacatggtaaaatatgtgtcagagagcagaaacttggatgaaactatttgccttcaatttgcatatggtttcgtcaaaaatgcagggcaagtatctcttgatgatctttcctttttaacagaaaagaatgcagtaatacccagcggaagaaatgagatcataaaattcggactttattgggggttgagcggaaaactttatgcggcaatgcatattttgcttccgcaaatggaacatattatccgcaatctggttgcattatgtggcgatactgtttcgtttataaaagatggctgtgaggaatataagcctctttcacaattatttaagtcagataaattgcatgaatgctatgatgaagatataatttttacttttcagtccattatggacgaacgtgctggtgcaaatcttcgaaatataaatgcacatgggcttatggggccaagcattggtaatggtggtgctaccttgtgcttcttgagccttataataaaatttctctcactgtattcagtcgaggctaacagaataatgaaaaaacttagcagtaagcgaaaagaaatagaaactcaagagcaataaaacccttgattcttctcattctttattccgttctttagagtttgaatgctcaggattggcagggctgtccatgtgtaacctttcgccgcaatacagcaggaaaaatcatggcgcataagtgacaccaaccagcaagtcagttgtatgtggtcacggaagagctaaaatgcttgagaggtttggaattgttaccccctgccagaaatccgctggaatcacctgattccagcggattatttttgttttctgtaactttttcgtgaggtttatttgtggcttttaaatctgacccagattctgacccatacgggaatttttccggactggagagggctataaactgccggagaggacatgttccatggctttcgccgcctgccgctgggccgaggtggtcacatgggcgtaggtgtccggggtaaacccggcgctgtagtggcccagcatgccggagacggttttcacatccactccgttttgtagggccagggttgcgaaagtgtgcctcaaatcgtggaacctgacccctggcagtcccgcccgcttcagcacccggtggagcatgtgaagcacgctgtctggggacatggggccgcctgtgggacctgggaatacccaaggacttgacccgactttctttttttgctgatccagaacgtctattgtatcctttgccagaggcagggtgcggtaggcgttttttgttttcgggggggcctctaccacctcgccgttgatgcgggcgatctgccgccgtacccggaggtcacctcggtccaaatcaaggtcctcccacttgaggcccagcagctctccccgccgcaggccggtggccagctccacgtagtagagctcgaatacaccgctctctttcgcctcccgcaggaaggaggccaactgctccaccggcagggttttcatctctctgtgctccaccttaggcagggcgcagccttccgttgggtcggagagaatcagtttctgttccttggccagcttcatcgccgaggcgatgatctggtggagattccgtacggtctttggactcaggcccttgctctgttttttgctttcaatccgttctactctgccgctgctgagcagtttcttatagaatttctgtaaatccagagaggggagtttactcagcgggatcttgccgatgtcgggcttgatgtgattgtcaatgtagccccggtaggtttggtgggacgagggacggactttcactttggcgtaattctcgaaccagacgtccatccactcccccacggtgtatttcttggcttttgtctgatctacgatctttgcttcctcaatagcctgcttcagtttggctctggcctccgcctgggtccgacctaggacgttccggtagatagccttgcccgtctccgggtcgtgaccggcggtataccggccctcccagcggccatccttgcgttttcggagattgccctccccgttggctctgcgttttgccatgttatgccgcctcctttgcaacgacatacaataccacagaaacagaaaatggccaggcgcacagcgcagagttatcaaacaattcacatttcccggtttctgtccttttctttgttaagcgtcgcattttccgatttggggaagagcctctatctttgtttcatgcggtgcaattcctgaggtgggtgggatcccatccaaaagtaagctcatcatggaggaggagacttgattgacccctgttttttgttgcggcagtatgagttcgggaatcgtgaccccagaaatgacagcactgcccggattttgaccccacttttgatacaccggaaactgcccgtaactgcccgcactgcgggcagacgtgatcgaccggaggcgccaacggcgaccccggcctttatcctgcttttcttttcgtcctccgaaaagtggccggaagacgagaatcccctctccgcattctcgggaacagcggccaaaatccggtctggagactttgggaggggtaggaatcctgcctcttccgtgattgggccacacaggggctcacacggcccagacaggggctgttcttgtatttgttctcactccatttgacgcagagcggttcctctttgtcaacggcatctcaatcccggcaatcgcagaaccgattttcttctctctgtcattcggcctctggtcgcaaagtgggtccgggcttctgcccgcaacaaggcgtccggctgccgctcgcggcaagccagacgctctgcttgccccacccaagggtgggtaaaatcgttctcccgacccgctcctgaaaacggtttcaagtggtgttccacactgcggtgagttgtggatacggatttatccttgcgctaaatttgactgcccctacacgcagttgcctcatatcggccagcgcagtgggatttcatttcgaaccggagaactgcattttagagatgagtattttcggcacaaaactataaatctatagccttaactctcttaaaactctctaagttctcccggaaaaagaaaatttataaaaaggatatcaacttatgacagctttgaattcaagggcgacgaataccaaacgcttgcattctgcggtacaatgtgctgggactgatgcccaattccttggctgtctttgcctggttccagctgttgcgctccaatgcctctcggatgagttcctcctggaggcttgccatggaggcacgagctggatggccctgctgctctgccgctgcaccggttgttatgctctcggacatacgtactgcgtggacggcagcgcctaaatccagcacgggacccttgcacagtaccatggcgcgctctaccaggttggagagttgccggatgttccccgggtaggggagtgaggcgaggtattggattgccgccggctctgcatcctgaacctggagtcctagttcccggcttttttcccggagaaaatgctgaatcagaaggtgaatatcatccccacgttccttcagcgagggaagacgcatggtaagtacgctgattcgatagtagaggtcctctcggaattttttctgctccaccatggctttcaagtccttgttggtcgctgcgatgacgcggatatccaccggaatcactttgagactgcccacgggcatgacttcatgttcctgcaggacgcggagaaaccgcgcctgtacggagagaggcatctcgctgacctcatccaaaaagacggtcccctggtgcccttgtacgaatagcccctgtttcccgttgctcagtgccccggtgaaggcgcctttctcatagccgaacagctcgctctcgatcaaattttccgacagagcggcgcagttgatgacgacaaaggggccgtttttgcgttgacttgcgttgtgaatactctggacgaacatctccttgcctgttcccgattggccgtaaatcagaatagggctatccacgcgggcatactgctgggctgtgcggatacagtctgtcagggcagggctctcccccacaatgtcccgaaaggagatggcggcagtacggtggtgcttcagcagttggcggcgcacctgctgctctgtgtcctgcagcttttccactggcgtcagagttaaaatagcagatttaaagatggcgtggacaaagaccgggcgcccctccaggacaaaaagttttccattaatttctagcgttttggcataaaatgcctcgaaagactggagaaggcgctggagctctgggcagtacagggcagtttcctggacggacatactgctgatggtccggggatcaatggagaggatatccgaggctggccggttcatcctctgaatttttccgtcccggtccagggccacgatgccctcggcaatattgtcctgaatggtgttcaaaatttccgcatgttcctgccgctcttccaaggcgtggaggttgtgctcagccagccgtaccgcggagagaatgtccgactcgtcataggggacattttccacgcggatcccatatttttcggcatatggatttacaacaccggcgccgatgaccgtgcggaacccctctgcatctaccttctgcaggactgcctccagctcctcctgccgttgatacggaaaataggagacagcatttccatagcttctgcacagcctctgaatggtgggactgtctgtctcacgccaaacgatggctgtccggtctgaaaagcggagtgtgttttggatcacctccgcaaacggaattttactgcggcggatggtgaccacagagaggtccagacagttcaggagttttcctgcatatacatccccggtaatcaaaatttcagttccttgctgaacggcgcggtccagaaaagagaaaaattcctcttcctctccaatctcgtatacgggatagaagagtgcattctgccgtagcaccttcctggtttgtacacagtgataatttcttcgcagggcaaacagtattttatcgttcatatttcctccatatggtcaaaaatgaattagaaaatttcaattatttcattcttgcgagccctgtttctagtttaccccggcaatgcctgtgaggcaagatattttttcccttgatttatcagtgttttttcatgctgatgttttttctatgcggtttgacaggttggcacggaatttgcttttcatatgggacaacagcccgtgaccggggttttctgggtgcggtctcgggaaaaacggaaaggagaaaattttatgagctatgcaatcctagggtatctgatgattgcgctgatcgtggtgctgcttctgaccaacaaggcgacgccgattaccgccttcgtcataatcccccccatcgtcgcgttggtggcggggtactccattgaggaggtcaatggctttattcaagctggcgtatcctcctccatgggcaccgcgctactggccctattgtccatcattttcttcagtattatgacggaacagggcctgtttgacccatttgtaaatttcctggtctccaaggcgggaaacaacgtggccgtgattaccgtcatctccgccattgtggcccacttctcccatctggataccggcactaccagcacattgctggttacaattccctccatgctgcccatttaccggcgcttagggattgaccggaagtacctgtacctggtcattgttcaggccatcggcgtgatgaacctgcttccctggggcggggcgatcacccgctcctgcgcggtgaccggtatggatccggccaccatcacggtggctgtggcgccctgtctggtggctggatttgcctataacatggtcaccgcctggatttacggcaagcgggcccagaagaaaatcgccgctggcattctggataccggcgagggcgcggacagcggcgatgtgggcctggtggtggaggagaaccgggacaccaagctgaacctgaagtattggatcaacctggcctggaccctgatcatcgtcgctatgctgttcttggccaccgaaatttctggctacatcaccttcttcattgcggtggtgggtgccctagtcatcaactatcgctcggtaaaagagtggaatgcgatcattgacaagtatgccaaaaacgccctgcgcacctccctggtgatgtttgccgccggcttcttcgccgggattctgaataacagcgacatgctctccaatatgtccaatgtagtcaccagcctgattcccgccggtatggcgcccctgtttgcgattatctgtggtgttatcgctttcgtgttctccatcctgctgggtgcagatggcttccactacggcatgatgcccctgctgatcagtgcaggtgccaccttcggctttgctcctgccggcctggtgtacgtaatgtgtatgggtgccgacgtggtctctcagctccgtccggttcaggccacttcttggatgactgccggtatgtgcggtgtggagtttaaaaacggaatcgcaatggctttcccggtagttttgggcctgttccttgtagagatggtagtcggcgtgctctgcggcgttgtccccattggatgacccgttcccatcccttgtgcagaccagacggagttcagattgtgagtcaaaaggagaatttttatgattattgataagctggaaaatgcatcccgctactatgccattcatcctaagctggagcatgtgctccgcttcctgcaggagcataaggaagagctaaccgcgcatcccctggggccggtccaactcacagatgagatctctatgaagtatctgtcctaccgcacggtggtaggctcccggaagtgggaatcccatgtgaagtatacagatgtacagtacatgagccgcggttcagagcgcattggctttaacaatgccgagcacatggtcagtgctgtaaagcaggagggcaaggaccagatccttcacgacggtgacggggaccgcattctggtacctgaggggtactttatcattctgttccccggcgaggcccacatgtcgaagttggctgccgctggatgtgcagaagaagtccagaaggtgtcgtttaaggtccccctgtaagttggtcagtccgatatcaaaagaaggagaaagtttgtatgagtcagaaaccgttatttgtctatatcggtacctataccactgagaattcaaagggcaatcggaacgcccacggtgtaggcatctatgtgtatcagattgaccgggagagcggcaggtggacactggtacaggaggttcccaccctgaaccctgctgttctccagtatggcaaggaacagcggtacatctactgcgtcaacagcaacagcggcggcgtgaccgcctatgccagagatccagagcggggaaccctcaccgaaatcaaccaggccatgaccgatgggaaaaacatcatgatcatgtctgtggacccagctggggagtttatggtcactggggaccacaaggggattgtcaatgtatttcgcctgaatggggacgggtctattggggagaagacggacagctttgtactccccggggagaaggggcctttgaatgagaagatccagccctggtcccggccccaccacctccccttttccccagacggccgatttgtgctgattgcggataagggattagacctggtacacagctaccgcctggaccgagagaccgggaagctgtccctggtgcagcagcttaaatgccacggtgcctcctgcccccgccacctgtggttccaccccaacgggaagtgggcctatatcaacacggagtacacctccaccatcatagcctgccgctatgatgaagaacaggggactctggagcccttccaggtggtctccgccctgccggatgactactttgacgtgaacaccatgacctcagagttggtggtccaccccgatggcaagtatctttacatctccaaccgccgggtcaacaacctgggggccttctccatcgaccaggaaaccggtcgcctcaccccggtgggctgggtgccctgcggcgggaagaagccccggttcttcgccatcgagccgggcggaaactacctgttcaacggaaaccagtccagcgacaccatcaccctcttccgaatcgatgcggagaccggcgccctggtggatactgggaaggtactggacacccccacacccgtttggatgctgtttaccgattctgtccccagcgtggagcagttcggctccgagaggtaggtgcagaaacgtatgaaaacgatcctttgcgaccgggagcgccccgctgagatcggggaccaggtgcgggacggagacttctcctaccggctggaattcggctgggccaagtggcccgccgaactggagggggtccataccctgaatggcagctttgaccaggacgggaatttgtatgtggccacggagaataaagaacacccggtggtggtgctgtctcccgatgggacatttcaaaggagtatcggcgggggccttttcgaaaaggcacacagtattttcctgacgccgtctcacacgatcctggtggcagactccagcaagaactgccatgtcatccgggaaatttcactggacggagtgctggtgcgggactttgggaccatgggacagccgggggactccggctatgacttcaactatctggaggtgctggagcgggagggccgggtgcctgctgatccggtctggaacaagcgggcggaggccaacgcccgtctggacagcgtgaaaaaaatgggcacccccttctgccgaccctgcagcatggtcatgaaccaggcgggagagtactttgccgccgacggctatggaaacgccgctgtccaccgcttccaccctgacggctcctacgacatgtcctggggcggccccgggagcgagccgggaaagtttcggctggtccacgacgtgcgggtggatcccctgggacggatctgggtgtccgaccgggagaactgccgggtgcagatctttacccgggatggggagctgctggctgtgataggcggagatctgatgcgcatcggctctgtctggctggacgggcagtatgcctacattggagagctggacggcggcgtcactattttagacatggagctgcaggtgaaggcacagctgggctgcagagggtctgtcattcacgcccatggcctgacggcggacaagaacggcgatctctatgtctttactaaccgaaaaaatgacaattcgatcctgcgcctgattcggcagtgaggagggaaactatgcctgtaaaattcactttctttggcgccatgtgtgtgctggtagagcggagcgacgggaagaagctgctgttcgacccctatatttccgggaatccccagaccacagtcccgctggagaccttctatgacattgactatctgttcgtcacccacaacgccggggaccactttggggatgcggatgtgatcatgcaaaatgcgcccaaagcagttctaatcagcggcaaggatgtgaaccgccatgtgcagaaactgggaaagctcccaagagagcgctggtatggcacgatctatggggattgcagggctctggacgaccagacagtgttccacaccgttcaagccatccaccgctcgaaggagagcaccgatggggtggaggcctcccacccggccttcgggtttattgtggaggtggagccaggggtcacctattaccatgttggggatacctgcctgttcagcgatatgcgaatgtaccgggaactgtaccaccccaatgtgatgacggtggggatctcccgcttcaaggagccctacccgccctgtgagatgccaccgcgggaggccgcttatgcggtctcctatgtggggccggatgtggtgatcccaacccattaccctacgggcagtagcgccctagaggagtttcgggggcacatggagaccttggcgccccgggtcatcatcaaggaggagatggagaagccgttttacttcctccctgcccgggtggaggatgtgctatgatgccgccccagtcgatcagtgccagagcagacgcggggctcgatagctttggactggctgtggtcctgccctgtccttcggtcgtggaactggcggccttggcgggctatgactttatccgcatcgactgtgagcacgcgatgatggatgcgtcggaactgcgtaccatgctgcagacagcgcggctgctggggatcccctgccaggtgcgggtgccggatctggcgtccataacgccgctgctgggacaggagcccgccgggatcatgcttccccatgtggaaggggtgtccgacgcccgctttttaacggaggcctgccgctttgctcccctgggccggcggggaatggatggaaatacccgccgtatgcgctgtgaagggatgactagggaggcgtatatgtcctacgctcagacaaatttaaatctaatcgttcagctggagagccgggctgccctggaaaatattgacgaaatactctctgttcccggcattgatatggtggccaccggccgggcggacctctctcaggagttgggagtgcctggacagaaagagcatccggacgtcatcgaggcggaaaattttatcatccgcagagctttggagcaccacaaggttccggttattacagccagcactccagagcgaatccatgcgctgaaacaaatgggggtgcactgctttgtcatcggcaaagatgaggagctcctgaatacagggattcgaacccggattcagtgcaatcgataaacacatacaatgaggaggagatacctatgcccgtgggaaaacgcatctattccaattttacccgtccaagtcgggagctggtcgaacagtttcgcggtctgcccaccgccaacattgccgactgtatggggcggatttcctgtattgatactgaaatttgtccgctgaaccacacgcccctgttgggagctgccctgacagtcaaggtgcctggcggagacaacctgatgtttcataaggcgctggaaatggcccaggaaggagatattttggtcatcaatggttttggcgacatgacccgctctctgtgtggggagctgatggccaccatggcccgtcaaaagggaatccgcggttttgtgatcgacggctgcgtccgagacctggagagttttgccgggatgacggattttgcctgttatgcccggggaattacccccaatggcccatataaaaacggcccgggtgagattgggctccctgttgcagtgggccatcaggttatcttttctggggatattctggttggcgatgaggatggtgttgtggtgattcggcctgatgacgcctctgccattgcccgggaggcccgggccatcctggaggcggagcagcaaaagcgggtcaactatcaaaatggaaaatgcagcttggattgggtgaatgagaaactgcgggcgctcaatttggaagaagtagacggctgaatgattctctcacgtgtagcctggcggcctggccgcagtgccgcgcgaatactggcagaagaagtgaggcccagatggatacatccgggaaggtgcggaggattatcgtgttcttatccctctgcagaacgaggatctctggggtactcccacacaggtcatggagttgtcgggactgaagacacccccgggccccagcctctgcctaaaaattgtggtggcggctgtctgcggcaaggcaaacgatccacttactccactcaaacggctacaaagaaactacttagtaatgggaattgtaagggaaaatgtgccttccagtatcccgtttttctcaccctttctgacccaaaatctgacccagaaccggaaaaactggggcggagcagaaagcacacaacctccagggtttggcctatttcaggtcacaaaacccccggaaaacgttgaaccgcagcagatggacaaacccacagcagctcataacccggaggtcggaggttcgagtcctcctcccgcaaccaacaagccgctgaaatcgcatggtttcagcggctttcttcattttttatcacttttcggatggttttatttctcctctcttgttttgacccagattgtgacccatacgggaaattttagcggaaagggctggatcactttagagaggctcggagactgcaggagagtacattccccatggtttgggccgcttgtcgctgagcggcgctggtcacatgagcgtaggtatccagggtgaaccccgccgagaagtgacccagcataccggacaccgtcttgatgtccaccccgttttgcagggccagggtagcgaaggtatgtcggaggtcatgaaacctgaccttgggcggccccgcccgcttcagcacccggtggagcatgtggaggacgctgtccggtgagattggcccaccgttgggtgacgggaacacccatgggctgctgcccgcttttttcttctgctctttcaaaacgcttaccgtatcttctgccaacggaagggtacggtaggcgttttttgttttcaggggtgcttcggtaaccactccgttaattctcaccacttgccgtttaacccggaggtcaccccgttccaaatcaatgtcttcccacttgaggccgaggagttctccccttctcagcccggtggccagctccaggtagtagagctcaaagacgccactttccccggcttcccgcagaaatgattgaagctgttccactggaagggttttcatttctctgtgttctacctttggcaggacgcagctctctgccggattggcgaggaggattcgctgctcctgggccagttttaaggcagaggacagaaatttggtggatgttccgcaccgtcttggcgctcagtcctttgggctgctctttggcctccagccgatctacccggcctttggtcagcagtttcttgtagagcttctgcaattccagagaggtgagcttttccagcgggatgtccccgatatttggattgatgtagttgtcgatgtagccccggtaagtctggtgggaggagggtcggactttgagcttgtcgtagtcctcaaaccatacctccatccactcctctacagtatacttctcaactttactctgatccagagattgggtttccttaatggcagtcttcagcttctccttgacctctgcctgagttctgcccagcacattcttgtagatggccttacccgtctccgggtcgtgccctgctgtgtaccggccctcccagcgaccatcctttcgttttcgaatgctgccctcgccgttggctcgctttttagccatccctgttcacctcctgttccacagtctcgcaggctcgctgctcttcctccttttggaaggagtacaggccatctccctccagttccctggcaatcccccaggccaacttgaatccagcggtgaagctggcctgggaggttttctcccgcagcaggttttgaacgtccaccaggtacatcagtctgcgccactgcatcttgtccaggtaatcccgcacctcttgtcgggcctcctcaatttcctcctccagttctgagaagtctggctctcggtagaaccgctggtgcagagcggtcatgtaatcgttcattgtgtgtcgcctccttttcagcaacacacaataccctaactgacagacaatagcctgggcaaacgggcagagttatcagaaccttaacaattcgctcttgaactgatctcggccttatcattgttaacaccgtactattttctacggcccttttattttgttttgcggcgcaatttttgaggtctctccgcaccaaccccggagcaaatccccctgacactaaggacgcagggaatcacgaccccggaagagcaaaattttgtcctttacgaccccgccccgcagggcctggaactgcccgcactgcgggcagaagtggacgagctggggcgtttacgaccccggctctttctcctgcttttctttcgtctccgccttgcgcccttatctaggcccgacaccgaccccaattagcctcgtggggcggctactccacccaggcctcaaagcggccgcccaacggctcacaagggcaaatagcgaggatactgcggttgtgcccttttctctgtattgcgtactagtttttgatatgccactctcccgttatattttaaataaatatggaacctcatttactgagatgtgagaccatgttgcatcgagaaatataattatctatgcgtgttctccaacagccaccggaagagtacagacatattggctttggggtcctccaacatccgttccggatgccactgaacgcccaaaatcggcagcgacggatgttcatacccctccacaattttttgctcatttgactcccagaacgcgctcaaccgcagcggcggcgcaagctcctccactcggattccctggtggtgatagctgttgacctcgatttctgttccaaaccagctgctcagtttactgcccggtatcagttccaccgagtgtctgagtcccccgctgtggtctgcaccgcaccaagtcggaatatcctggagcagcaccccacccagggccacatttatcatctgaaatccccggcaaattgcgagaattggctttcccaactggataaactctttggcaagctccaattcaacatcgtctcggggctggtcatagtgctccggcgggtcgatgggactctgtccgtagcagtgaggatcgatgtcaacccctccagtgagcaaaagtccatcggcaatctggatatactccttcagacaggagggttccgctacaacgacgggaagcccgcctgcctgtgccaccccctggaggtagttgcaattcactgaccgggcagggaatccgcccttggataccacgtccgagggtgtgactaaaaccagtggtcgctgtgacatttcttttctctccctcacttacatactttctgccttgttgcaagcggcaaagtgtccaggcgatacttctctccactccggcgtgacattcttgcagtgctcgtccgcataggggcagcggcgtgcaaaacggcagccctcgggaggatcaatgggagatgtgatctcccccttgagtaagatgcgttttttctggtgcaatgtgggcgtgggaatggccgacagcagcgcctgggtatagggatgatattggtgttcaaagagatcgtctccgctgcacagctctaccatctgccccaaatacatgaccataattcgattggccatatggtgcaccacggacaggtcgtgcgtgataaacaaataagcaagtttccgctcctcctgaacgtcctgcataagattcagaatctgtgcctgaatagagacgtccaaggcagataccggttcatcacatacgatgaactcaggctgaagcgccaatgcccgggcaattccaatacgctgtcgacgtccgccgtccagctcgtggggataggaatatgccagacgctgcgccagtcccaccgtatccattagctcgttgacccgctcctccatctctaccgcggagtggcggccgttaagtctcagcggctccagaatgctttcccgtaccgtctttctgggattcagagaagaaaacgggtcctgaaagatcatctggatatgagtacgcagatccttcagctggctgcctttgatgccgctgatatcggtacccttgaaccggatctcaccgctggtaggatccagcaaccgcaccagcgtacggcccaaggtggactttccacagccagactcacctaccacgcccagagtctctccaggctgtaggacaaaggacacatcgtccaccgcatgcagcattccagagcgggttttaaagtattttttcaagtggttgacttccagcaagggactactcacaggactccccccattctttccagcatttcaccatgtgtccgttttccaagtcctttatcgggggccgcttctcctggcagcgctgtgtgcagtgggggcatctgggtgcaaaggggcacccttctcccagtgcggtggggtcaggcatcagccctgcaataggttgcagccgccgtacccggtgggtaacagaagggatagattggaacagacccactgtatagggatgtgtcggaagggtgaaaatctgctccgtggtcccgcactccacaatttcgccggcatacataatggccacccgcttgcagacttccgctaccacgcccaagtcatgggtgatcagcaaaactgccgttcccagtttttcctgcagcttggagatcaaatccagcacctgggcctgaatggtcacatccagagcggttgtaggctcgtcggcgatcagcagttcgggcatacaagccagagcaatcgcgattaccacgcgctgcttcatgcctcccgaaaactgatggggatactctcgaaaacgctcagcaggaattcctaccatttccagcatttcactggctcttacttccgcctctgcccgggagcacttctcatgcagccggatcacttccgcaatctggttgcccacggtaatgacagggttcagcgctgtcatgggatcttggaagatcatggacaggcgcttaccgcggatcttctgcatctccttatccgagcagacagtcagctcctggtctcccaggaagatctttccgcttttaattcgccccggaggggactggatcagtttaaggatagacagggccgtggtggtctttccggctccggtttcgcccaccagtcccagggtctctccgcggccgatggtcagggagactccgtttaccgcctgtaccagaccgtggtcggtagcatattctgtatagagattttggattgtcaaaagattttccatgcttgcatcctccctatcttctcaggcggggatccaatacatcccgcagaccgtctccgaacagattcagggcaaaaatcgtaagcatgatcgccaatccggggaacgtgactatgggccagaagtcacggatatatacccggccggcagagagcatggcgccccactccggagagggcggctgaatgcccagcccaataaagctcagcgccgcagcggacaaaatggcggacgctacgcccagagtggcctggacgataatgggcgagagcgcattgggcaggatctcgcggatgatgatgtatagatctcctgcacccacacagcgggccgactccacaaactcctgttccttgaccgtcagtaccgaggcacgtacaatacgggcatagttcggggcgctgccaataccaatcgcgatcatagcattggtgaggccagggcccagagccgcggagatggagatggccagcagggtactgggaatggccaacacaatatccacgcagcgcatgatgatattatccactgctttgccgtaaaatgcggcaaatgcacccaaaaggcctcccactaccgcaccgatgcctacggcgataaagccgatctgcaaggagacccgggatccgtagatcagacggctgaggatatcacgccccaggttatctgtgccaaagggatgggcaaaactgggatactgattggcaatttgatagttctgctcgtcatagtgatagggcgcaataattggcgcaaaaatggctacgataaacagcatcagcaggatagccagccccaccatagcggctttgttccggtacaaccgaacccaagcttctttgcgttgggcacgacggcggctgcgcatcatctctttgggtgtcatgctgctttccctgcctttcctgcggactttttcttccgcttactgtgtccttgatactgagacttaattctaggatctgcataagcatacagaatatctaccagcagattgatcagactgaaggcgatggcaataaacagcacgccgccctgaaccaccggatagtttctggacttgatggaatctaccatcagcttgcccagaccgggaatggagaagatagactctgtcaaaattgctccgcccaggccacggccaaactgcaggccgacgacggtaataatgggaatcagcgcattcttcagggcgtggcgggtaatggtcacccgttcggagaggcctttggctctggctgtacggatatagtcctggcgaatgacatccagcatagaagagcgggtcatacgggtgattgtagccgccgtgctggtgccgatggttacggcaggcagaatccagtacatgggaccatagaagccggaaggaggcaggatacccaggtagacggaaaataccaaaatcaacaccaaaccctgccagaagtttggcatggacacgcccacaagagccaaaaccatggccaaattatcaaagattgaatattgttttgttgctgatatgattcccgtaggaaccccaatcgctgttgccaacaaaacgctgagtactgccaggagcattgtggtgggccaccggtcaaaaatttcttcactgacagaacggccagtggtataggacacacccaaatctccttctgtgacaattcccttgatgtagttcacatatcgggtcaaaaatggatcgttaaggccaagttcttctctcagagcttcaacttcggcctcttgcgcaccttcgcccaggatcatccgtgcgggatccccctctgatatgtacatcatggagaaaataacaaacgtaacccccagcatgacggggatcatcatcaggattcgcttaatgacataccgatacatgttggcccccccctctctcttaacgggcaataatctcctcaatcagcttttcaaaatagtccagggcgatttgagtcatttcttccccgatctcccggctggaccgtcttgcatctcccaatgcaccgttttcagaggcgtccttcttccagttccaggctcccgctccgtcactgagcactttgcggaaatacatactctccgtgtgcagctggcctggctgcaaattctcatggactacccaggggcacagatacatgcactgagaggtctctacctcacaggcatggccgatcatggagggaatctccatcttcttgctgatctgcgctctggccaaattggtacccatagtggaccaataggcatcgattccgtactcatactgtagtttggttacagcggaggtcagaaccgggcggttgcctccgtgtccgtttacgaacaggatctttttgatcccatgcttagaaaaggactcggcaatgtcgcacaagaggtgaatcattgtttcaatccgcagggtgacggtggtcgggaagggcatatggtgcgtgctaatgccgtaagtcactgggggcgcaatgaggatcttatttcccacccggtctcccagcattttgcagaacgcataggcccgctcactgtcggtgatgaaggtagtgttggggccgtgctgctcgcaggaacccactggaattactgctaccttaatgttgggcagttctttttctacctctggccacaccatttctcccaacacaagacgctgcttcttttcttccattttcttacacctcattatagaaggatgggcgccatacaggcgcccaccttttggatgattagatcattcaggacgcaaaggttacctttgccaagtttggagtattgccggggtgacactcgaagttctcaacatccgcgccagtgccgtagatggcgttggtgaagcaaatggggatcaggttatactgctgccacatatactccattgcttccttatagattgcggcacgctcagtctcatcataagcggctttgccggcagccagatactcgtcaatcttggtgttgttgttgcgcaggaagctatcatacgtggtgggccaaatcatcaacgcgtgatcggggtcaccggtggtcggcgtggagttggtcacccccatggagacggtaccctctgccgccttggacagcaaggtggcctgatccatgatctcgatattggtggtgatacccacctctttccacatattctgggcgatttctactacgttgataaaatcgcggtcctcgttaagcatgactgtgatctcaagaccgtcagcataaccagcctctgccagcagttccttggccttctcggggtcataggggtagggaccaatcttgctgtatccaaatacggtgggggccatgagagagtcggccagctcagcgctgtcaccatagaccgtcttaacgatggaagccatatccagagagagcaccagggcctcacgcacacggatatcgtcgtagggggccatctccatgttcatggtaatataggagaacttataaccggggccggaaactatctttacattgggattctcttccagtctgggtacgtcactggaggacacatcatagatgatgtccacgccgccggtctccagttcgatggtgcggttggccgcctcagtgataatgcggaacgtcagcttgtcataggcaggcgcgtcgccccaataattctcgttgcgggtcagcaccaggctgtcgccggtattccactcgctcagcacaaagggaccagtgccgacaggctgacggccataagcctcgccgcccatctcttccatagcgctcttgcagatgatatcgccgcgggaagaagccagatagttataaatggcagcgaagggctgcttgacgcaaatatcaacggtataaggatccactgccttggtgttttctccgtcgaaggaagagaacatggaggcactgcccggctcagtggttgcccgctggagggagtaaaccacgtcttccgacgtcagttcctgcccgttggagaactttacgccctcccgcaggtggaaacgaacggtcaaatcatcaatgacttcccagctttcagccagaccgggaacgatttctccattttcattctgcacgacaagggtgtcatataccactcgctgcacggcgaagtttgccagagcagtcgaattgtggggatccagagtagacggttctgcgcggatagccactttgagttcattcttggtacccgattcggactgagcgctgcccgacgtcccgcctgatgttccgccgcaagaagacagaagcattaccaggcataacagtgggatgattacttttaccagtcgtttcattctttggttcctccttatacatatttgccgtggatttaggtgcattatatcacacacttcttcgccagtaaataaaattatataaattaattttatttttatataatttactatatttcgcagtttatctttgttctatctgtacagataattttcttgaaaaaccatactaaaaagtataaaatatataaaaacaagagaatactttgtaaagtgagtgacgctatgagcacaccaattgagcggattcgggatgcctaccccaatctcagccggacacagcgccgtatcgccgactatattctagatgcaggagatacctgctgctttatgtctcttcaggaactgagcgaagcggcaggggttaccccggtcaccctattaaacttctgcaagaaaattgagtatttcagtttttctgacttcaaaaaagatctgcaagtttatattcagtcggtcatttccccacgccatgtagtgaaaaccgaccttggacactaccagtcccactccgacgcaacctttttgacccaggccatggaacatgaagtaagtctactgaccgacaccttttcctgcttaaatatggatgctctcatccatgccgttaatatgttgtgccaggccagggaaatttatctggtcggaaaaggcctgagtattcctgtcattgagttatttttggctcgtctcgattttctatccatcccagccaagcggattcctctcgataacctgaatttgctccccaaccgcttggtcaaggctggcccggaagatgtattcgtggtattctcctttcccaactactctccggttctggggaagatcgcaaaaaatgtcaagaccgtactgaacagcagcttaatttgcattacagataagcctacggctcctcctgcctgctatgctgacgcacttcttctctgtcagacttccagtctggtcttttataactctatgacggttcctatttccgttgttaccctgttgacctccctgatggccatcaagacgtccggccagcgtgcctgcttggaggaaaagttgaaacagctggaaaatctacgtcagcgcaccgtccccccagaatgagaccgtctcatgctgtctgctatttttcctgtatcaccggtgcctacgaagttcaaaagggaacaacggacagccatattgtctgctggaaaactctaagtggtcgtttactaataaaagtgaggcaaaacggttgtggtatagaattttcgcctccatgtgtaaaagatcgttatctcttggtcaaaagccatttcaacgtaggaggtactttatagtagagatcgttcatgtgaactgtaagagtaaccaagagagaaattcagttcctgccatttcgaagatttttgagaaggcagcttccatccgacccaaaccgtgacccatacgggatctggggcctacggaatcaccggagcaaacagtcccaaatcatatttcagtccccagcagaaatgacacaaaagtcctcaacggcgccaaacccacatccaggccgcagctcataacccggaggtcgcaggttcaaatcctgtccccgcaaccaataaatcgctgaaatcgtatgatttcagcgatttatatttttgtataaagaaaaccaccggctgagccggtagttccaaaaagctttagctatgcccagaaaaaatatccgagcgaagcgaggaattagtaaaaaacgatggatagaaagggggagaagttttagagatgaatattaggagcaccccaccgctatttaaatagcggcagggcgctccgtgcaagggtaattcagttatgagcctataggctctactggtaataggccccaagggggcctgtgcaaaccaccggcacggccggtggttatgattacaacttttttggcggtttatttttggccattgagaactgatccagattttgaccctcatcggtacaagctcaggatcctccgctgtgccttctctccaaacggccctcttcgctgggctcatatctgatttcagctttttagtatgttgataattttctccgtcgtcttctgggctgctgtcgtgacataggggtaggtgtccagagtaaaccccgctgagtagcgccccaatatcccagaggcggttttcatatccaccccgctctggagtgtcagagttacaaatgtgcgatggagattatagaaccggaccttacgaacccccagcagcattagcacccggcggagtatgtgaagcgcaccgttgtgggacatgaagccgctggtaagactggggagcccccagagagtattcccccacttttttcttctgctgatttgacctgtctgatgtgatcgttgatgtatccccgtcaggtctaatgggaggatgggagaactcaccttgggcatagttctcgaaccagacacccattcactcgctcactgtatgcttcttcgtgcttacttaatctacagttttctcctgctcaatgacctgtttcagttccaccttgttttcctcctggatgcgccccagcacatctcggtaaatcgctttgtccgtccctggggcgtgttcggtggtgtaccggccctcccagcggccgtcccgttttcggagctttccctccccgttggctctgcgttttgccataccgctcactccttttgcagcaacacacgatattgcagaaggagaaagatagccaggaaaacggggcagagctatcaaaacaataacaagcagcctcaccaacatgcttcagcaatgttctgtctgggattgagtagaaatcagcggatgtattgccggaaaacgactaaacatcgtatggttcgctccagaccggtgatggacattttgctggcgttgggcagggcactgcactgcctgcggaaacagtggccatatctgatctgttttctggaggacggacggttgaatcgagcaacaaccgggcggagcgcagtgtaaagctctttgcagtgaggtgaaaaaactggctgttctccaacacggagggctgtgcccagaaccgcacaattgctgacagccctattgagacgaccaagaaaaccggccttgtcccagatcagtatctgatctgactgttgagcggggctccaaaactcgcatcagctgaaaagaattgggcgaagaaattactgccagagaatacctctaaagcagctgcagtatcctcgtaaaaatttaactgtacacctaaagaggtcctgctgatatgcaggtcctttttttctttagagcttctgattttccagtatttcctttttctaaaattggtaaaaacatttttcagatggctgggcacaattgccgtagcggcgctttttcccaaggaaatacgcaatcagctgttttgcggccttcccagcttttgtgaaattgtatcagcggtgcggagcagcatcgcaaccaaggtctctcttgattcgccgcaataatcctgaatcccccctgtgactccaatcgctgctacacagcgcagctcatgattgaacaccggtgccgccagacagccgatgccaagtgcgaattcctcgttgtcctctgcatagcccatttgacgcactctatccaagtagctgatgaatttgcccacgtcatcaatcgttttggaagtcattttttgaaactgtacttggctcaataactggggcaaggtactttgggaagaaaatgcggcgagaacttttccggcggcgctgatatttaggggcaattctgcataaggggtagtataaatcagcactgggtttggaggaaggatctgctcgatgtaggtgacgtggttgcccttcaaaattcccatttggaccgcctgatggctctcaatggccagatggtccagttcagcatggcagacctgccgcaggttattgatataggtcattccgttggataatgtcagaagctgaagccccagatgatagcagccaggctgggattcagactcttccaaatatccccgtatggataattgcttaacgatgcgaaaagccgttgtatttggcagctccaaactttgtgcgacttgcttaatgctgaccggctccctggcttttgccacaaattccaaaatattcaaggcacgatttaccgcaggcactacaggattttctaaattttccatttctatcatccttacatattccgaattctatatggaaattctgcttaaaacttggacgtatatttcttattgttacataagcggtctctttttgtcaacaggcataacaaaaatagcctccttcattttgtaataaaaatcaatttttgaaatacacaaaaaaatctttcgtaaattattgacaaacaggataacagtaatataattaaataaatcaaatatgataatagcatttcatatttgaaatatagaggcggacggaggtaatggttatgttgagaaaacctattgtcggaattattggattctctgacggtgacccagaggtccatgaggaactcaaggatattgttcaaaaacaggtggatgtcatagaggaggcgctgcgcgggagcggccaggtagaggtcatcgtagcggacaaacttgtggcctcagagcgggatgccaaagaacaggccgagctgctgcgcagccgtggtgtggatattacagtattctcctatggcgtgttcgccttccccaatttttcggccattgcggcccgaaacgggaaaggcccctttgtccttgccgcaaatttgaatcccgattggcccgggatggtcgcaatgcttgcggccggcggtgcactcaaccatcttggcataaagcattatcgtgtggccggagacttccacgaacccgcggtcctgaacaagctgctggcgtatgccaggtgcggagccgttgtgacccagctcaacggacagaaatacggactgatcggtggacggagccttgggatgtacagcgcagtggtcagtatgcaggactggcagaaacaattcggcgtcgatattgagcatttggatcaatccgaaattctgcgcattggcgagacgattcctcaggaacaggtggataaagccatggcctggctggaagagcatgtgaaaaaaattcattatgacggccggcagcttacgcctgaaaagctccagcttcaaattcggcattatgaggccataaagcagatcatacgagagcatcactatgattttgtcggggtcaaatgtcactatgagatgagccggcactattgcactcagtgtatcagcgctgcgttctgcaacgacccttacgattgggacggcccgaaggagccggtggtatatgcctgtgaggcggactgtgacgcagcccttaccatgcagatcctgaagctgctgacccacgatccggtcattttcatggatgtgcgccactatgacgcagaccatgatgtcatggttttctgcaactgcggctctcagtccacctactatgcaggagccagtgatgattacagggagaatctcaagcaagtgtccctctatccggcgcttaacatatatgccgggggcggctgccatgtgaactgcatgacccatcctggaaaggccacaatcgcccgtctgaaccgcaaagaaggaaaataccgcatgaccttgatccccgcggaattcgttacacttccggaagaaaaaatggccgagacgaccatggagtggccccatgtgtttgccaagctgccctttgaccacaacattttcctggaggactttgatgccaatcactgccatgccgtatatggggatcacatagaagatttgaaaacgatctgcagtatgctgaatattgactgcgaagtcatgggcgagtgatcggacctgctgaaattgaggagggaattttcatgagagtgacggaacatccaattattaatgaattcccaaagggacggctggtgacctttgagtacgacggaaagcccatggagggatatgagggagagcccattgccatggcgctgaaatccaacggtgtagagatacatcgctataccaccaagctgcataagccccgcggcctgtactgctccatcggccgatgcaccgattgcgtcatggttgtggacggagttcccaatgtccgtacctgcatgactgcgctgaaggaaggaatgaaagttcagactcagtacggcgtctccgcaaaaaaggaggaagatgaatgaagcgatatgatcttgtggtcattggcgcaggtccggccggactgtccgctgccattgaggcggcctcaaagggactggacaccatcgtctttgatgagaatgccaggcccggtggtcagctgtttaagcagatccataaattctttggatcaaaggagcataaggcccgcatccgcggggtcgacatcggcgctcaactggtaaagcaggcggaggaagtgggcgcgaaggtcgttctggacgccgcagtaatgggaattttcccccataaagacatctccattatgaaaggagacgaggtctacacctgtaaggcggataacattattatcgccacgggagcatccgaaaacaccttggctttccctggctggacactgccgggagtcatgggggctggttccgcacagacacagatgaaccttcacggagtcatgcctggcaagcgtgtgctgatgatggggtccggaaatgttggactggtggtgggcctgcagctgatgcaggcgggctgtgaactggttgctgtggtcgatgcggcgcctcgggtcggcggatacggcgtccacgcggcaaaattagcccgcaccggcgtcccgttctacctcggacataccattctgcgtgccgaaggagaggaccacgtcagaaaagcagtgatcgcgcaggtcgacaagacgtggaagccggtccctggaacagaaaaggagtttgatgtagacaccatctgtgtggcggtaggcctgtctccgatgtatcagctggccatgacagctggatgccgattgtcagatgaccccaaaaaaggcggcgttcatcctgtagtgaatcaatttggagagaccagtgtttccggcatttttgccgcaggagatgtgacgggtatcgaggaggccagctcggccatgatttccgggcgcatcgccggggctgccgctgccctccgggccggctacatcagccaggaggagcacgacaggctttacacattataccaatcctcgctggatcagctgcgtcagggaatgtttgcaggggccaataaggggaaccccaagatcacggcgactgacgaagggatccctctgtcggccagcctgctggctaaggggtatttagaggaagatgagatctcaaacttcccgggctgcgaggccggggggagcggcttccatccggtcgtagagtgtacacagaatatcccgtgcaacccatgccaggatgtttgccccaagcgttgtatcacggtgggcgaccggatcacgaacctgcctgttgtgcatccggaagttgaatgtatcaattgcggcctgtgtgtcagtgcatgtcccggccaagctattttccttgtaaacgaggacttggagccaggatacggggccgtttcgctgccttacgaattccgcccgctgccggcaaagggagaaaagggcaccgcattggaccgaagcggcaagccggtctgtccggccgagatagtggatgtgaaaattacggctccctatgaccgcaccccgatcttgacgatgaaggtgccggccaacatgacaggaaaggcacgattttttgccagggaaagcggaagcgccagatgataccggaaacgcatttgaggagggaaaataattctatgagttccatttctgatgagacctatcatctgggagaatttgagcctcgtcccgatgatgatgtcgttatttgccgctgtgaagagatcacaagaggcgaaattcgccgggcggtccacgccggcatgtacacgatgaatgaagtcaagcgcttccttcgggccggcatggggttgtgccagggacagagctgcaacaagaccgttcgggccatcattgcacaggaactgggcatttctcccactgaaacggatgtgatcactgcccggtcgcctgtgcgtccggtccccatgggtgtctatggaaacgatacattttatccaaaatttctgggaggtggcagagatgaataaggccagtgatgtcattgtcattggagccggcgtcgtcggatgcgccgccgcctattatctggcaaagcgaggggtaaaggtaacagttctggagcgcagggaagttgcctgcggcgcatccgggcgcaatggcagcggagccagacagtccggacgtgacaaccgtgagcttcctttggccatgtttggggtaaaacatatctggcccactctgggtgaagaactgggagaggatattgagtatatccagaacggcaatatgcgccttggtaaaacagagaaggatcgggaggcgctggaagagctggtgcggcagaacagctccttggggctggatgtaaggatggtctacggccaggatatccgggagttgatccctgatgtatcgccggaggtccaatatgccacctattgtcccacagacggtcatgcaaacccgatgcgcaccacccttgctctgtataagcgggcaagggaattgggcgcacagtttatcaccaatatcaaggtcctcaagctggaaaaggtggctggaaggatccgcagggtacatacagacgacgggatctatgaggcagacagcgtcatcctgtgtgcgggatttggctccagaaagatcatgcgcaccgtggggctggatgtccctatgctgcctcagctgaccgaggcgttcgtcacagagcccattccagccgtgaccgacaagtttatctccgccgcggatggctgcttctatgcccagcagcagcgcaacggaacttgggtgatcggcggcgacagcaactacgagatatatgacgccacttacccgagggaggttacattctccttttcagcaccacggatcgcacgctttttcctggaatatatgcccactttgaagggcgtgaaagtgatccgctcctggagcggacagctggatatgtgctgggacggctcccctgtcatttctccggtggaagaggtcgagggcctctatgtgggctgtgcattcaccggacatggcttcgggatcggccctgcggcgggatatgtgctggcccagatggctgtgggagagacgcctgccgccgatttgtccggcctgcggtatgaccgcttccggctgcccagccactagcgattgaaagtgccgcatcttctcggcctgaagtacacagaaaagggatggatctataaaaaattattgatcgaaagggagggactactgtggatttttactcagtaattatggacttcttttgggtatccgttattctcttcgtggcaaagatcattcgcgagcatgttaaaatactccagaacttctttatcccggtcagcctgatcgctggttttattgcctgggtagttggaccttatggcctgaagatcgttcccctgaccagtctgtgcggggactatgccggtgcactgatcacagtcctttttgccaccattggcctccagggactggggatcaaaaagggcgaagggaaaaaacgggccaaggatattgccggttactgtgtctatcgccagatcaactgggctgtacagttttccgttcccatgatcctttccatactccttctctcccgtctgcataccggcggtgacctgcatcctgcatttgggtggctgatccccgtctccttccttggcggtaccggcccagccattgcggccggccaggtgctggataagtatggattctctgattttactggactgggtatcacagcggctgcctacggcatgcttttggggctgatcggcggcattatcatgaccaagctggcgacaaaaaggggatatacatcttatatcgagaatacagatacgatcagccgggagctccttaccggaattatccccaagggcaagcgcggctccattggtgaggagacgatcgcctccattacgttggagcccttggcgtggcacttggcccttatcatgatccccaccgggctggcacatatcattacgatttacggcagcaaagcgctggggatcgagctccctgaattttcgatcgcattttttgtgtccttgattttgtactatgttttccaggcgacgaaggtcaacgactcggtggacccaaaggtgatcaacggattcggcaatctgatctctgactatgtggtggtattcagcctggcgatggtccaggtggacgttatcatcaaatatgcggcccccttcctgctgctgatgctggcctttactgtctggatggtagtgtggttctggttctgcggcccccatctgatcggcaaggattggtttgaacgcggattgttcaactggggttatgccacgggcacgtttgctacgggcttctgtctgctgcgcgtagtcgatccgaataaccggagcaccgctctgagcgatactgcgatcttgactccctttgaacatgtggtggaaattaccgcgctttccttgggacctgtactgttgtcgaccggtgcggaatggtcttacctgggcgtggttgtggtttacggtctcctctgggtcgcttctatctttttcctgaaagtgtggaagagaaaggtctgcaaggtcagtcccacaaatcctatgtattgtccgtcggaagcacagaaggattcacaacatagctcttgtgtgtgatcctttggctgtgcctgtcggaagcgcagatatcccgctccggcaggtacagtcattcccaatctctatgctgtttccgcagggacagctcacaaacggtgctggtctgatacaaggaggtagagaaaatggaccgtaaggaacggacccttcgggcattgcagggtttgccggtggaccgtccgcctatggtgttctggcaccactttgtgggggccgatatggaaaaggaaaactttgtggattcacatgtccgtttttatcgggagactggcgaagactttataaaaatgatgtgtgatggctttgtagctcttcccgacctgaatgtccagcgcccatgtgactggaggcacattgcgctgccgagtatggatgatccgtttgtacaggatcagcttacccatatcaagcggcttcgggaagcaattcaggatgaaacggctgttttttacaatgttttcaatccggtgtccacactgaggagttctacgagcgatgaactggtctatgaccatttggaacggcgcgagcccgccctgtttgaggcgataaccagggtgaacgagttcaaaatggagtttatgcaccggctgatctcagacgctggtgtgaccggcatgtttctgccgatgcagaataatgatttgaacggctttaccggagcgtgctatcatgaactgctccggccctatgacctgtcactggtgcaggaggcaaatcgtctctctccgtataacatcattcatctgtgcggatattggggagtgcccaataggctggaaaattggaaggactttccctgtgcggcaatgcattgggatgtccataccgataaattatccctgcaggatggacgcaaatatttcacaaagaaaaaggcggtcatgggcggtttcaataacaaagaaggcagcccgatctatctggcagatcgtaaggccgttatagagcacacaaaggagatcgtccgggaggcgggggccgacggattgatcgtagccgcggactgctcattgctggaaaccgtggatcatgcccgtgtccgctgggtgcaagaggcgcttgattctatggtgaagatgtaatctgctgcgatttttgccgcggggcaatgactgtgcacggggacagacttcctgctgatgattgaacacaaggggaggataaattatgcaacgaatcatgaacaatccggacgatattgttgatgaaatgcttgccggcttcgtaaaatgccatagtgatatcgtaaaaatggtcaaaaccggagaagaaaatccaagaggcgttgtagctgcagtggatgcgcccatcgcggataaggttgggatcgttacggggggcggctctgggcataaaccggcctttatcggttatgtcggaaaaaatatgtgtgatgctgctgcggtgggggagatatgttcctccccggcagcgctggctttcctggaggctttccgcgccgctgacggcggccggggtatcgcctgcctgtacggaaactactccggcgacaacatgaatgtaaaaatggcggtcaagatggccaaacgtgaagggctgaccgtaaagactgtggtcgcaaacgatgatgtggcatctgcgccaaaagatcagcgggaaaagcgccgtggcgttgcgggcgagatttttatgtggaaatgcgcaggagctaaggcggcaaagggcggtacattagatgaggtcatctccgcggcacagaaggcgatcgaccactgcagaagcgttgggatcggcctgaccccatgtactcttcccgcagtggggcatccgaatttcgagatcaaagagggcaccatggaggtcgggatcgggcaccatggggaaccgggcattgaagtttgtccgatcgaaagcgcgaagcagatggccaagcgcatgctcgacatcgtgctgcctgattatcccttccagagtggggacgaggttgccgtactggtgtccggcttaggggctacacctttgatggaggtctatgtcctctatcatgagatcgaatccatcctggaggagaaggggattcggatctatcgccattatgctgggaatttctttacctcactggacatgatgggagctacggtgactgttatgaagctggatgaggagctgaaagaattgatggatatggatgcctggacgatgggtttcaaacagaattgagggaacagaaatgtcggtggtaaaaaacaaaaacggtcgtggtattttattggcaatggtccacgctatacagcaaaacaagcagctgctgggagatgtggacggactaatcggcgacggcgaccacggcatgaacatgaacaagggatttaccttgtacgaagaacagctgggggatcaagacacttcgctttcagacggactgttcgatctgggatctgttctgctgaataaaatcggcgggtccatggggccgatatacggcaccattttcatggaaatgtcctctgtcatagaagatgttgaggatattacgctggaaacattcagtgaaatgctccgctccggcctggatgggctttatgagattgttgacgcccgtcccggtgacaagactctcgtcgatacgctttatcctgtctgccaatatgtccgtgaagcagcaaatgtccaaacggatttttctgcagcattggaggagatgaagcaggtcgcggagcagggaaagcagtctacgaaagacctgacggcgaagtatgggagggcggcacggctgggagagcgttcccgcggtgtactggacgccggagccacctcctgctgcattctcctgcaggccatggcagatggaatgaagtccgtactggagaactgacatacaggaaaggaatatggcgatgctgaaaattgcggttggctgtgacccaaatgcggcgtctgcgaaagccgccctgatgcaatacttggggcaaaaaggatttttgcttactgactttgggagcgatgatccgatttatgcaaatgttgcaataaaagttgccgaagctgtttccagaaaagagtatgaccgcggaattctgatttgtggtacggggcttggtgtgtctattgcggcaaataaagtaaaaggcgcctatgccgcgctgatcaccgacgtgtactccgccgagcgtgccaggaagagcaacaacgcaaatattgcctgctttggtgcctttaccattggaatccggctgatggaaagactggccgagacctttctctcctccgagtttactcccgggtgcgcatctcagccaaagatagatcgaattgccgcctatgagcggtgatgaaacaggcttggcctcctgcctctcataaggtcatgagttttgatgataagtctctcattgcagcctgtgggcagatgtagaaagccgcttcggagattagtccagaaattttccgctgagtttttgtgcggaggcctgccgggaacggtctggcactgcgcattaaaaaaataccggctgccctgagctttaccaggacagccggtatttttatatttggtacaagagatgcttggaggaaagccggagatgaagctctcgtttacttacagtctggtactttgcgtatgatgcagactgcatgatgaggtcttgaggtataataagtcttcggtaaaaaccatctcgaaaagcattgggcgtctgtccaaccagtgctgggacatccggatcggtgatcaagcacatcggcgctgagatcggtgacatccacgcacccagggatatcatcatctatctggccttttacagccatctcggcgtccccttcttcaccgccatgggacaggagtccgccctgcacgggtgaaatgggagccgcagggagaaggagaaggcgcgctgccgccatcgggctgcctctcttaataccggggcttccgcacaggtggggcagaaatgggcgcagttccgtttcacttccataatttgtattaaaacgtctcacaaaacagcttttccctccggttttgagcgggtccggatctgccgggcccagtcaggacaggagggattttttatggcaagcggacagacgcagtattatgggctctcccagtgggaggccgtggacaaggtggagcgggtggacttcaactccgacaacgccaagatcgacggggcgctccacgccctggcggagcaggcgggccagaaggccgacagatctgcagtggacagcctgtccaacgtggtggagcagaaggctgacaagaccgccctctcagcggcggaggggcgcatctccgacctggagagtggaaaggccgacaagacggagctggccgccttgggagcagaagtccatcatctgtccgaaagcctctgctgggtaaggctggggagctggacactggccgcttctgcatcctcattggatctggatctgtccaggataccggcagaacaatatgcacgcctgcggctggtctataccatcagtgcgccatccgtcacctcacttcgggtccagctcaacagggtgacgggggccgtctatcactgccaaagcagtcccggccgaggagatatccggctgggagacagtctggaggggtccagctcctttcgggagacggccgcgggggaggtcgagttcttttcccttggaagcgttgggacgggggtcctgggtcagggttgcagccgggacagaaacagcttttgggggttcggaagcgtcggcctggcctctggagtggagtttgaggatttgagtgccatccggctgttctgctccgaacccatgaacaaaggcggcagcttcattctgtatgggcttcagcggtaggcaacggcgtctgcggagcggcagaaaaggggaccgccccccgggtcaccggggggcggcaaaattaacttgtgatcttatcaggcgaaatcaggcagtcagagtaattgtgacgaccacaccatcgatcgtataattgaccgacccaacagccacagtaatggaagcgctcttggtaactacatcgccttcgctaccggtcacattgccagcaatatcagcggtaatagtagttcccgtatatttgctctccagagcactcttcaaagcagtctcagccgcattagcatcgatgccagaagaagaaacctccacactcacagccttgccgattccgtccacagcgtccttcacggtcttgtaatcggtagccacataggaagcctggatctccttcgtgtcctgagcctcaccagcagtgatggtcacagtcacagtggcggtaaaggtatcctcctcaccggcggtgatggaaccccagctgggagcagaaaccgcataggttacaccatcagcggcaacgggcagcttggccttgatcgcatcggcgtcaggagcggaggtagaggcaacgggggacagagtcacatcgcccagggcagccttggcgtccttgaccttcttttcgtcggccagcgcaccagcagcaccggtggtcttcccatcgatatcagacttcgcctgagtcacgatgccgtcaatggcgttcttggccgccgcatcgatcttggcgttggcagcagacacgatcgcctcgatctcacggacctcggttccggtcagcttatcctcataggtgttcagagcagtctccttgtaggagttcagctcagccttggcagcggtctgatcagcggtcagagcggtctgggcatcggccagggccttgatcacagcctcgacgtcggccttcacagcggcggagatgtccttggtcaggtaaccctccatctcagtcttcagagtggtcaaatcagcggcggtgtagccattggtagccaggaaagcgttgatgttgccgacacgctcggaggccttagcgtcatcatcatacacagtagcggtgaactcgccgtcgatgacataaatcagctcagccagctgcttgtcgttcttggcgatgtagacataggtgatctcatcgccggcaacaggagtcttctcgaaaatgatgtcgctcttggcgccggactccaccttcttgccattgttatagatgtggacccagatggtgtcgctgttccaagtccactttccggacttgttgtcatcggcggtctggtttgtgacaacggagttcttgccgacctcctcgatgggcaggtacttgttgtcagcagtgtccaccttggtgtactccagcacgcggccctgatcgtccaccttcacgaccttgtacaggccgataccggtggtcgcgatggtatcctcgctggccttgatcacgaagggctcctcagaacccttgtcgatcttctcgccgtccacatagacggtgcggtaggtgtactgggtgccgtcgatcttaacagtcttgtagtcggtggcgccggccacatagaagtaagtggaatcctcgccgtacttggtgccctggtcaacgatgaagacgatgtcctccatgccgttgccgttgtggtccaccaccatgatggtggcgccgtcatagttgggcacttcctcatagccggtgtaggccaccttgtcatccaggtcggcaaacacagtgttcaggtccaccgtgtagacagtggtgtcctgatcgtccacactggtggtgtagatgctggccttgtcggtctcgatattgacaacagcctggtcagcggtctcgaaggtaagggtatagacatccttgctgttcttctcgtaggcaaaaacgactccctccagcttgtcggcgtcggtgtcgttcttgacctcgaagtcagtggaagcactgccggtgccgttgaacttctcaatggtgccgtccacgtcgatcttggccacggtgccgtcggggaacaggaccttggcctctacgtcgccggtggactcgctggcgtcgatcacatagacgtagttcttagacacgtcctccagagcggcgaagcccaccacgaagccgttgggatccaggtacagacggtactcagtctccagagcggggtcggcagtcatgtcattgttgtccagatccttggcagagacctcgctgtacacgtacttggtggagtccagctcgatatagttgccggtgtcatacttggggtcctggctgacagccttcacggtgccgtcagcggtctcaggagcggccatggtggcgacgtgagcgtcgtagtcgctgccgtcacggtcgtcacaatccacggtgaacaccacataagcgtcctctgcaaaggcatcggtgtagaatttagtatccagctcagcacccacgtcggtcagagcagagttgatgtcatcgtagctgccgccgtcataggtgatgttggtcagctggacatacttgccgtcggcatcgtcacggacgcggctgacttggccgatgtagttgtagtagcagaccacagtgacggtctcattggcggagtcaacgtagatctcggtcaccatgccgctgtcggtgtagatgtagtcgctggaattgttgccggggcgagtcacataggactcatcgacatcatcataatctccatcgtcattcttgtcatagtcaacggtatccagatggccatccacgtagacagtccaggcataggaagtgatgatgccgcggcccagatccttgtacagggccttctcctcggtggcgccggtatagacgtaatcaggctcatcggcgatggtgatgatctcgtcggaggcgagcatcttcacctgaccggggatcaggctgccgtcctcattgaggccgtagttgtcgttgccggcggtggtgttggtctgcacccgataagaaccggtgccccaggtggtggcgggacggccataagtggtctcctcaccggtcttgtagaccaggtcaaagttcttgtagcccagggtatcggtgtagtagaaggtcagggagtacacgatgcccttgttctcgttgtagtacacgcccagcaactcgttgtactggacaggcacggccttggtcagggcgttgaacaccagctcggccacgttgtcgcgggtcaggccctcgttagcggtcagcttcaggtcgccgtacaggcccagagcggtgcccttggcagtggcggccagcatccagttgtcgccgaagtcagcggcgttctggaagtagcccagggcgcggcacagcatcagcacggcctgcgcggtggtcacggtggcgttggggtcgaacttgccgtcgcccacgccggccacgatgcccaggctggagcacaggttcacatagccctccgcccaggcggggacgtcggtgaacacgctggtttcagcgaactgagtcacgttgaacccagcgccgtagagcatggtggtgatgatgaccgccatctcggcgcgggtgactacgttctcggggccgaaggacccgtcctcgtagccgtcaaagaggccgatggcagaggtgaccgccacggcgtccttgttgacgatctcagcgttgtcgctgaagtcgtcaaggcccttagcactggaacccacgaccatcatgcccaggagcataacggaagccagagccaggctgagagcacgcttcaggtttctcattggatattcctcctttttatattgacaaaagtcgctgttttctgacaaaccgggccttttccagaacatttcggcccactatgcctgtacaacacttctgacacaggagaaattggttataaaaagggggagatcaagggaaaaatccctgagatcacgcctaaaaagtttccctggtagacatttggtagacacatgaaaacagaaggggcggcgaggccctgaaactccaggcccctgccgcccttttttggtagacttttggtagacattttgcttttttacatctgtctttgcaacggtgtattccctgtacacttgaaaaacctgcattggcatagtataatcattaaaaatctctaatttcggtttttgtttgtgtgtagaggttttcgccccctagggggcacacaaaagaatcggagttttcggaaatacagtgtaccttttctgaagggtatgcctcagtgcatatcttttctgtggccaatagtctcaagatccggtgttgtaggaggacgatagtatgagcaaacgaatcattacgatcagccgtgagtttggcagcggcgggcgcaccatcggcaaggaggtggcacagaagctgggatattcttattatgacaaggagctggtccgccaggtcgcggtggagaccggctttgatgagaagtacattgaacaggctggcgagtatgccccctccaaaaactggctctcttttggttttgctgcccgggggtcccagggagccatggagggaatgtccgccaatgattttctttgggccattcagtgcagggtcattcggagccttgcggaaaaagagccctgcgtcatcgtgggccggtgtgccgattatatcctgcgggaacgggaggattgtctcaacgtattcattcacgcctctatggcggcccgggcggaccgtatcgtgcgcctgtacggctccagcgagaagagcccggaaaaacgcctcgaggagaaggacaagaggcgccgcgtctactacaagcactataccgacggggattggggcatgtcccagaactaccacctctctctggacagcggaatcatcggcatccagcggtgcgtggacatcatctccgagctggcaaagacactgtaaaaaactgcggcggatcttaatctttccgttgacaaatctacaaaatctgatagaatgttttttgcaaactgaatagccttatcaagagtggtggagggaacggcccgatgaagcccggcaacctgcgttccgcaaggtgccaaatccggcggtagtgtatcgaaagatgagggtgcatggactctgacgctccgcctcggcggagcgtttttcatccccccgacagaagaaaggacgaaatattatggcaaagcgactgtttacctctgaatcagtgaccgagggccatcctgacaagatctgcgaccagatctcagatgcggtactggatgccatcctggcccaggacccagacgcccgggtggcctgtgagaccacggcgtccaccggcctgatccacgtgatgggggagatcactacctcctgttatgtggacatcccaaagatcgcccgacaggttgtgaaggagatcggctatgaccgggccaagttcggctttgattgtgacacatgcgcggtggtcacctccatcgatgagcagtctcccgacatcgccatgggcgtggacaagtgtctggaggccaaggagggcacccaggacgacggcctggacaacggggctggggaccagggcatgatgttcggctacgcctgcgacgagacccccgagctgatgccgctgcccatctctctggcccagcggctggcccgccgcctgacccaggtccgcaaggagggactggtggactacctgcgccctgatggcaagacccaagtcacggtggagtatgacggagagaaccgccccctgcgggtggacgcggtggtggtctccacccagcacgggccggaggcgtccctggaccagatccggcaggatatgatccagctggtcatcaagcccatcatccctgccgagctgctggacgatcagaccaagatctacgtcaaccccaccggccggttcgtcatcggcggtcctcagggagactccggcctcaccgggcggaagatcatcgtggacacctacggcggcagtgctccccacggaggcggcgctttctccggcaaggaccccactaaggtggaccggtcggccgcctatgccgcccgctgggtggcgaagaacgtggtggccgccgggctggcccggcgctgccaggtccagctggcttatgccattggtgtggcccgccccgtctccgtccgcgtggataccttcggcaccggaacggtgccggacgaacagctctccgacgcagtggaacaagtctttgacctgcgtccggctgccatcatccgggatctggggctgcgccgccccatctaccgccagctggcggcctatgggcactttgggcgggacgacctggacctgtcctgggagaagaccgaccgggcagagtcactgaaggcggctctgtaacggcgtcagcggccaggaatcttttcagttggcgcctcatagactgtacaggcgcaaataagggccggaggagatcctccggccccttctttctgaatgaccggccccggggctggacaatcgccgcgccatagggtaaaatagagagaaaacagccgaaaatgggtatctctgcgccccatacaggaaggagatcatagaatatggattacagcgaactgcttcgccacgtggatcacacacttctgacccccaccgccacctgggaccaggtcaagacggtctgtgacgagggcctcacctgccgcactgcctccgtctgcatcccgccccgctatgtgaagcgggccgccgcctatgtgggcaatcagctgaagatatgcaccgtggtgggtttccccaacggctactccactcctgaggtcaaggtgttcgagaccgaggacgccatccgcgggggagcggacgagatcgacatggtggctgatctgggcctggtgaagagcggcgactgggagggggtgctggaggagatcaaggcggtcaaagcatcctgtaagggacgtatcctgaaggtcatcgtggaggcctgcctgctgacctgtgaggagaagcaggccatgtgccgtatcgtctccatgtccggagcagactttatcaagacctccactggcttctctaccggcggcgctacctatgaggatgtgaagctgttccgggagcactgcagccccgatgtgaggatcaaggcggccggcggcatccgcaccctggaggaggcccagacctacctggaactgggggccgaccgtatcggcagcagcggtctggttgccctggcccaggctcagagcaacggctgagcccagcccttttcacaccgaaaggtccccgtccattgtgaaaatggacggggatctttttgcgttctgcaggcgtatcccgcaggagtgacctctcgtggggcccacggttctggagcggtcagtattgcaggcctccgttcacatccagcacctcaccagtggtccaggatgcgtcatcgctgcccaggtatgcgatggcgccggcgatgtcatccagctctcccagtctcgggatgcggacacccgcagagagcttatccaccttatcctgagagagagagaggaacattttccccttcagcggcccaggcgctacgctgttcacggtaatgttccaggggcccagctcatatcccaggcacatggccatgccgttgatcccagcctttgctgcagcgtaattcacccccacccccgggcggcccgtgcggcccccaatggaggagatcagtacgatccggccgtagttctgctccttcatggcggggaccaccgctttcaccgaatgatagacccctgtcaagttaatgtcgatcacatcctgccactgggcttctgtcagctcatcgatgggaaagtgacggagaatacctgccgtggctaccaagacgtcgatcctgccccacttttcctttacttcggctgcggcggcctggcagtcctccaagcttcggacgtcgcccgggatggtcatcacccggtcctcatcccagccttcctctttcagcatcctggcctcctggtccagcgcctcccgggaaaaatcggtcagcgccacttttccgccctcagacagcagccgccgggcagtggcgccggcgatatcccccgcgccagtgatcagcacaactttatgttcatatcgctccattgcatatccctccagtcttatcgttgctcccccagacatgcctttgccccttccagggcccgtctggcatgggtctcatagcctatcttttccactcttgtcaggtggggcacttccacaccgcacaccacctgcgggatcctggaaatgatctccgcgatggggattgcaccctccccgggatacaggcgttccgcccggccggtgtggatcagtgccgcctcatctgtgggaattggagcctcacagtcgcacaggtgcgcgtaatggaaccagctctgggggcactcctccagctcatgcagctggacccgggagcggtaaaagtgcaggcagtctaccaccacgcccacgttctctttgccggagtccaggagcagctgcctgacctgacggagatcggtgacactggcccatgtgacgaattccacgctgaccgtctgctcatatcgggcggccagctcacacagccggcagaactgatcggtataaaatgagcggtccggggtccagatgttggtcaggatgtgccggatgcccagctctgctgcggccgccagcgccggttcatagtcctgcacatccactccagccgcgatgcgggcattctctgtatcgtgcagcaggatgcctgtctcctgagcggcccgccgggtctcacgaagcagatggggatcctttgcgatgtcatagggacgctcccccggcagccccatggggatggtccgcaggctgaccgcatcatagcccgccctggccgccacccggatcatctccgggggcggacagctgatgtttgtcaaatggaccagggagtaaaggtgtttcatcagttgcctcctaagatatcatcctccgggaaacggggcccgcggtgcccgctccccggaggacgaacagtttctatctcagacgttccgctcaggcgtatttctcagcggtgctgatctgcatgtccaccagctcatcgccgtaggtggcgcggacctcgtcatagacaccggagcacttgtcccgcagttgctccagaacgtcggcggggagttccacgatctcggttccggtctgagccaccaagtccatacgctcagagagccgggcgtcgcactgctctctggaatactgaatggcggccttgcccacagccatgatcagctccttgtctgtatcgctcaggccgttgtagacgacctggctgatcagcaggttgtgggatgcgggcagatggtttgtcaggatcacatagtcctgctgctcatacaggcggttggcgtagatgacctcaaaggggttctcctgggcatcgatggtgccctgctgcagcgccatatagacctcagagaaggccataggggtggggttggcgcccagcgcctgccagatggagatgtgcagttggttctccatgacccggatcttctgtccctgcatgtcgtcaggggactggaccttgatgttgctggtcatctgacgcatgccctggtcgaagaagccgatgagctcaaagcctttatcctggtatttctcctcgtagaagcggaagaccgtctcatcgtccatggtatcccggaactgttgggcatcctgatagaggaaagggagatcaatggcattcagctcagggacgaaattggcggtgaatgcggtggaccccaggaagaaggccacatcaccggcctgtgtagattcgcacagctcagtgtcggtccccatggagccgttgaaatacatctggagctggatgcggccgccggtgatggcgttaagctgatccgccatgtaatggaccaacaggccgtccacgcggtcctcggcgccgtcggtggcaatgatgaaggagtaggagtcgccctgggtgtagtccacagagctgtccagttcaggctggatgtcgtaatccgccacgctctgaacggcgccggagcctgtgctggagccggacgggggcggggtggaacccgcggaggtcccccctcctccacaggctgccagagacagagacattgctgctgcgagggtcaagctgatcagtttttttgtggtgttcatttgaattctcccttcctgatttgactcgccgcctgaggcggccgcttgttctgatgactcaatcttatcagagcccttttcagaattccaataccggtatcacataccagagatcggttttgaacatacctttctttttggttctttttgggactttttcctgtcttgacgctgtggaaaaaggggtgctataataattttagacaaaatttgacccaaattccggggagggaccgctgacatgaatcttcagcagctgtattactttcaggccatcagcaggctgaaaaactataccaaagccgcagaacagctcctggtcgcccaatccagcctgagccattccatcggggatctggagcgtgagctgggcgtccctctcttcttcaaggtggggcggaatattgatatcacagaatacggaaagcagttcctgatccatgtggaccggatcaccgcggagctggagctggccaaccaggagctgaaaaacatgctcaaccccaacatgggcaagatccgcattgccctggcttacaccgtgagcaaccgctttatccccaatatgatcaagggcttttacgaaaatgaggacaaccgggccatccagtttgagttcagtgaaaagcaggcggcaaagatcattgacgcctttgccaaccggactctcgacctggggttcggcgcccgaatggacagcgaccaactggaatattttcacatttttgacgaggagatcgtcgccgtggtctccagccgccatcccctggctctgcgcgggagtgtgaagctccaggatctgattcgggagcccatggtctcctatacctataactgcgggacccggtactggatagacgacgtcttccgccggtttcagctcacccccaacattatccaggaggtggacacggaaaaggtgatggccagtgctgtagcctctggtctgggcgtggccctcatgcccagaatgacagagctgagcatctacgatgtggtccccctgacgctggagaattcggagctccaccgccccatgttcatgtgctggcccaagggggagaccctgcggccagtggtcaaaaattttcgggactacattatggaccgggtgggcgagcttccctcctgaaccgttcccacagcacaggggcgcgatgtcccgcatatatagaaaagcagaaagacgctgcccagggagagtgggcagcgtctttctgcaagagaagaggaaacagaagtcagcggatcaggcacagcgagatctgtgggaagatcacgatcagaactaggccgatggcaaacagtatggtaaagggcagcgagacctttgcgatccggatcaccgggatcttggtcatggagctggcgacaaacagattgatcccaacgggaggagtgacaaagccaactgccaggttcaccaccatcatgatgccgaagtggaccagatccaccccgatggcggtcatgaccggcgccaggataggcgtgaggatcagaatggccggggcggcgtccatcaccatgcccacgaagagcaggaagatgttgaccaccagcaggatcgtccacttgctggagaaggaggatgtgatccaagcacccaccatctgcggcacgttcatcagggccagcacgcgtccgaaggagacggcggcggagagcacgaagaggatgggggcgatcgtcttcagagactccataaaaacagcggggatctccgagaccttgatggtcttataaatgaacacgctgacgaacagggcatagtagaccgagatcaccgccgcctcagtgggagtggcgatgccgccgtagatgctccccaggatgatgaccggggtgagcagcgcccagaagctgtccaggaacagccggaggaatccctgtcccctcagctcccccatcaccgccttgatgcgcacccggtcctcccctctgcgggcggagtagtagaccgcatagatcatcagcaggccgcccagcagcaggcccggcacgatgccggcaatgaacatatcgcccacggaggtgcccgccgaggtgctgtacagcacaaaggggatgctgggggggatgatgcagcccaggccgccggccaccgtgaccacagcggtggaaaactctttggaatagcccaggttgaccatgaccgggatagtcatggcgcccacagccgccactgtggcaggggcggagccggagatagccccgtagaacaggcaggtgatgatgacggcacagggcacgccgccgatcacattgcccacgaaataagtaaagacgtcaaagagctttttggagatgccgccccgggccataatggtgccggacagcataaacatggggatggccagcagagtcaggctgttgacgccgctcatcatctgccgcaggaccatgaccagattggccgcgaaggtgttgtccacgacccagggcaggatggagctgatgcccatggtgaccgagatgggcaggccgaagagcaggatgacaaaaaacaggacaaaaaggaccacggctgacatactcactcatctcctttctgaagcagggtgcgcaggttgctccataccccctgagccgcccggaatgcggccagcgcaaagcccaccatcagggagccctggacaaaatacataggtatcccgcaggcggcgctggtctggccgttttccactgaagcgtaggcgaactcccaggcactggggagcagatagaggaaaaagactgtcatcacaacgtctcccaacagcaggatgaccgcctgtacctttttggggaagagggagatcagagtgtcgatcttcagggagatcccttccttcagacagaaccctatgctgaggaaggtgctccagataaacatgaagcgggccagctcctccgaccaggtcagcgagttgttgagcacgaagcggcagaatatctggatacccagcaccagcgtcatacccgccagcaggagaaacatgacccagcgttccagattcttgtcgatttttttcagcagtttcattttatacctcctcatttccttgtgtgcaggtcagccctccggcatgggagtgtgcgccgtacagaccagaaggacgatcagcggcgcccttccgtcattgaagatccggtggatctcaccccggtctatcaggatcagttttccctgatcgatatgggccttcacattctgctccatgtcctggatcacaccggagccgctgatgacatagctcagctcctcagaggaggggtggttgtggaacacgctcccctctccaggtgcgtacactgtgacattggaacagaagtccaccgagtttttgatgccaaagcactggaatcgcttgcgcatcgtgccgggactgtccccctgccagactccttctccatctaaaaatggatcgattactttcatgccgttacctcccgtcgttttcccctgggagggtccagcggcagtgtcacctcccaacggcctgtcttgtacttgtattatccgagaaacctgcacaaaagacaaataccaatatcacatagcatctattgcttttgaccatgcgttttgagagggcgtcccgccatatcagcaggggtgtggatagggcggcggtgggacgcccagcgcatgacccgcaaagtgcccaaggtgtgctgtatccgcggaggtaagctgggcatagttctgccaagcttccataatttgtatcaaaacatctcacaaaacagcgtttccctccggttttgaacgggcccggatatgacgggcccagtcagaacaggagggaatttttatggcaagcggacagacacagtattatgagctgaatcaatgggagggccgggaccaggtattgcgcaccgagttcaatgcggacaacgccaggatcgacagggccctccacgagctgagagcgcgcaactgccagctctacatgctcacctatacggggacggggagcggcggccgcagcttcacctttccccacaggccggcggcggtgctgatcatgggcgggatcgtgacctttttgtgtgcgatccagggggaatcctacatctatctgcggtacgggaacgtggacaacaaatcccgggctgtatgggagggcagcaccgtgagctgggaactggccaatgacgacccggtgcttgccgcaaacgctgccggggagcgctacaccctgctggccctgctggacgcggatgcctgagccgtaataagagcacccccgggcttcggcccgggggtgctcttcaaatagatggggtgattttcaagaaatacgcctatccatcaaatggttgcggtaatgtccacaacatcggtaccggcagcatcaatctgcaggtcgaagttgcgggtcatctcagtcgcaacagcggtaaaggagtcctgctggctactggtgacgttagttccaccaaagttgacagtcacaggatcaccagcctgcaggccagaaacagtgtaagagatttcaacctcagttgcatcatcttccacataggcaggaccagtcacgttgctgccctcagcataggtgaccttaacatagccgctcttgataaccacgtcgcccttgctgacgtccacagtccaggtatcaccagcggcatacacatcgttgattacgtagccggtgccggtacccttcaggctgtcaacatcggcatcaccagtcgtcttgtaaacagcttcagcatcatcgattgttacagacacatagccgtcagtcacgacagtgtcagcggtcagagctatagtctcgtcaccatacttaacataatttgcgtcgaccttagcgtaggtggaaccgtcgtcggtgcccttcacagtgtacttctcgccagaggcaatgaaggtcacctcagtgtcctcggtgatcttgatctggttggtcaggatcacatcgccagcctcagggatgacatcagtctgaacaccctcgccgttcaccacgatccagttagaagtgtacgtgatcgtctcgcctgcgggagcggtcgtctcttttccgttcagggtgtaggtgatgacctcgaccagatcagtgtcgacatcccaggtgaacttgctgtcatagcccagcttatcctggccgctgaaggtataggtggagccggccttgctgatggtcacgttcttgtaaccctcgtcagccagcttcttctcgatggccgcaatggccgcctccagagcgggcatctcgccctcgtaggtcacagtgatggtgccgtcaccgtttagagtcacagtgccgtcagccttcacgatggccttggtggtcacctcgaccttcatgtccttggtgacgttcttgatggtgtagacgccgtctttggctgtaagcacggtgccgtcttccagcttcacggagaccaggtcataaccgtcagcagcactgatagagaacttggcatccatgcccttgtcattgacagtggccaccttgccgtccacagaagtggtggcggactcggacttcacagtgaagtcggaaccggtgaaggtgatatcgcgggtgtcgcccttctcggtctcagtccagaagatgtacaccagacgggcagtctcgtcatcaacggtcttcatgacccaggcatccttggcggagtaggtggtgttcttgtcggacttcaggtccttcagatcgtcgatgtcaccatcgtcgatcttccactccacattgcccttcacgtccaccagcttgcggacggtgacatagatggtctcctcgtcggtgtcgaacttgtgctccttatcgttggcatcgtcgatccagaaggcattgtcgccgacggcagtgggctcgccgctcaccttagcggcggcctcctccagcttggagatgtactggccgtcctcgatggtctgggtggccttatagagcacgccttccttcaggacagttctggggctgccgtacagatcgttcacggcgtcataggtcacgaacacgctctgcttctggccgtccacataggcgttctcatactcccagtagtagtcgtcatcgtcatagtcgccggactcgcggtcggtgtcggccaggacgaaataggtggcgttgtcgtcatagatctcgccgtccaggatgaagacgacctcggcgatcttgccatccgccttctcgttgttgtcgccgtccaggacataggcgatctcggcgttctccacattggggacctcgtcatagccggtataggccacttcgccgttcacatccacgaagatggtcttgcggtccacgatgagcttgaagtcctcgtcgccggcgtcgatgtaggccttgccgttgtgaatctcagcgccgtcatagtagtactgatcctcggcataggtcagggtgtacacgtcagaattgctcacagagtatttccagatcaggttgtcaatgccgctgacggtcttctcgtcctttttgacccactggatctcgtcatcggcatcgaagccattggagttgaagttggtgggccagaagtcgccggcctcaagctcaggcaggtcgcggaccttgctcttcacgtccaccttggcggtggtgccgtcgggcaggtacacgcgggccacccagtctttcagctcctcgtcggagtcgtccacatacaggtactgatcgatggactcctcagcgggctcaaagcccagaacatagccttcgggggtcagatacagaacgtactccacgttcagctcggggtgcttatcgccccaggaaggatcgctcacatcatagaccatgtgggtatccagagcggtgtagtagtacttgccgtcatcaccgctgagacgcacataggtattctcgctgttgtcctcattctggacgcgggtgacctggccggtgacggtctcgggggccatcagctcgcagatgtagaagtcctcgtcctcgttgaagtccacagtgaagaccacatagtcgtcctcagcaaaatcggtggtgtagaaggtgttgtcgtccaggctgggttcctcagacagagcgcggacggtgatgtagtcagcgtcgtcatcatcggtcttcacgttggagacctcgcccaggtagtagttgatctccaccacggtcacgtccagggtgtagtcgtcgatgtaaatctccacgacagcgcccttgtcggtgtactcccacttctcatcaacattcttcccggggatgatctcatcatcctgctcctcaccgttgatgaaggcagtccaggtgtactcctcgtcagcctgctggccgcgggcgtcattgcacacggcagcacccagatcagcatacacgtcagactcatcagtgccgttggtgtagatgtagtcgggggtgttggggacggtgatgatctcgtccttgtccagcatccggaccttgtcggcgatcaggccgccgttctcagtcagatactcgtccttctgagtggtgccggcatcggtgcgggcgttgtaagagccggtgccccaggtggtggcgggacggccgtagatggtctcggtgtcggtgcggtacaccaggtcgaagttcttgtagcccagggtctgcaggtagttgaactccagggagtagatgattccctggttctcgttgtagtacacacccagcagctcgttgtactggacaggcacggccttggtcagggcgttgaacaccagctcagccacgttgtcgcgggtcagcccggcgttggcggtgagcttcaggtcgccgtacaggcccagagcggtgcccttggcggtggcggccagcatccagtcactgccgaagtcagcggcgctctggaagtagcccagggcgcggcacagcatcagcacggcctgcgcggtggtcacggtggcgttggggtcgaacttgccgtcgcccacgccggccacgatgcccaggctggagcacaggttcacatagccctgcgcccaagcggggacgtcggtgaacacattggtctccgcgaactggttgacgttcacgccggcgccgtacagcatggtgctgatgataacggccatctcggcgcgggtgactacgttcttggggccgaaggacccgtcctcgtagccgtcaaagaggccgatggcagaggtgaccgccacggcgtccttgttgacgatctcagcgttgtcgctgaagtcgtcaaggcccttagcgctggaacccacgaccatcatgcccaggagcataacggaagccagagccaggctgagggcacgcttcaggtttctcattggatattcctcctttttatattgacaaaagtcgctgttttctgacaaaccgggccttttccagaacatttcggcccactatgcctgtacaacacttctgacatagaaggaattggttataaaaaggggaagatcaggggaaaaatccctgagatcacgcctaaaaagtttccctggtagacatttggtagacacgcaaaaacagaaggaacggcaaggccctgaaactccaggcccccgccgcccttttttggtagacttttggtagacatttttatttttgagagacgagaaagagacggaatcggttgcgtgatttatgtttagagattataatggggccgtaacattgatcagagaagctttccaagggagagcggatcatgacagaaaaggagcaatctatgtccattttggtgagcggtggcgccggatatatcggcagccacacctgtgtggagctgatccaggcgggatatgacatcgtggtggcggacaatctggtgaattccagccgggaagcgatccggcgggtggagcagatcgtgggaaggcaagtccccttcgttgaggcggagctgtgcgacccagagcaggtggaagcgctgttccagagccacccggatatccgggcagtcatccatttcgcgggcctgaaagcggtgggggagagtgtagagaagcccctggagtactacaccaacaatctggtcaacaccctggtcctgctcaatgtgatgcggaagcacggcgtgaaggattttgtgttctcctcctctgctaccgtctatgggaatcccggccgggtgcccttccgggaggacttcccggtgggggggaccaccaacccctatgggacgaccaagcttttcatcgagcagatcctcaccgacctgtgtgtggcggacagcagcctgaacgtggccctgctgcggtatttcaatcccatcggggcccacgagagcgggctgatcggggaggaccccaacggcatccccaacaatctggtcccctatatcgcccaggtggcagtagggaagctggagaagctccatgtgttcggcggcgactatcccacgccggacggcaccggggtgcgggactatatccatgtggtggacttggcccggggccatgtctccgcgctgaagaagctggaggagaggtgcggcctgttcgtctgcaatctggggaccgggaagggttactccgtgctggaggtcctgcgcgcttatgagaaagcctgcggaaagaccctgccctatgtagtggatccccggaggccgggcgacattgcggagtgctatgcggacccggagcgggcagagcgggagatggggtggaaggcgcgctacggcatcgaggagatgtgcgcctcctcctggaagtggcagtccatgaatccggacggatacggaagataagagggggtggaagtatggaaaaaccggtgcttgtggtcatggcggccggaatggggagccgatacggcggtctgaagcagattgatcccgtgggggccaacggccagctcatcatagattactccatctacgacgccaggcgcgccggctttgagacggtggtattcgtcatcaagcgggagcttgcggagcaattccgggccgccatcggcgaccggctctcccgggtcattgaagtaaagtacgcctatcaggagctggaggacctgcccgccgggtacggggtcccggaggggcgggtgaagccctgggggacctgccacgcggtgctggctgcccggaaggaggtggacggccccttcgcagttatcaactcggacgactactacgggccggaggcgttccgggagatataccgctatctggaggagcacccggacaagccggggtgctatgaatttgctatggtgggttatctgctgggcaatacggtgacggagcacggacatgtggcccggggggtgtgccaggaggatgaggagcactatctgctccgtgtcacagagcacacccacatcgagaaggccggggcggacgcccgctccacggtggatggcggggagacctggacccgtctgccgggggacaccgtggtgtccatgaacctctggggcttcacccccagctttctttgggaggcggaggcgcgcttccccgcgtttctggaccaggtactggcagaggacccccagaagggggagtatttcctgcccagtgtggtgacacagctgctggaggagaagcgggcccgggtcaaggtgctgcgcagcaccgacaagtggtatggtgtgacctatcgggaggataagccccaggtggtggccgccattgcggctatgacccagtccgggctctacccggaaaggctgtgggatatctgaaacgcagaaaaatatccgcctgatccggctgttgagcaccggtccggcgtaaaagaagtccggcttcccagcagcagagggggccggactttttgtgcagtgcggtaaaaaagaattcgacagatcatccagataacggaaaatcaaaaaagaacagatgtacacacaaaaaggacaaaaagctgccgaaagcaaagcaggccctgccggccgttcaattgaaagatagaaggctctttgctataataagcaatcagacaaaacggcgtgcatattattgtccgggacaggtcctgagaacgggggacctggaagagagaaggggggaggagccgtgtcagcgctgatcctgcttctgctggcggtgtgcctggcgctgctgattctggaggaccggcaggtgcggcgggaccgctctgagctggtccacgtggtctatgtgaacggcatccgggggaaatccactgtgacccggatgatcgacgggggcctgcgggcgggagggtggaaggtgttctgcaagaccaccggcaccgtgcctatggttatcggggtggacggaacggcccggcctctggtccgccgggggcgggccaacatcagcgaacaggtgcgggtcctccaccgggcggtgcgggagggggcccagatcctggtgatcgagtgtatggcggtggacccggcgctccaggccgtctcacagcaccggatggtgcgggcggacatcggagtcatcaccaatgtccggctggaccacactgcggagatggggcccacgctggaggagatctgcgactccctctccaacacaatcccctggaatgggaccctgttcacggcagacggagcgttcctggaccagcttcggaccaacggacgcagaaaaaactgccgggtggagctggcccagccggacagcggcctgccggacttcgattttcctgaaaatgtagctctggccctggcggtctgccgggagatcggggtggaccgggatcgggcgctggaagggatcctgaggtatcagccggacccctatgccctgtccctattccgcctgccctctggggcggcttttgtcaacgccatgtcggtgaacgatccacagtccacccagctggactaccaccgggtggccggccgcccaggaatggtgggccggaggctggtgctgctgatcaacaaccggccggaccggggatatcggacggagcacatgatgatggtggcccgggggctggagccagaggagatctggctgatcggtgcctcccagcgggcggtgcgccgcaccctgcggcatatcctgccggacacacctgtccggctgtttcctggagcggaggcactgcccttggacagccggggggcggacactatgatctttgccgctggaaacttggccggcccgggtaaggcactgatggagcgggtacggaaggagggagagcagagtgtattatgagatcgtactggcgggggtggccatcagcctgctgttcgtggagctgaccggcctgtcgcccgcgggcctgatcgtgcccggctacctcgccctgtgccttcagacgccttggaggatcgtctacaccctggcagtggccgtggcggcctggggcatcgccaaactgctgggcaatgtgatgatcctgtacggccgccggcgctttgcggtcatggtcctgctctcctttgccatcgatctggcggtcaccagcttgggcctgctggcctatgacccgggaatgatcggggtgctggtaccgggcatcatggctcaggagctggaacggcagggatttttgaagtctctggtccctttggcggcggtggtgggcatcctggcgctgatcatgatgtggcaggggatgcaggtgtttcctatatgagcagagcgaagcgggaacggaagctgctggccctcctgctggcctgcgcactgctggcctgggggactgcggcgctggcggcgggacagggccgccgaacggaaacgggctatgccgctgtgcagctggcagcggcggatctgctggaggactgcttccggcaggtgcgcacctacaaggaggagctgggcatccccctcagcgagctggactaccatcagaccggcatgatcggggaaagctacaccgggatcaccaccaccctgggggccatcgaggcgaagcggaccaccgcctggccggaaatgggtgcgctgtgtgtccgcctgctccacgaggcgggcgtccgatcgggggacaccgtgggggccggcttttccggctccttccccgccatggatctggcggtgatcgccgcctgccaggtgatgggcgtggaactgatctatatctcgtcagtgggggcatccacctacggggccaatcatcccgccctcaccttcccggagatggcccaccggctggtggaggacgggctgctggagacagacagcgcggccgtcaccctgggcgggggaggcgatgtgggcggggggatggacccggcctgcgcagaggagatccggggtcggctggcggaggcgggactgctcctgctggaggagccggactaccggcgcaatctggagctgcgccagcagctctatcagcaggagggccccatcgactgctttgtggcagtgggaggcaacgtgacctccatggggcggggggagagcggcatcagcctggggcagggcctgctctccccggagaagattgtccggctgacagaggacagcgggctggtgcagcgctatctcagccaggggcttccggtgatcaatcttctgaacatcaagcagctggcggcggactacggactgccctatgacccggcccagtggccggagcgggggacctctgccgtctactttgagactgactaccccggggcggtgctgctcctgggactggctggggccgcggtgctgctggctctgtgccgatgggtgaggaggagcgcggggaccgcgcggaaggaggagagaggataccatggacagacagaatcgtccgctgaccatcctgaccattgacgacgaggaacagatccagtacgccctcagggccctgttcaactcccagggctgggaggccatctctgcccgggatgtggaggagggagtgggaaagttccggacctgccgcccggatctggtgctgatggactaccatctccccaagatcaacggggtcaaaggggtggagatgctgcgccgggaggacccggaggtgccgctgatcgtcttcaccatcgaggacaaccagcgggtggccgaccagttcctggatgcgggggcgagcgacttcgtgcttaagccggtgaaggccctggacatcatcgcccgtatcaagctgcacgtgcgtctggtggagagccggcgggagaaccgccagagcacagaggagccggtgaagggcattgggcagggcacactgagcctgatagagggttatctgcgcagtgtcagcgagtaccagcctgtggaggccatcgcggaagggacggggctggcctatcagaccacctaccgatatctgcaatatctggtgtcggtgaatcgggtggaggtgagccagcactatggaaaggtggggcgccccaaacagcgctaccggatgatccgggaggcgggcgacggggaaaagcccgaaacaggactataatgcgggacaaaaagcgccggtcagccattgggctggccggcgctttctcattgtccgggacagaaaaagctgtggtcaaaatagacaaataaaaatataaaagggaagaggcctaaaaaagaggtcggaagagaaaaatgagaaaaaactagaaataaaagggaaaaaatgacggatcaaaaaaggataagagtggcctgttcataaatttttaaaatttcagaaataaataagagaaaaaattgcacaatgaaatgggggcgctgtatgatagatttagttagaattatggtggacgcagatggtcgctgccgtccgtcacaatggggggaggaataagctggaacagacggaaataaaacataaggtgaacgcacggccctattggaaaggagagtcaaaatgggaaacagacgcagacacattggatcctcgctggcggccctgaccctgaccctatccctgctgacgggactgctcaccggatgcggccccggcgggagccagagcagttctccggaggccggcagcacgcccccggcggccagccagagcacgcagacgccggaacagcccgccctgcccgagctgaccacagatacctacggcaacgccgcggtgggctatcaggcagcggtggtcagcgccaatgagtacacctcccgcatcggcatggatatcctggaggcggggggcaacgcggtggacgccgcggtggccatgatttttgccaacagcctcaccgagccgggtgccaccagcttgggcggcgccagcttcatgaccatctatctgaaggagacgggcgagtacatctgtatcgaggccatggagaccgctcctgcggcggcgggcatcgacactctggacgagatcaatgagaagaagggggccatgctggtcaccgtccctggacaggtccacggcgccctgaccgccctggagaagtatggcaccatgacccgggaggaggtgctggcccctgtcatccagctggcggaggagggcttcgatgtccacatcagctttgaggagcgggcctcggccagcttcgacaaactggtgcagaacgaggaggcggccaagatatttaccaacgaaggcctgccctatgcggtgggggaccacttcaccaaccccgactatgcggataccctgcgcaagatcgcggagggcggcatcgacgagttctacaaggggagcatcgcccagaccatcgtggacgaggtacagcgcctgggcggcctgctcaccatggaggatatggccagctacaccagcgtggagcgggagcccatcagcaccacttatcacggctatgagatcgtgacccagggcccgccctccaacggcggcgcccccatgctggagatgttcaatatcctggagaactacgacctggtctctatgggcttcaacaccccggaatatctgttcaccttcaacgaggctctgcggctgagcatggcggatggcatcacctacttcggggacccggatttttatgagctgcccatcgataccctgatctccaaggagtacgccaaggagcgggtggagaacgacatgcccaaggacggcaaggtcaaccccactcttgttcccggggagggcctcccctttgagaagctgaccaccgccgcgccggaaagcggttccaccacccacgtctccgttattgacgagtttgggaatatggtgagcaccacccacaccatcggcggatatttcggatcctgtatcgtggctccgggtaccggcttccccctgaacgcccacctgtccaaccagaagctggacattgcagaaaaagacaaccccaactttgtccagggcggcctgcgggtcatgagcactatgtgccccaccctggtggtcaaggacggcgagcctatcatggccatcggctcccccggcagctggtgcatcccgcctgccatcgtccagatcctcaatgcagtgctgctgttcgacatggacctgcagcaggccatcaacgagccccgggccatcttcacctcgtacagcgccccgctgaaggtgtacgccgagccccggctgccggaggagaccatccaggccctgatcgacgcgggctatgaggtggactccggaaaggactggaacaccagcctgggcagtgtgggcgtggtcctggtggacccggacgacggctttgtctatgcgggcggagataaccgccggcagtacaagtcactggcctattgagaaagccagcgcatacagataccaaaagtctgatgggcatttgaaacggaatgagaagggaggaaaagaaggcccatgaggagatgtatgcgaggtaaaaaatgttacatcaataaggaggagagcatatgaaacggaataatcagtccctgacaacgaaattcagcgcactggctcttgtacttgcaatgatgctgtccctgctggcgggttgcggacagaccacccagccggcagccagctccacccctcccgcggcttcttcagagcccgctgcctctgagccggagacccccgagatccctgagaccatggagggcgatgagttcggaaacggcgccatcggcacccacggcggcgtatccagcggcagcgtgtacgcctctcaggctggcctggagatcctgcaggccggcggcaacgccgtggacgcggcggtggccaccgctttcgcagtgggcgtgtgtgagcccaacctgagcggcatcggcggctgcggcatgatgaacatctatctggcggataaccacgagtacgagatcctggagtatatggagactgtccccgtggcggtggagcccggctggtacaatccggagacagactctgccacggccaagaatgccgctgtccccggccaggtggctggtctgctcaccgccctggagaagtatggcaccatgaccccggaagaggtcatggcccccgccatcaagctggcccgggagggcttccccatcgaggagcgtctggccaatgccatcatggactcctttgatatgatctccgccaatgaggaggctgcggccatctacaccaacgacggcctcccctatgcgaccggcgatctgttcaagaacgagcccctggccgacaccctggaggccattgccaagggcggcatcgaggagttctataccggcgagctggctcagaagatggtggacggtctccaggccaatggcagcctgatggccatggaggacctggcgacctacaccgtggcggagcgggagcccatccgtaccgagtactacggctatgaagtggtcaccgttccccctccctccaacggcggcgattggctgctggagatgctgaacatcatggaggagaaggacatctctcagtatgaccccagcactctggagtaccagtacatcttcaacgaggcctgccgcatcggcctggtggattcctacacctacatcggcgaccccgccttctatgacctgcctgtggaggagatgatctccgacgagttcgccgccgagcgggctgcccttatcgacatggacaacatgcaggccatggagtctgtgcccctcagcgacctgccggtcaccaagctggagcccaccgcggaggagagccagcatactacccacatcgccgtcatcgaccagtacggcaacatcgtctccaccaccaacaccctgggcaacggctggggctgcaaatttatggcccccggtctgggcttcttctacaacagccacatcggcaacctggaccatgagaaccccgacagccccgactatgtgatgcccggcaagcgggtgcgctccaccatctctcccagcctggtgctccaggacgggaaccccatcatggcggtgggctcccccggctccctggccatcccgcccgcagtggccaccattatcaacaacgtgctgctgtatggcatgaatgtgcagcaggccatcaatgagccccgcgccatggccatcaaccgctccggcatggactcccccgcccgggtgagcatcgagcagccccgcttcgatccggacctggtggcccagatggaggggatcggctacgagatgaaggacgtaggcgagtacaacatggcggtaggcggcatcgcagccatctatctggaccgggacaacggcatcttctatgccggcgccgaccccagacgcggctataaggccctggcctattaagacccggcattccgcgggcccggtccggcttcctgccggctgaacgggaacggacggccctccccggctctccggggagggcacgggccccgatctccgattggctgatccggtccggggaccccagatacccggccggaatgcgtgttacaaggagtggtaatgagtgaatttgactgaagcgtatctgctgctggctgtcatgctggctgtcgtagcggtggtcagcgttctgttcaaagggaaaagcggcctgatcgcgccccttatcttcgtggcgggcctgatcaccgcgctggtggccgggctgggcttccggctcagagaggtcaccgagggtcccttcgtctttgtggacaccctgatgtgggtgctgtgcggcgcagccttctcctatctgctgtatgtcaacgggaccttccagttcctgttcgccaaggtggtggggaagaagcgcagcccggccgcccagatgttcatcctgatcctgttcatcggcctgcccggaatgatcaccggcacggccctggccagcgtggccaccaccggcctgatggctggccgctacctgctggacaaggggatggagaagagcaaagtggtggaggtggtgacagtgggcgctctgatgggcatgctgctgcctcccctgtgcgtacccgccatggcccccaccattgcccggcaggggctctatcccggcgcttttgagggatattttctccccatcctgatcctggccctccccgccctgatcgtctactgcgccctggccgggcgccgggtgctgggggagtgggaagcggacgggaacgtggaaaagacgggcagcgcggtctgcctgatccccctggccgtggtggcggtgctggtgctctgctacaacttcctgtacttcctgatcccctattacgggggttatccggtgatttacctcatcggcttcgtgctggccctgatcttcaagtgcaagggagccaaccccctgatcgcggcggcggacggcatccgcaccgtggcggtggagctggccctgattctggcctatgcctctgtggtcgagaccttcaacctggtgggcgtcaacggcaccctctccgcccagatggagatcgccggcatcaacggcgcagtgatcgccctggtactgggactgctggtgctggcgggcggtctgctgctgggaacccccttcgcctatgtggtgggggcgctggccacttatctggtcagcaactccaactatggaagctatgagctgtccatgatggcggtaggcgccgccatcgccatgagcatgttcctggccctgcggggcagcttggcggagacggtgggcgagaccctgggggtgactggggtcaccggaactgaggtggtcaagcgcaacatcatcttcacgctggtgctgaccgccgccatcgtggtgttcctggtggcaggttcatcgctgaagttcctgatgatttaaggggggacgaagaatgattgctgcattgttcatcatctatcggatcatcgtcgctgtcctggccctggtggtgatctgggacatcgtgcgggagagatcgctggcccatgtgatgagtctggggatcatctgtttccccttgatcctccgcgcgctgctgatcaaatgaagggggaacggaaatgaaaaacaagagtctgatcccaaacattgccgttctgctcgtggtggccctggtctgcgtgctgacagggcagatctatctccagcagcagaaggacgacgtgctgtacaccgaaaatcccaacatcaccggtgtgatccggctgagcgactacaatcccaacctgaaggacacgccgggcgacgtggatatctatgtctttgacagcgggatccccggaggcaaggcgctgatctacggcggcacccacaccaatgaggtgggctccatgctcaacgccgtgacctatttggagaacgtgaagtgtgaagagggcaccctctatgtgatggtgcgggccaacaacagtggatacagccacacccagcccctgctggcccaggccaacaagatgaccttccagctgtccgacggctccacccgggagttccgcatcggcacccgcatctccaacccggtgcaccagtggcccgaccccaactaccggctgaatacctccaagcgggaactgcgccacgacgagatcgcggagatccgcaacctgaaccgcaaccaccccggactggaggagggctacctcaccgagatggtgtgctacgccatctacaactttatccagaccgagcagatcgacttcatctatgacggccacgaggccggtgccgagtcggtgaagctggtcaacaccctggtggtccatgagaacgccatgcctctgggctcctccgctgtgatgaactgcgtcatcaacaacctgcccctgaagatggagatctccggccagacctcttacggcctgtcccaccggggcctgggcgacaataccgacgccctgtgcaccctgttcgagacctgcaaccccgccatgggcagctaccacgacaaggtgacagaggagctggtgaaggacggcatctcgggcaactatctggccatgcatcgggcggggctgttccccaattcctacgactttgacgagaacggctggcccatcgagaagcggaccgcctaccacatgagcatgagtgcggagatcatcaacaccttcgaccagatgtaccccgacaagcccctgaagatctccggcctgcccgatgccaacgaaatgatcgccaacggcctggaggccaccctgaagtccctggcctgagggactcgactggtaaggtgccaagtcccggaggaccgggatcaagcatagaactgaaatgatcttaggaggaacttaaaatgaaaaagcgcaacgtatgtatgctcctggccgcggccctcagctgcagccttctgctgaccgcctgcggcggtggcgggaccagcaccaccaccccggggaccagcaccccgtccaccagcaccagcgcccccgccgggagcggcggcgcctccaccggtgctgagagcggctacaccttccgcaccagcgagagcaaccgggtggtgacggagaacggcaccttcaccaaggaccaggtctccgcccccgtcctgatcacctccttcggccagagcgccgacgtatccatgctggacgccctgatgaagaaggtgggagctgagtacaccttcgacgccaccgcttccgcagaggacgccgccggatacaagaccatcatcatcgccagcggagcctcctccaaggggctgggcgcggccggcatctcccaggaggacgagatcgcccgcgctgaggccatcgcccagaccgccaaggacaacgacatcaccgtgatcgtggcccacatgggcggcgccgcccgccggggcactctgtctgaccagttcagcgacctggccctgggctgtgccgactacatcatggtagtggaggagggcaacgacgacggcaagttctctgacgccgccaccgacgccggcatccccatcaccatgctgtacaccatcgccgacgctgtgaccccgctccaggagatcttcggcgcctgaaccccattgcactgcaaggaggccccgcctgtcaaaacgggtggggcctcttcccaaaagcggacgctccgccggcagaggcggccgtctgcccgactcccgcgaatactccggaacaggagggatttgattggaatttgaactggtaatattcctggtcatgctgggcgtgttcctgctggggaacttcctgctgaagctgccggtcagcttgtctatggcggccggcgctatcgccggcgccctggtgggtggggagggtatccccctgcgccatctgttcgagggcacctttgtctatatggatacggtgctcatcatctccatggccatgatctttatgacggtgatccaaaaatccggggcactggaggccctgaacgccgtcatcgtctcccgcttccacaaggtcccggcggtcatgctgattctgctgatgctcatcatcatgttcccgggcatgatcacgggctcctccaccgccgcggtgctttccgccggcgctatcgtggcccccatcctgctgatgatgggcatcccggccccccagaccggcgccatcctggcggtgggcgccatcatgggcatggccgcccccccggtgaacatccccgccatgctgatcgccggcggcgtggatatgccctacatcggctttgagggccccctggccttcatgaccttcccctgcgccatcttcaccgtcctctttgtgggcctgcgctactgccggcacctggattacgacaagatcaaagaggggctgaacctggaggtgggcaaacagtacgggctcaagctctacatccccatcctggtggtcatcgtcctcatggtgggcagccgggctctccccaacgtgttcccatccctgggaatgccgctgatcttcttcatcggcagcgtggtgggcctgttcaccggcaagaagttcaacgccatccaggcagtgtcggaggctgtggagaccaccgtccccgtgctgggcaagctgatgggcgtgggcatgttcatccaggtgatgaccctcaccggcgtgcggggctacatcgtggtcagctgcttcggcttcggcctcatcgtcctgtatgccgccgtctgcctggtgatgcccgcctttggcgcggtgtcctcctacggcgcggcctctgtgctgggcgtccccttcctgctggccctgctggacaccggcgaccagatcgtcattgccgccgccctgtccttcatctgctccatgggcgacctgatgccgcccacggccctggcgggcaactatgcggcccagatcgtggaacagaagtactcccgggtgctgcggcactgcgccatccccttcatcgtctgcatcctgtacggcctggtcaccctgctggtgtccggcaacctttcgttcctgacttgagataggaggggaaagcatgttattatatgtttatttgggcctggtgctcttcctgctggtattcgtcatcaagaatatggtgcgggaaaagaacctgatgctgcagatcgacgccgcgctggtggtggtcccgctggtgctgcggctgctgctgatcaaatgagggggtggacagagtgaagatcgaagtgaaaaagagctggttatccgccctgatcctgctggctctggccgccgccgccatcgtgtatctggccggccagttcctctccatgcgggaggtggagcccatctacccaggccccggagtgacagagatcaagatgctgtccgactggtatcccggtctggagggaaccgccggagacacggaggtctatgtgctggagggggagcaggagggggactccatgctggtgctggggggcacccaccccaatgagccttccggcctggtggccgccgtcctgctcattgagaacgcccagcctgaggcgggaaccctgtacgtcatcccgcggaccaacaacagcgccttcacctgcactgacccccaggagggggcccccatgcgctttaccatcgacacccccaacggggagcgctggttccgcttcggctcccgggccaccaaccccatccaccagtggcccgacccggagatctatgtccacgcctcctccggacagcggctgtccggctccgagacccggaatatcaaccgctcctacccggggcgtaccgatggcactttcaccgagaaaatgagctacggcgtgacccagctcattgaacaggagggcatcgacatcacggtggacctccacgaggcatctcccgagtaccccaccatcaacaccatcgtggcccatcaggatgccctgtcactgggctcccaggcgctgatcaacatgcagctggagggaatgagcatcggcctggagccctctcccgagaacctgcacggcctgacccaccgggagctgggcgactacaccgataccctggccctgctgatggagacctccaacccctcccagggccgcctgagaggaaagaccgacgaaaacctggtggtcaccggacaggataagtactatctgaaggcggctggctacggccgtctgtatgacttcggctatgacgcggacggcgcccccatctctgagcgggtagcccgtcatgtcaccggcgtggctcagttcgcggtggccttcaacgagctgggattgggcaacctggtcatcaacggtatcccgtcctatgtcgatatggcggcggacatcgggcagttcctcgctcccgactgagcgcggaaagttgggaggtgaaggcatgaaaaagcagatgttgagtctcttcctggccctggccctcaccggctgcgccgccccagggccggggagcacctccgccccggcggagagcggagcggcccccgcaggcagcgaggcgccggcctccgcctcccaggaggagagcggctatgaccgccgggaggccatcgaacggccggagatcggtgcggaggtggtcatcgacccgccctatgatttcgaccccgcggagatggtgcctggcgactttggggactacttcacagactgcgatcatcccacccaggtgagcacctacaagctcgccgaggggaccgacatcgaaaatgaggtgacggtgctccagggggaggaggagggacccaccatctacatcgtggcgggagttcacggggatgagatcgccggctggatgaccgggaacctggtcaagaagatcggcatccgggccgggacggtccatatcctgtccccagccaaccgctggggcgcggaggcggaccccagagtccgctatgtgacggagcaggaggatctgaaccggtccttcccgggggacccggaggggaatatggcccagcgggtggccgactccatctaccaggacatccagagggtggacccggtgttcctctttgacctgcacgaggcccgggccaacgcggagaacaaagatttcctgggcagttcgctgatctacaccgacctgagcgaaatgagcgacatgtacctggagatgctgatggccacggagtccggcgagctgtgctccgagcgattcaacttctatggacccggccccatcgggagcatcaacaatacggtgaccacccagctgggcatccccaccatcacagtggagacctaccggggctatgagctggagcgccggatcggagaccagctggacatcgtggagtacgtgctgcggtactacggcctgatttgagcgtgcagcggcccgaagccggactcgggatacaaaagaaaagacacggcaagccttgccccgggcatccagggcaaggcttgcggttattccttgggcggaccgcaggggaagagggggatggacttgaaacgagagcatgagctgggacagacggcagaggccagaaaaagaacggaccgggacctgcggtgcatcggctggggcctggtgcttctgggagtgctgatgcccgccctggtgacggtggagaacaccggtatctaccgcacgctgatgaacggcatctatcaggggcaggagatctacgtgctgctggcggcgctgaagctggtggtgctcaatgcggtgcgggcctatccccactacatgggcgtgttttttctggtggagaccttccggggcatggagctgagacggcggctgctggcgtctatcgctgcggtgggcatcctgatccccggagtgtatctcctcatcaaccggatctatggcatccgctatgacttcggaattccggccctgtccatgatcgccatgatctgggtgctggccaagatcgatttcagctttgtggggctgatgaagaaggggctcatggtggcctttttcatcacggcgctgcaattcctggacatgatgcctctgctgtggaattttcccttcggcagaggagagagttcctatgacatcaagctcgtctccaagttccttcaggcggacagctttctccaggccatggccaccatcttttttgctctgttcctcttcatgtccgtgctgctcctgctgctggtggtggatgaaaacaacatccgccgcatcagcgagcagaaggagctcaacgagcacatgctgatggagacccggatgcgcatcctggagaaccggacctatatggaactgcgccacctggtccatgatctgaagtcccctctgaccagcatgcaggccctggtgggggtggtcaaactgtccgccggcaggagaggggaccagacggaaggggagtatctggagcggatcgagactatgatagaccggatgagcagcatgatttccgagatcctgcacgaggagcagcggagcgtggtgaccacccaagagctgctggacgccgtgatggcccagatctccagcgcggagtatgcggacctggtccacacggagaaccgggctccagaggcgaagatccggatcaacaagatccgattctcccgggtgctcatcaacctggtggagaacgccgcctatgcggtccggaggccggacggcaagatctggatcagggtcgaggagacggagggggcagagatccgctttcaggtggaggacaacgggacagggattcccagggagctgctgggcgagatctgggagaagggattctccatccgtagctccagcggactgggactgaatttcgtacagcaagtggtggagcagtgcggcggcagtgtcgaactggagagcgtggagcgggagggaacggtggtcaccgtctccctgcccccctgtgaggaggatgtgtgtgagacaggaccagtatgagctgaagggagcggtgctggaggcaccgctggagtggcagggcctccgtctggctcccggacgggggggcgtcctggttacggggctggaggggacggaccagcggcggttccagcggcagctgaccgtactgaaagggtacgccgccctggcggcggacaggcggggggaacgccccctccgcctgcggcaggaggacctgccggagcgggaagggccggagaccctggccgcagtctggtacggccgggcggcggaggcggaggaccaacacggcaccctggtggcctgctacaacgggttcggcgccctgccggggggctttgccgctatggaggagagcctggcacgctgggctgggcggcccctgggggagaagctgctggactatgtccaggcggtccggcgggaggagggggacctggccgagaaggcggagcccttccagaccctgcccagctggacggaccgggagacgggggagctgctgcgcgcgctgctgcgggcgctgtgtgagggatctggcgggcgcgggagcgcccagggataaggggggagcggagtggagaagcgagccaagcagctggaatacctgatcaccagcatgatcctgctgggcatcgggatgctgtttttcttcatgaacgagagcgtcaatacctatacggtgctgcgttttggcctgtttcagatcatgcagagcgtgctgctgctgatctgcgctatcctgctctggtatcgggcatatgtggtccggcgggagcaggagacggccgaagggggggcggagacgctgggagcagcccaggctgcgccggaggaggccggagaggaaaagcgggaggccaagcgggacgcggtggacagcgtcaatgccaccatgctgctggtagtggtcaccgtgctggtggtgggattctatctcttcaccctgaagccccgggaggatgtgactggggccgtggctcccctgcacatggtggtatgcgtggtgtccttcatcctttacgcctgtgtggagcgctggtggtccatgcagctggacaccaacccggatgcggccagcatctgcaacctgatggtgctcaacaagatcgctgtagccgccctgatggcggatatggtcacctccttcaccgggctgttcagcgtcagccagtatgtggactatgtcatcctgggctgctggttctatgtggcggccatggcggctgtcagcgtggcagtgaagatgacccggcaccgggaggaactggtcttccgtctgtacatcctgttcccggtgtactactacgggggacaaaagggcagcggggccctgacctggctggagcagcacaccggcatctccatgcgctccctgtggagcctgaaattcatcaagatgatcctgccctcctgcgcaatggcggtgctcctgctggtgtggctgtccacctgtgtggtgcaggtggagacttatcagcagggggcgctgtaccgcttcggcagtctggcgcgggaggatatcctggagccaggcctgcacttcaagcttccggtgccctttgaagaggtgaagatctacaacgtcacccagcctcaggggatgatcgtgggctatgagggggacgtaaacaacaagaacaacctgtggacccgcccccacgagggggaggaacaggctctcctgctgggcaacgggaatgagctggtggccatcaacctgaagatcacctaccgcatcagtgacctgtacacctacctgacccggtacagcagtccggaggacgtgctcaacgccaagggctatgaggtggtgatgggggagaccatccatacggacatcaacaccatcatcagtgaggaccgcagccagctgtctcaccgcatcgaggagcagctcaaggaatatgcccgggaggcggagctggggctggaagtgatgagcgtcacactggccagcatccacccgccggtggccatcgcggatatctaccagagcgtggtgagcgcgggcatccagaagaagaccagcgtcctcaccgcggaagggaaggctctggtggcacgggagggggccgaggcagacaaacagctggctatcaatgacgccggcatccagcgggatgagcgggtctccagcgccaacgcggagatccagaaatacaatgccagcatcgaggcctatctgctggacccggaggcctatctgctggaccggtatctggagagcttccagcaggctctggcccagcagagaaagtatatcgtagggccgggggtggacgccggagccctgtatgccaacttcggactgggcggctcggggagccggtggttcagcggccttgacggcggaggcgccggcggggagcaggcggcggagacacagacagcggggacgcaggcggagaccggcgcagtgccgggtgaggaggggacatgatatgaaagggaaccgcatcatcaagtggatgttcgccctgatcgtggcggccatcatcggcttctttggctttgtgttcaaggtaaacgagggggagtacgcggtggtgacccggttcggcgcggtccggtcggaggtgacccaggcagggatgtacctgcgcctgccctggccctttgaggacgtgcagatccaggacgccaggaagcggtatctggactccggctacctggagaccctgacccatgacaagaaaaatgtcatcatgcagacctacaccatctggagcatcgccgaccccctgcggtactacaccagcgtgggggataccgccctggcggagacctacctcagcgacctggtcaccagcgccaaaaatgggaccatgggcaactatgacctgtccgctctggtctccctggacgaggaggacatcaagatcgacgagatcgaggccgccatgctccaggaggtgcagtcccacgctctggaacagtacggcatccaggtccatgagctgcggctgaagcgggtgggcctgccggccaccaacgtgcagagcgtgttcacccagatgcaggcggaccggcagaagtacatcgaccagctgctggcggagggtgagcgggacgcccagatcattatgagcgagtcggatgcggaggtggccgccatcgtggccgagggccgggaggaggctgccgccatcaacgcggagacggagcgggaggtggcagagatctatgcctcggcccacagccaggacccagagctgtatgaattcctacagaagctggctgccctggagaactcggtggacgaggacacggtgatgatcatcaccatggacaccccgccattcgacgtgctctacggcgatgactgaaggcggtgagggaagatgaaggattctcagcggttcattgccatcatcaacaccgccatccgctactgcaaatggctgatcgtcatccttgtggcgctgatctgctgctccggcatccgggtggtcaataaccacgaggtggcggtggtgctgcggttcggacggctggtgggggacacccgggaggagcaggtgaaggagccgggcctgctgctggcattcccctatgtgatcgacgaggtaatcaaggtgccggtgggaaaggtgcatgaggtgtccatcaccactcacgccgcctccgctgaccccacctatgcggagatcgaggacaccggctatgtgatcacaggggacgagaatatcatccacattgatgccaccctgaagtatcagatctctgacccggtggagtacgccctgtacaacagtgacccagagaccgagatcaacggcgtagtcagcggcgtgatgacctcctgcgcggcgtccaagagcgtggacggcctgctcaccgaccagaaggcggagttcggaaacgaggtcatccgccaggcccaagccatcctggacgggatggagatgggggtgagcatcgtgagcctggagttcaagagcatcaagccccccagcgccctgcaataccacttcgaccaagtaaacgccgcctcggtggagaaggagacccgcatccagcaggccaaccagtaccgggagcgggtgatcccggaggccaacgccgccgccgataagctggtgagcgacgcccaggtgtcgcagcacgaccggatcaaccgggctaacgaccaggtggcggagttctacggcctgttccaggagtatcagcagaaccgggacgtggtctacgagcgggtgttccgggaaaaggtggtcaccatcttcaaccagatgggcggcaagatcgtgctgcccgaggggaccaacacgccccagatctttctgccctgaggagggacggctatggagaacctgacgaataccgcggtccacctgctggaggacagccagggggccgacctgacccggcgggagaagcgaaagctctcggtggagatcaccaccgccatgatagccctggtctgtctggtcaccggactgctctataaggggatcttcccggagcagacggcggtggcggggctgatctattctgtgggcgtgctggtggagggcctgcccctgctggcgaccgccatccggggctttctccagcgggacgtgaccaacgccatggagatcctggtctccatcgccgtgctggcctgctacatcactgggcagcacgagctggccatcctgatcccagtggtgctcagcgtggtccactttctggaggagcggagcatcatgggaggccgggacgccatcgagggccttaagcagatgcaggccaccgacgcggtgctggaaactgaggatggggaggtgacggtggaggtccaggcattgaaacggggggacatcatcattgtccgacctggcatgggcctgcccatcgatggcaccgtaatctggggcaattccaacatcgaccagaaatccctcaccggtgaacccctgcccgccgccgtgaccgtaggggacacggtgtacgccggcaccaccaacctggacggcatgatcaaggtccgggtggagaaggaatatcaggacacctccttcaccaagatcgtcagcctgctggaggaggcccagagcatcaccgtgcctgagatccggatcgtggaccggttcatgcactactacatcccgctggccctcatcgtggccgccctcaccgctctgctcagccgaaatatctccaacgccatcgccgtgctggtggtgagctgtccctgcgggcacatgctggtcagctccgcccccatgatcgctgccctggcggtgtccaccaagcggggcatcctcatcaaaaacgccaaattcgtggagcagctcaccaacatcaccactgtgatctttgacaagacgggcaccatcacccggggggagctttccatcagcggcttctatcttcaggaggcccagagcagggaggagctcttcgccagaggcggctgcgtggcgtgcagctctatgcaccccatctcccgctccctaatgaagaccttagagggggagggcatcccctatgaggaggggttccaggtccgggagaccgcgggcaaaggactgaccgggacccggggcggggaagagatcctgttcggctcacggcactggatcgagtccctgggctaccagccggaggacccccatatggacaccggagggggtcccgccaactgggtggtgtacaatgggcgggtgctgggctgcctcatgtttgatgactccgtccgtccggaggctgaggaggtggtgagccggctccacgaggacgggatggaacagactgtgctcctcaccggcgaccgggagttcgctgcccggaaggtccagcggcagacagggatcgaccaggtatatttccacctgctgccggaggagaagctggagcacgtgaagcggctgaggcaggacgcccatgtgcttgcggtgggagacggcatcaacgatgccctggccctggcagaggcggacgtgggcattgccatgggggccatgggctctgatgtggccatccagagcgccgacatcgcccttatgaacaacgacctgaacaacatcccctttgtcatgtccctggccaggagcaccaagagcatcatgtatcagaacatcggcatcgccttctccgtcagcctcattatgatgatcctggccgccgtgggggtgatccccgccctggccggggccttcctccacaatatcggagcctttgtgatcctgatcaacagctcccgcatcctccgggacagcggcggggagggctgaacgcctgccgcaaaaaattttctctctctgggtgtacggtttcgagcacatattccatggaccgcggcatatactgatgtgtacgccggtgggaggaccaccggcgccgcgatcagatacagagggaggaagttctcgatatggaagaaaatcagatgatccaagtacagcgtccgacgcagcctgagccctggcgcgatctggacgatctcatctttcagggggacggctggctggccagcgaccgctgaagggccgtctcgctgagcgagacggcccttccatttgtcgaagcagagggagaacgcctctgcacggtgggagcggcggcgcaaaaaaacactggaatatccggttttttctttactttccagccgagttcagatataataattgggctttgattggaatactgcccgtcagggcgggaatttgatggaaagagtgaggaccatatgctccaattcgacgaatacaaggtcaagctgaacaacctggctcccaccctggaggaactgggaaaagccctggacctggaatccgccgagcgggaactggacatgctccaggcggagagcgccgccgacggcttctggaacaacctggagaaggctcagaaggtgcagcagcgcatcaagaatttacaggataaggtggacaagcagaacaagcgccgccgggagtgggacgacctgatggccctgtgcgagatgggcaatgagttcgaggacgaatccctgctgcccgagcttgaggagggcttcgcccagctggagcgggacatggaggaggcgcgcttacagaccctgctcactggggagtatgacagctccaatgtgatcctgaccatccaccccggtgccggcggcactgaggcccaggactgggcccagatgctctaccgcatgtacacccgctggaccgagcgccacggctttacctatcagatcatggactaccaggagggggacgaggcgggcatcaagtcggccaccatcatggtggagggggagaacgcctacggctacctgagaggggagcacggcgtccaccgtctggttcgggtatctccctttgatgccaacgcccggcggcagacctccttcgcctcagtggaggtcatgcctgacctgcccgaggatgtggaggtggatatccgccccgaggacatcgagatgcaggtctaccgggccagcggcgccggcggccagcacgtcaacaagacctcctccgccgtgcgcctgatccacaagcccaccggtatcgtggtggcctctcagcaggagcgctcccagttccagaacaaggacaactgtatgaagatgctccgggccaaactggtggagctgcagatgcaggagaaggcggacaagatatccgacctgaagggggtccagctgaaaatcgaatggggcagccagatccgctcctatgtgttcatgccctaccagatggtaaaggacaaccgcaccgcctatgagaccagcaacatcaacggcgtgatggacggggacctggacgggttcatcaacgcctaccttaccgctgaggccaccgggaactgggcggagaaatgaccaacggaacggccggggacagaagggcgggccgcgggaggagacttccgcggcccgcttttttatagttgccgccaaggagtggatacgctatactggaggcggcccccaggagcggggaaaagagactgatcgatcagaaaggcgggaaaaccatgcagtatcaaatcacaggagaacccatgccggtggtgatctgccagctggccagcggagagagcatgatcacagagaaggggtccatggtctggatgagccccaacatagagatgcagacctcggcgggcggcatcggcaaggccttcgggaggatgttttccggcgagtccatatttcagaatatctataccgcccggggcggcgcggggatgatcgcctttgcctccagcttccccggttccatccgggaggtggaggtcatggacgaccgcccgatggtggtgcagaaggccggcttcctggcagcggaggagggggtggagctgtccatcttcttccagaagaaaacgggcgccggatttttcggcggcgagggcttcatcatgcagaagctgtccggccgtggcaaggctttcgtggagatcgacggctctgcggtggagtacgagctgaaggcgggggagaagatggtggtagacagcggaaacctggccatgatggacgcaacctgctccattgatatccagacggtgaagggcgtcaaaaacgtcctctttggcggtgaggggctgttcaacaccgtggtcaccggcccggggcgcatcgtgctccagactatgcccatcaataattttgcggcggcggtggcgtctgtcctgcccagcagcaagtaaacaaggagcagaaaaatcgctcttccggactcaaaggtctgggagagcgatttttctgctcacaggggttcggcggctaccggattgatgagagagccgatgccctggatgcgcatctccatcacgtcgccgggatggaccggactgacaccggagggggtgccggtgaagatcacgtcgccaggttccagggtgagggcctgagagagatagctcaccaggtggaaggggtcaaagatgagattgcgggtgttggagtgctgcttccgctccccgttgacaaagctctcgatctccagcccggcccgggggtccacatcggtgacgatacagggaccgatggggccgaaggtatcaaagcccttgcacagcgcccactgcccggtgggggactggagatcccgggcggtgacgtcgttgcccacggtgtagcccagaatatagtccggggcctgctccggggtgacatggcgggcatgccggccaatgaccactaccagctccgcctcatactctacctgccgggtcagggcacggggatagaggaccttctgcccatgggcggccaggcagctgggcggcttaaggaagatgtttgggtcggtgggaatgggggtgtggaactcctcggcgtgatcccggtagttgaagcccaccgccagcatcttgccgggagagcaggggggcaggagcttcagaccgtccaggagaaaaccctctccggtctcctcccaccagccaaacaggtcaccggacagggtgtagaccacgtcgtcctccacgcggccataggtggggccgtccggccccagaaaacggatgaattttgccatcttgcattacctcccgcactcagaatgaaggatgcttcctgcttctagtgtactccggacggagaaaaaaggcaagtggaaaggaagatgctccgggcacggcggacaaggggacaaaagtgcgtctcccggatcgggagacgcactcggcttttcgaaagcttttttcagggacagatgtttcaggatcagacaggggagttcgagggggcggcagcccgcctcgaatgagatcacatcctccgcagcctttgtacgtcaagggctgcggcgagcaaagcgaggacttttccgccccagagcgggcggaaaagtagcgggatgcatgctgtggaaaacgtccatggaggatttccacacagaataagcgtatctcccggaccgggagacgcgcttgggcggggacagagtcagaagtcgtcctgatccatcagagtgacggtgaactccaggtgctccccgccccgcaggacctccaggagcagggagtcgcccacgtccagggtgcgcttgatccgctccaggtcggcgaaggtctggacctgctgcccgttggccgccacgatgatatcctggggctgaatgccctgccggtggcagtcgctgtccggatctacctcctccaccaccagaccgccgttctccccctggccccggcgtacgatgatccccagggaggggcgggtgaccggcgctccagcgatgaggcggtccaccacctgcttgacccgggtggtggggatggcgaagcccagcccctcggcagagccgtcgtctgccacgatcttgatggtggtcacccccaccacctggccccgatcattgagcagggcgcccccggagctgccgtagttgatggctgcgctggtctggaggaggtacatggtggtcccttccactgataccggctgatccagggcagatacgatgcccggcgtgatggtggagcggtagcccatggggttgccgatggcggagacggggtctccgctgcggagcagggtgtcatcgccaaattgggcgggggtgaggccggaggcgtcgatcttcagcaccgccagatcctccaaaggctcgaagcccaccaactgggcggaccagagcgagtcgtcggagagggtgacgttgacctgttcggcgccggcgatgatatgggcgttggtaacgatatatccgtcggcagtgagtacgatcccagtaccggtagagaccattccggcgctgtatgcggtcaaggccgcaatggagggggcggccttttcatagacctgggtgtaggtcagcgcctcaccggaggggggagtgatggagaggatgacgccggtgccggtctccgcctgcggaatggaggggggcgcggagaggtcctcctcctgctcccagctgctgtatcccgggtcggacccagaggggacggggtccgcggaacggggggcgaggccgccattgaacaagactgcaagggcggtgagggagacgatcaaagccagcgcgatgagaaagccgatccgaccgctgtggcggcgttggggcggcctgggaggacggtatttctggggcgggatcaccacggcaggcggcggggagaaggggcgggcaggctgctcccaggggccgccctgccagagcccatcgcttcgattgtccatagaagaaacctccccgcgccctggggcgctcagttcagtgtgaagattcctgctcggagcagggggacatgggggcgaagggccgcccgcacgcccttccagtcaaagaatatgccgcaggggggacaaacatacgcggccggacgaaaggggcccgcgccgcaggcccaaagaaaacgtcacagaggagcctggaagaactcaggcgagggtgagggtgaaggtaaagttggtgacaccgtcctcactggtcacggtgatgttttcttttagattgcccaaaatggtcttgacgatatacagacccaggcccacgccctcccggtccatgcttctggagtagtccgccttgtggaagcggtcaaagaggagagagagctcgtctggggggatggtggcccccagattgcggatggaggtgtacgccttgccgtcctttttggtgatctggaccgtgatggtggtccccttggcggcaaatttggcggcgttgtccagcaggttgtagcacacctgggtcaccgaatccgggtcgccccacaccttcaggggctcgtccggcattttaacgtccacatccaggtcacgtccggtgatcttgccctccaggctgaccaatacctgggagacggtctccgtgaggtcgaactgctcctgagcggtgatgttctccgtcaaagcattgaggcgggacaggtccagcatccgccgcaccagccgggacaggcggcgggtctcagagacgatgatctccagggagtcccgctcccgctccggggggatggtgccgtccaggatgccctccgcaaagccggagatggtggtcatgggggtcttgagctcgtgggagacattggcgatgaactcgctgcgctgggtctccaccttggacagggaggcggccatggagttgaaagcctccgccagggtgcccacctcgtcgcaccggttctcatagcctgtgacccgcacgtcgaactccccctgcccaaatttccgggcggcctctgccatctcgttcagcggacggacctgatgggaggaggtgatggaactggcaatcacggcgatgagcagcaccgtcacagcggtaaagaaaaagatggtggcggtggcacgccacatctcggagacgctggaagtatcggaggagaccagcaccagcccctgaggaatggtggctccgccgaagatgatgccgaaggggtaggcggccagataccgcttctcggagtagatgccgtccaggttagtcaggccgttgtaggaaccgctggacagcacctgctggaggacccgctgagggatgcggctgtcggtgtaattggacaggtcggaggagctgccgccggaggcatagatgatatccccgtccacatcggagagcagcacgttggagtcggagacagaagccagggtagccacatagctgcggaagtagacatccaggctcccagactgctggatatattcggaagtaaaggaggcgatatagtcggcgttgcgctccatggcgtcccgcttttctgcgatgatatagcggtaggagagcatcatgaaagcggcggacagcatgaaaaaggagagaaagacgatggccaccatcatgaacagctggcgcttatacaggcttttcaaggcaaacacctgcctcagccgggcgtcccggcgggggagacctcgaacttgtagcccacgccccagaccgttttcagacgccactggtcgctgaccccctccagcttctcccgcaggcgcttgatatgcacgtccacagtgcgggagtctccgaagtagtcaaagccccacacctcatccagcagttggttgcgggtgaatacccggttgggggaggaggccaggtggaacagcagctccagctccttgggcggggtgtccaccggctggccgttgacgatcagctcataggagtccagattgatgaccagcttgtcaaaggccagctttttggcgcccccctcctcctcgccgccggcggtgcgccgcagcacagcgtggatgcgggccaggacctccttcatctcaaagggcttgacaatataatcgtccgcacccatttccaggccggagaccttgtcgctggtctcccctttggcggtgagcatgatgacgggcaccttgctgctctcccggatctttttcagtacggaccagccatccattaccggcagcatgatgtccagcagcaccaggtcgggctggaaagcccggaactgctccacccccttgccgccgtccttggccaccaggggctcaaagccctctttttccaggtagaggttcagaagctccgcaatgttgctgtcgtcctctacgatcagaactttttttgccatcatcagcaccgccttttccatgtttcggggaagagacagggcgctccccaaagtttatcctgtgaccgggagcgcgtgccacggccccgcatcacaccgttctccttctattataagggattttgcccctcttgggtgaattttttgtaaatatccctcagttttggacgctccgctgatcgatataggagtgatccacctggatcaccgggtagtagtgatcggacagggctcggatcgaccgggtgagctgctccagcacctgctggtcggtgaggcggaagccataggggaccaccacgtcaaagatcaggttggtgtggagcggaccagccgtgatgcggaaatcgtggatggtgaggaccgggtccagctcctgagtgagccgggtcacctggtcccgcagggccagggtgcgctcgtcattgaccaccgggtccacgtggatgacggtctcgatgtggtggcgctccttcagttcccgttcgatgtggtccactacgtcgtggatctccagcaggtcgcagccggcggggacctccacgtggaaggacatcatggcccgcccggggccgtagtcatggtagactaggtcgtggatgttgaggatgtgggggtgggacaggaccagccggtcgatatcggcggccagcgaggggtccatggggcggcccagcagagggtccagggtctccctggcagaatcccacccagtcttcaggatgaacactgccaccagcaggccggcgaagccgtccacctggacatggaggaagtgagagatcagagtggacaggagaacgaccccagtggagacggagtcggagagggagtctgctgcggtggcctccatggcggcggagccgatgcggcggccaagggtccggttgaagaagaacatccacagctttaccaggatggagaggaagagaatgaccaccgccatccaggagaaggtggtgacttccggggaaaagatcttctccagggaggacttgccgatctccacccccatcagaaggatggccagggccaccaccagaccggtgaggtactccatccgcccgtggccgaaggggtgctcttggtcggcgtcctgtccggccagccggaaccccaccagggtgatgacggaggaggcagcatcagacaggttgttgaaggcatcggccaccacggcaatggagccggtggccaggccggagaggagcttgcccagaaagagcagggcattgagcgcgatgcccacgcccccggacacagagccgcaccgctgacggacctgggggtctccgggatccgcaccggaggggagcagaagacgaatgagaaacgcggtcacggggactcctcctgtcatttcggaattttattattatcccacatctggaaggagcagtcaagaaaaaggaggtggggaccctttttacttcgggactgatgggctccaactccatcgattttactatacattgaacagagcagaaaactatgataaaatagacagaaaataaattcccaatttgcctaggaggaagtagtatatgaaatgtttagattgtggaatggaaatggaacaaggaactgttgaaggcattggacaaagtggtggacattggtatgaatttacttctaatgaagaaaagaaaaaatgtgggctaaaaggtttttttacccgaaaaactatcagcgtagaaacttctgttcttgaaaaaactgcatggtactgtcctaaatgtaagaagattttaatgtggatggacagcaacgaataatataaatcctgatttaacagaggagcatggtagtatgaaaaaaacaatagctttgatatccttactggttttaatgctttggctggtcggctgcaacaaaaaacggtcaatatcaactttccatttgaggttggagatgttgaaaccattgaactgtaccgctatgcgggagcgcccgtttcagcagaaaagaaagttgttgatgcagaagaaactataaaagacctgtatgatatgttcgaggggctgaccttagaactcaaagaagtagaagaaaccacaggagcaaagataaccagttttagatttaatctatccgacggaacgacctacgaattgatttatggctgctatggagtaaagactggcaatctaaaatcctcaacaggtaattttgaatactttacgagtgcagacattggagcttattggagcgatattgaccttgaagcagttgccgttgaagaaagcgagctgccgaagtaagctgcctcgttttaatttttggactgggcttgtattgaaaaagtgcatactaaattttcatcatcagtgtgttggtatgtgccttttgaggtttgcagcatgcaggtcaaacatagactagggaaaagctccacctgttcaagggtggagctttttctgtgtatttcggcgaataaagcgttgggcaggcctaaataagtccaaatgagacaaaggaaaagcatgtgtcgccaaccgcccgcgacgggggagcggggagggggagatcagccccggggggaggggcagcgggcctccagggccacccagccgttcttctcccgccggccggtgagggtcagcccctggcggatcagggcctcctccacctcgtgagcgcgggtgtcgatgatgccggagcacaggaacaccccatcctccgccagcagagcggggacctgagcggacagggggatgatcacgtcggccacgatgttggccagcaccagatgatagcgctgacaggccagctgggcggccagcgcccggtcggagaggatatctcccgcccggacggtatagcggtcccggccgatgccgttgagggcggcattctcataggccacatccaccgctttggggtcgatgtccaccgcggcggcggtgctggcacccaagcacagagcagcgatggagaggatgccgctgccgcagcccaggtccagcacgggccggccggtgagggtgtgctcctccaccccctccaggcagagctgggtggacgcgtgggagccggtgccgaaggtgaggccggggttaaggtacagggggctgcggccctctggaacgggctcatcccgcatccactcgggtaccacatagaggcgccggccgacctccagaggtttatagtacttctgccagctgtacgcccaatcgttgtccgtcaggggggtgacggtgtactccgcgtccaggccacgtgtgtactgctccagctggacccggccggccccgtcgtcggtgacgtagaacttcacccgggtgacgccccgcatccggtccatcagctcctggtccacatagtcccagtactgccggttctgctccagaaactgctggaactccccctcatcctcgatgaccagcccggtcatgcccgcggcggtcagcttggcggtcacctcgtccaggcggtccggggtggtgttgacggccacttccagccatttgatctcgtccatggagacgctcctttgtgatgaaaatagaagttggctcagcgctgagtgcccagataaaacagagccagggtgccggggccggagtgggcgccgatgacggggcccacatagttgatgcggatgtcctgggtgccgaagcgctcccggaccatctgggccacggcctccgcgtcctccaggcagtcgccgtggctgatgaagacggtctgtttccccgcctcggtgacggtcttttccatcttgtctaccagggccttcagggaggactgccggcccctggccttgccgatgttgatgaggtgcccctcgtcgtccacgtggagcacaggcttgatctggagcatggagcccaccacggcggtggtggcggagatgcgcccgccccgcttgaggaagtgcaggtcatccaccgtgaactggtggcagagggagagcttgttggcctcggcccagtcccggacctcctcgatggtgcggcccttcttccgctcctgggcggcgtaccacacaagcagcccctggcccagggaggcgcacagggtgtccacagtgtacagcttccgctctgggtacttctcactcagctcctccaccgccagcttggaggactggaaggtggccgacagaccggaggagaaagccagtaccagcacgtcccggccagcctggagcaggggctcgatggcctccacatactggttcatgttgactgcggcggtggtagccacctcgccggcacggaggcgctggtagaagagatgggggtccatctcccggttgtcggggtagttgtggtaatcggccccgccgatggtgaaagtgaggggaagtacctgcacgtccgcagcctgggccatctctccgctcaggtcggcggaggagtcggtgagaatgatgaagtcggacataagattgacctcctgatatttgaactggagcggtgccgctccgaagggatcgcgatgagatcacttttttgccttttttggggcctcctcgcacgggggctggaggatatccaggatgcgtgcacaggccagctggctggcatagctgcgcagggccaggtccagggccaggcggggcaggtcctcgggggcggcctggggtggcagggattgggcggtctcattcagcgcccggtccagggcctggaggaagtaggcgtacagctcctccggcggcttctcccgcttttccccagcggagatgagcaccttcatgtcccgcacggagagcacccgcttcagggcgcacacggcggtgaggtagcccagatggatgggaccgtaccgcttcccgtccgcccgggggaccagaccgtccttgatatagttgttgaccatggcagaggtgaggacctcgccgtcgtcgaaatggatcagctggcggggcatgtaggagatgatctgatccatgtaaagggccagatcaggcagctccgcccagggggtgggacgctcctgttccagccgctgcttcaggtccaaaagctcatccaagggagagccccctttcaaaagtggttatcgttagtatatcacaaaataacagatactgcaaaggaagatcacacagacccgccttttttctcctgacgctccttctgacgctggcgcagccgctccagggcctgcttgtggtcgatggagcgcatctgggggaaagcccgcagcaggcggcgttgaccgaaggtgtggcggtccagcagctcgctcagggatttgcgcagctgttccagctcctccagacgctgggcccggcgcagcgccagatccagctgatattcgctgcgctgctcggccagctcctctttccaactggccagatcctccatcaggtcctcacgccggtcggccagggactccttccagtccgcacctttctcggctgcgtccagcacccggtcagccaaattttcgcccaaatcattggagagagccttgatacggccggccagctcgtcgatttggcccaggctgcggttgatccgggcgatggtgcgcacggtggcggtcaggtccaccgccatgacggagacgaagcaggccagcaggaccaggcccagggtgtgggggatgtggcggataagccatagcaccgaggggtggatgatctccatcaccagcaggcaggccagcccccaggccagggagaagcgcaggcagatatagccgcccaggttgaaaggctcgttggtgtagtcccaccagcgctgatggaaaagcttctccagcgcgaagccaacccccagttccagcagggaagtgaggagcaccgagcccagaaagagcaggagtgtgttctccataagaggggtgaggcagaggaccacgatgaccacgccaaagccgtagatgggacagaccgggccgttgagaaagccgcggttgacaaatttaccggtgttcagggcgaaaaagcagacctccaggcaccagccgagaaaggaataaataaaaaagatccataaaaacaaataaaaagaatgcaaaagatacctcctgccctcaggctgcgtgggatgcgtccatgtctgtctattaagaagtatagccgatttgccggggaaagtccagaaaatttgtgggaatacttgacaggacgaaaaggacagagtaaaataattagaacttcaaactatttgaaattcaaagaaaaatacttgccggcggagagggggagagcccggtgacagcggagcaggagcgctatttcaagagctttttggaccacatgttcgaccatatcatggatctggaggagcgggccctgcaccacgtgggggcggatgacctctccgtgcgggaactgcacgtgctggatgcagtgggggagcggatggcggacggccgcaacaccatgacaggcatcgccgacggcctctccatccaggtcagttcgctgacggtagcggtgaacactctggtgcggaagggatacctggtccgggagagggagaaccgggaccgacgggtgatacgggtcctgctgactgagaagggggcggaggccagccgggtccatacccagttctatggccgggtagtccaccgggtatgcagccgtttgaatgaggaggagtcccaggtgctggtccagtgcctgcgtcagctggacgagctgttcgactcgttgaagcggccggggaagaccggcgtcagtgaaaaaaagggaggttcttgaccatgtccgttcagatcctgaccgacagcacatccgatatcctgccggaagaggcggagcagaagggggtgcgagtggtcccgctgctggtgaacttcggggaggaggccttccgggagaatgtggagatcacccaccaggagtattttcgacggctggcccaggcggagagcctgccgaccaccagccagcccaccccccaggacttcctggcccattttgagcaggtacgggacgcgggggacagcctggtgtgtgtgctgctggcttccaagctcagcggcactttccagagcgctcagctggccaaggagctcagcggctacgacgagatctatatcgtggactcccagcaggccctgtgcgggctgcgaatgctggtagactttgcctgcgtgctgcgggatgaggggctgtccgcacgggagatcgcggagcaggtggaatccgccagccaccgggtgcgcctgttcggcatcgtgaacaccctggagtatctgcataaggggggacgcctgcccgcctccatggcggtggtggggacgctgctgaaggtgaagcccctcatcaccctgcgggagggagaggtgggcatcctgggcaagggcctgggggtcaagaacggcctggacaacctgctgaagctgatgggggacgagatccatcctgagccccgtctgcccctgtactttggatatacccagacccacaacctctgtgaccagctgcgggagcgggtggtggagaagtatcacccggcccgggtggagcagaattctgtgggggctgtggtgggtacccatgtgggccccgacggagccgtagtggtctacctggatcaggaataatattttgcgggattgcggaaaaagccgcccctttcgccagcttggcggagggggcggctttcgctgttccctgcaggcctgcatctccatggaaggccgcccccctcatttatggaggtatgcgccgtgccgcctttcccgagaggaggcctttcgggcggcccacaattttttcaaaaaaatagggccggcctattgacaaaaggaaaatgactgttatactgtgtatatagtatatatacaatatgacccgagagaaaggataagcgctcccctgggcggtccggcggcggtccggacgccgcacgcctggtctggcggggtgcttataaggtgccgcaagtggacatcatcatcagtaattccagcggaaagccgatctacgaacagatcacggaccaggtcaaggagcagatcatggcaggcgcgctggcggcaggggacgccctgccttccatgcgcctgctggccaaggagctgcggatctccgtcatcaccaccaagcgggcctatgaggagctggagcgggacggattcctggagaatgtgccgggaaaggggtgctttgtagcccctcagaaccgggagctgctgcgggaggcccagctgcgccgggtggaggaaaagctcacccaggccatcgaagaggcccgacgcggggcggtgtctctggaggagctgaaggaaatgctgacagagctgtatcaagaggtgtaaagcgatggaaaacatcattgtcgcagagggactgcggaaggaatacgacggatttgccctggaggatgtctccttccgggtccccggcggagccatcatggggctgatcggggaaaacggggcgggcaagaccaccaccatcaaatgcctgctgaacctggtccggcgggacgccgggaccgtcaccctgctggggatggatgatctggagggggagaaggagatcaagcaggatgtgggagtagtgctggacgagtgcttcttccatgacagcctgcgggcaaaggacgtaggcgtcattctggcgccggtgtaccggggttgggacgaggagctctaccgccggtatctgaagaaatacaaactgccggagaaaaaatttatcaaggaatactcccggggcatgaaaatgaagctgtccctggcggcggccctggcccaccgaccccggctgctgatcctggacgaggctaccgcggggctggacccggtggtgcgggatgagatcctggacgagttccagggctttatcgaggacgaggagcacgcgatccttatttccagccatatcaccagcgacctggagaagatcgcagactatatcacctacatccaccagggccgcgtggtgctctcggacagcaaggacgccattctggagcactatgccaagctgggctgcacccaggcccagctgcgggacatccagcccggagatctggtgcgggtgcggaagggcagcttcggctgtgaagcgctggtacgggaccgggcggcctttgcccggaaataccccggcctgatgctggaccgggtgacgctggaggatatcatgctcttgatcggaaagggggagttggcatgaccggcctgatgatgaaggatgcccttgtgatgcggaagaccctgaggctctatgccctgttcctgttgttctactccggattggccgtgctgggcgttttccccatgtccatggccctggctatggtggaggtgatcgtgatggtgcttcccatctccagcttcagctatgacgaggcggcgaagtgggaccggtacgcagctgtgctgcccgtgggacgtaccgctgtggtaaaggcccggtatctcttcctgctgctggtgctgctggcggcggcggccatcgggctggtggggagcatcctggcctccctgctggcacgggaggatctgggggagctgctggccaccctgctggtctctatgggtttagggctgatgatcgcggacattatgctgccggtggtctatcagctggggccggagcgggcccggccttggatgtatgtcatcatttttgcccctatcgtggtgttgctggggggcgccaagctgggcctcttcgatgggatagacctgtcctggctggatcagctgcccgagcttgctgtcctgggggtctttgccctggtgccattggtgcccctggtggggatgctcctgtcctgctggatctcctgcaggatctacgccaggaaggagttctgaggtggactgggcgcgggcgtccctgtggggcggaaaggcgctggggctggcgctggctctcctctgtcttaccaggagcattgagccggacggtccggcggcctggggaatagcggccgggggtgtcctcctgatcctctggggcgggggccggggcggaaaatgagcgcgccggaacggcgggccccttgcgcccggcccggaccccgtggtacaataaaaggagaatacagggaaagggagcgtgagcgccgtgacgacacaggaggcgatccgagagctgcagaatatccgccagtactgcgcggccaagtccatcccagcggtggattttgccctcaaagtgcttcgggagaagctggagcaggaggaaaaacagtaaaaagacaggaaaaagccccggcatccgaaaatgcggatgccggggcttttcacttgagggaaataagatggccggaaaagagctgggtcatgcggcgcggtgggactggccgggggagagctgcttcatgataaacaggaaagccagcatgagtacgatgcccacaggcagggcaatgaagggggtctgcacgaaaccggccacaatataagtgacaaaggagatgactgcacaggagatggcgtagggaagctgcgtggacacgtggttcacgtggtcgcactgagcgccggcagaggccatgatggtggtgtcagagatgggggagcagtggtcgccgcacacagcgcccgccatgcaggcggagatgcagatgatgcccaggggattgtccagggggaagacgttctgcacgatggggatcaggatgccgaaggtgccccagctggtgccggtggcaaaggccaggccgcagccgatgaggaacacaatggcgggcaggaagttctgcaggctctccgcattgttgtacacaaaatcacggacaaaatatttggcgcccagggagtcggtcatggacttcagagaccaggcaaaggtgaggatgaggatggcggggaccatggccttgaagccctcaggaacgcaggacatcatctccttgaaggacatggaccggcgcacggtgtagtagatcagggcgaagagcaggccgaaggcagagccgaacatcaggcccacggaggcgtccgaattggagaaggcagagacaaagtcggtgccggagaagaagccgccggagtagatcatgccgatgacgcagcagacgaccagcaccgcgatgggcagcaccaggtccatgaccgtgcccttggtgtcgtcgatctcctcatccagcatggcataggggttggaaccggagaagaggtcgttgttctcaatggcgttgcgttcgaacttggccatggggccgaaatccaccttcatcaggaccagacccagcatcattacgatggtgagcagggcatagaagttataggggatggcccggatgaacagggtcagaccctggccgtcctccgcaaagccggagacggcggccgcccaggaagagatgggggcgatgatgcacaccggggcagcggtggcgtcgatgatataagccagcttggcccgggacacatgatgccggtcggtgatggggcgcatcacactgcccacggtgaggcagttgaagtaatcgtcgatgaagatcaggcagcccagcacgatggaggccagctgagcgcccacccggctcttgatgttcttcttggcccagcggccgaaagcggcggagccgcccgccttgttcatcaggcacaccatggtgcccaggatgaccaggaaaatcaggatgcccacgttgtagctgtcagacaggacggagacgatgccgtcgctgaacacgtggacgagggtgccctcaaaggcaaagttggagtagagcaggccgcccaccaggatgccgatgaacagggaggagtagacctccttggtgatcagggccagggcgatggcgatgaccgggggcaacagggagaaggcggtgttgtaaaagctgctgggggactggacatagccggtcccgccgcaggtggcacacacattggtcccgccgcaggactcgcactgtgggtccaggccgtagcacaccatacaggcggtgctggtgccgcagtcgggacactcgatcatcttgctgcccggctcgtcggtggggttggaggcgaagacggaggtggtcagggccagcagcagcatgaccaccagcaccgcccgtgtgatccaggtgcgtcgcgttctcatagaaatcgttccttcctttcttttgatccacacacatcccagctgaagcggcggtcagacaaaagaaaaggccatggcgcgcgatcccggagcggccatggcgaaggggggcggtctggcggcgaaaacaggccagacggcaggcccccctggatagcgctccacttgcagtgacagtccgggggatcttctcccccggcccaggaggggacgcccaggcaggcggcccgaccttcggcggcgttccctctcccccgggacggctgcctggcctctgtcccggcgtacgcatgaacgccgcgcctctatccgacacgattcagttggaagtgcaagtatcctaccacgcctctgtcaaaaagtcaaggcatttgacgggcggtttgggaaaaaacgagaaaaaagtcagctgtgggacatgaaaaaggtgaaagtcccggtggccacggtttcaccggacacattggtcagctccacctggatgacggagaggtggtagcccatcttcttcggggtggcagtgcagaagatgcgggggccatcggcggggcggaggaactccatggtgctgctggaggtgacgcaaagcccccctttggaacaggcgcagcacccgcccactgtgtccgccagggtggccagggcgccgccatggaccttaccgtgggggttgatgctgttggggcccacctccagcaccccctgggcaaagccgggctccacccgggtgaccagaacgccgctctcataggagaactggtggggggcattgaccacggagttgaggtggactccgggcaggtcggcgttggaagaagagagagacaagggaaacactcctttttcacaaaaagtctgaaagaggggaaaacggggagagttgtatccatccgcccctccggcgcataggatggggagaatccaggcgggcgcaggcccgaaataaggagggagcgactgtggaacagagacagaccgccccggcccaggacacggagcgggcggtggtggatttggagacctttgagcgggtctggcgcagagtgatgcccaaccaggacatgagccccatccaggtgggggcgccgaccgggccggggaccggggtggagcggcaggcggaacggatacctgccccggcgcagctccagaatcaggatcagggggccgccccggcggcccagatccagagctcggcgcagctccagccccagagccaagttcccgctccggcggagcaggccgctgggcaggtccggcagctggaggagttgatggaaggggcctggatgggccacaggatctatctggagctggcccggcgggcccggggcagcggggcccggaccctgaacgccctggcggcggagcagcgcaggacggcccagcggctggcggcctgctggttcctgctcaccggcgcctgctaccacttctccagcccgcccatcccgcgggtctgccccctggccgcagcgctgcgggaacagttcctgcaggagcagaagtggagacggttatgccagcgggcggcagcggaaggggacagcaccgcctgcggggggctgtatgagacgctggacgggcaggcggagcaccgcatggaggccatccgatgcctgctggagcagatgcagcccctgcccagcgggggttgacggatggagaaaatctgatagacttgaggaccagagggtatcttaacacgaaagagggccggtgtcatgtgtcaatttcaacagttccgatttccgtccagcgatgggagcagctcctgctacgccggggcgtggctgcccccggaggagcctcggggcgtggtgcagatcgtacacggggtgggggagcacatcggccgctatgagacagcggcccgattcctgacccgacagggctttctggtgtgcggcgaggaccacctgggacacgggaacacggtccaagacggccgctacggcgcctttgccccccagaacgggtggaagctggtagtggccgacatcgcccgactgcgccgcatccagggggagaagcatccgggcgtcccctacttcctcctgggccactccatgggctctttcctcacccggacctacctcatcgaccatccggggacggtggacggagccatcctgtcggggaccgggcaggagcccgcccccctggtggctttcggaaagctgctggccggactggagtgccgccggctggggtatgacggggtgagcccgctggtggaccgcctctccctgggggcctataaccgcaggttccggcccaaccggaccagcgcggactggctctcccgggatgaggagcaggtggacgcctatctggccgacccgctgtgcagccacaagtccagcgtgtccatgttccgggacatgatgggcggtctccagtacattgcccgccgggagaacctggcgcggatggacccggacacgccggtctatttcttctctggggaccaggacccggtgggcggcatgggaaaaggggtgcgcaaagtgtacgccatgttccaggcggcgggctgccgggacgtgaccctgaagctgtatccaggcggccgacacgagatgtttaacgagctggaccggcagcaggtctttgacgacctgctggcctggctggaggtccacatgccccgggagggacgggcgtaaagagaccgggcgcgccgcgcagagcggcgcgcccggcttttcaataccggtggacccagccgctgaggaaccacacaggcagcagccacatcagcagataaaacagcaggttcaggggggagagggaggcgtaggcgtccacagaggtcaggtagtaggccagcagaacccccagggtggagccggcgcaggtgagtaccgcggaggcccggacggcccggcgcaggcggcgggcccccaccaccgactcggcgaaggggagcagcccctctcgacagagcacggcggtgagcacgccggtgtggtcctgccccggatcggacagctcccgccggcgttccaccggaggaaagtccatccggtctgccgccagcttgaaccgctgctggagcatggccgggatgagattgaagtcccgggtggccagcaccggcccgacccgctcccgaagcagggaggtgagggagggaaacacggtgtcgggcagggtgtaattcagggcgaagatgccggccagctccccgtcgatggcacagaagaccgcgtttttcacgttcagcccctggggcaggggtacctccatcaggttcatgaaggcggcggaacccaccagcacctggtccccccggatgttggcggagaggcctccgccctcatagcagcacaggctgtccgccctgcggaagatggccccctgggtgcggagcaggtcgtggaagagcttttccagcccacagcccgagtcccggatcagggtggcggtgtagcccaccacccgttccacggagaagtccccaaagaccttgatgccgttgagctccacaaagccgggggggaataggtccagatcggtgatgaggacccggttgccccgccgggacccggccgcgccgggccagccggccaaggcaccgccgctctgggagacccggcgggccaccttgtggaaggagcggccataggccagtgccccgccgaagccggcggcggcagtgaaggtggcggagagacaccacatcaggtgctccccctccccgatgccgaaggaggccagcagggaaaagactatgcaggccagcagcaggacgggacagaacacccggtagatgcgctgggcgccgtcgtccatctggatctggctgccaaagccggcgggggtgccggaccacttggcgtaggtgtccttcccgttccacttgccctcgtccagagtgaccagatagggctctgcggcagccgctgcggtgcggcaggacaggcgcagggcacaccgcttgtgataggtgccgtggagcaggaagaacaggccgaacagggcggcgggacagtaggagagctgcccgccccggtcttggctcccggccagcagcaaggtatccgccagggtgaaggcgcaggagagggcggccagggtgtccatccccaccttcagcctcaaaccgcgccacaggccggcggccagcacgtcgagagacagcagcatacctgcccccagaagcccggcggagatccagaggaggaggggatatcccaccgccagctccggggggagggagacagggagcgaggggagcaggcaggggaccagagcggcggcggccaaaagaaagaccaatagggagcggacccggagccccttaaggcccttgccgtaggtgcgggccagctcctggggggggaggtcggggggcgggggctcctgccggcggggccggcggacatagcgcaggtcctcctccgtctcctggtcggtgccggggatcagggtctccaggcggcggacctcctctgggtccatctgctccgactcctcaaacatacggtcggcgtagtcatccgcctttttgctgatgtccttgaggaaggaggccagagggctctcctcctcgggaaactcgaccaccttgtctccgttttcttcggcatccaggacggcgtctgcctccggggcctccccttcgggctccgaagggcccttctccggctcggactcatcctggggggcggggccgtcctcctccggaggtagagctcctccccctgggaaggccaccacgttgtctcggttccgacggggacggggggcctccggccagggcaggtcggggccgtcgtcctccgcgggcgacgggcgcagggggatggcgctgcgccccggcgggcttttgacgccgtactcggccagaatgtcgtccagggagaagccgccgtcctccgcaccagcgatcagggacttgacatcggccagctcgtcgccgagattcagttttttatcctcacggtcgctcatggtcattcctctgtgatgtgtgaaatggaaattctgtgccgccgacccctgggggcggcaggtgctttatccgcccaggcgctgacgcaccgcctcgtaaagcaggacggcagcggcagcggaggcgttgagggagttgatcttgccaaacatggggatggagacggtgaagtcacagttctccgccactagacggcccatgccgtccccctcgctgccaatgacgatggcggcggggccctttaaatcggcctgatagagctgggtggtaccgccggcagcggtgccgaacacccagacgccctcctccttcagctccttgagcagggagggcaggttgggcacccgggctaccggcacatgggccaccgccccggcagaggtcttggccaccacggcggtcaggccggcggagcggcgctttggaatgatgactccgtgggcaccggcggcgtcggcggtgcggatgaccgcccccagattgtgtgggtcgctgagctcgtcgcagaccacgatgaggggggcctcaccccgctcccgggcaatattcaggatgtcgtccacagtggcatattcccgcacggcggccagggcgatgaccccctggtgggaatgggtgcggctcatgccgtccagcttccggcggtcggcgtccactaccacaatgcccttctcccgggcggcggaggcgatgtgtcccagggtgggatcggtgtctcccttcatgagaaagatcttgtcgatggctacgccggcccgcagggcctcggtgaccgcattgcggccttcaatgacgccgtcgttttccgcctccacaggggcggagcggcgcagcgggggtcgtttgttcatggagcagtcctcccatccgtcgttccagtttgcataataaaataatatatcacaatccggcagggaggggaagggtcaaattgcggggatcggaggaaaacggccgaaaagagaggaaaccaggaaaaaagacgggcgatggggcagcatcgtcaactttcacaaaatgtttacagcgctctttcttgtttttaataaggagatatggtatgatactaatcaatgtaccccgcacacccggccggagcagtccgaacgatcttatggaaaaggcaggaggttttctcctttgaaaccagataaaggaaacaataacggaaataacaacaagagaaacatcatgggcctggtcagcatcatcttttgggccctgctgttcacaatgatgatcaagagctgcacctcaagctatgccaacatgggtactgtggaagtgccctacaccaccttcaaggagtggctggcggaggacaagatcgacaccgtcaatgtggagaacggcaaatacaccttcaccctgcgggacggcgtggaggtggagctgccccgggaggagacctccggcgggagcggaagcctgatgaactccctgatccctgttcccgcccagacggaggaggaaaagcagtatatcaccgtccccctggccggggtggacgacccggagctgctggccatgctggaggagcacgccgatcacgcctacaccgagccggtggacgagtcggcctatttcctcagcctgatcctctcctatgtgcttcccctgctgctgatggtgggactgatgatgttcctgttccggggcatcggtggaaagggcggcatgggcggcctgggcggcgtgggcaaggccaacgccaaggtctatgtggagaagaagaccggcgtcaccttccgggatgtggctggccaggacgaggccaaggaatccctccaggagatcatcgacatcctccacaatccccagaagtacacggagatcggtgccaagctgcccaagggcgccctgctggtgggccctccgggcaccggcaagaccctgctggccaaagcggtggctggagaggcgggcgtgcccttcttctccatctccggctctgactttgtagagatgtttgtgggcgtgggcgccagccgggtccgcgacctgttcaaggaggccagcaagatggccccctgcatcatcttcatcgacgagatcgacaccatcggcaagtcccgcgacaaccgcatgggcggcaacgacgagcgggaacagaccctgaaccagctgctggccgagctggacggcttcgacccgggcaagggcgtcatcgtgctgggggccaccaaccggcccgaggtgctggacaaggccctgctgcggcccggccggttcgaccgccgcattaccatcgaccggcccaacctggccggccgtctggccaccctccaggtccacacccggaagatcaagctgggagaggacgtggacctcaagaagatcgctctggccaccgcggggaccgtgggcgcagacttggccaacctggtgaacgaggccgccctgcgggcagtccggcacggccgaagagtggtcacccaggaggatctgctggcctccttcgaattcgttatcgctggaagcgagaagaagaacagcgtccttaccgagtttgagaagaagctggtggcctaccacgaggtgggacacgctatggtggcctacaagcagaagaacgccgagcccgtgcagaagatcaccatcgtcccccacacggaaggttccctgggctacaccctgctgatgcccgaggaggacaagaccaacctgcgcaccaaggaagagctgatggccaaaatcaccgtctccatgggcggtcgggccgccgagcaggtggtgctcaacaccatgaccaacggtgcctcccaggatatccaggaggccaccaacctggcccggaacatggtagccatgttcggcatgagcgacgagtttggtatgatggctctgggctccatccgtaaccagtacctggacgggggctacggcctggactgcgcccaggacaccgccgctgtcatggacaaggcggtaaaggccatcctggaccagtgctatcaggacgcagtggaactgatccgggaaaacctggaggacatgcacaaggtggtggcctacctgctggagaaggagaccatcaccggcggcgagatggtggccatcatccaggggcgggaccccgccctggtggaggacgcttacgcctccacccacggcaggagccgttccctcactggggacatcgagccccccgccaagaacatccacatcgtcagtgagccggtgtctgcgccgcagctcccagacggagagccggagcagagcggtccggaggagccgcccgcccagccccgggatgacgagacaccgccccctcaggacggggaagggcccaatgagaagccggagcaggaccggccgtaaagcagaagaccggggcggcgctgagccgccccgattttttcaagatcgacaaagagggagagagaaggtatgatccgactggcgacagagcaggacctgcccctggtggggagcatctatgaggagatcctggcggaggaggagaaacggcccgcctcctttaccaactggcagcgggggaagtaccccacggttgaacacgcgcgtgcggccctggaggccggcaccctgtatgtggcggaggaggacggagaggtgtacggctgcgtcaacctgaacggagagcagctggcggaatatgccgcactgaactggtccgtcccggcggatccggaggatgtcatggtgatccacaccctctgcatcagcccccggtgggctgggcgagggaaggcacgggagttcgtggccttctgcgaggaggaggcccgcaggaaggggaaaaaggtgatgcgcctggacacctatgaggggaatcttccggccaacaccatgtatcccaagctgggctatacctttgtgggcgggacggagttcttcttccagggctttatccgggagatcctgaactgctacgacaaaaagctgtaaatgggagctgcgcccacctcagttgaggcgggcgcagctcatatccgggaccgacaccggcagagcggggagaggaggggggggcgcggcgcagaccgcaggccccctcagctcgtaggaaacgatccgcagagtcccgcacccgcaggtgcgaaggaattacaggctgccaaaaggtccctgaaggactttttgacagagtgaattaaatctgctttttcggcggcatgtatgtgaaaaaatacgacttgtcctgcaagtgtgaactttgcctgtcgtgagtggacaagacgtgcgcacagcggggacagcctgctccaggcatatcagggcgccagccaccgccacagaaagaagagcaggagcgcctggaacagaaacaggagagggaagcctgcccgaaaataccagtggcgggtcttgtggtggaaaaagtacatccccagcatcccccccagggaaccgcccaggacgggaaagaagaacagggccttctccgaaatgcgccaacagccccggcgggcccggcgcttgtccagccccatcagggcgaaggccagcaggtttgcagtggtccaatagaggcaggccagctgccagagttgtgtccgcatgattgctcctttctgataggcggcaggggggacagagaaggatccctatcagaggatagcatgaaaggaagcgattttccagcccccaaaataggtggaaataaaaattcaggaatgtgggggcaggaggtgcagaaaaaggggggaatgtggacagcgagtgtcgaatataaacgaatctaagcgcatatcgtcggatttgatataattgcttccattttgtcgtatgatttccttaaaactaaattgggaggaaatgtcgatgaatgaaataaatgtaattcgacgggaactgcgcgccctggggatcacgaggcgatgccgctgttatggccgcatcgtaatggccattcagctggcggtggaccaggaggacagcctggaggcagtgaccaaggagatctactgggaagtgggcagccgctgcgggcggaaatggaccgcggtggagcggaacatccgcactgcggtgcagatcgcgtggcggaccaacccggaactgctgcgggagatggcggggtatcccctggacgggccgcccaccgcatcggaatttttggagatcctgtccaacgatgtgcagcgggcgatggagagaagagaggagggagtgtcttcaactcccggaatatgacagaaaaagggggagaaagccggcccgtgcattgcaccggagagagaaaaacggtataatggaggggatccttgtgaaaagagggggacatccatgtatattgctgatcttcatatccactccaggttctcccgggccaccagccgggactgcgacttgccccacctggactggtgggcccggcgcaaaggcatccagctgatagggacaggggacttcacccatccggcttggcgggcggagatgcgggagcagctggtccccgcgggggagggggtctatgccctgcgggaggggctgacaatggaggggactgcgcccggggccgccccccgtttcgtggtcaccggggagatcagctgcatctacaagcgccacgggcggacgcggaaggtgcacaacctgatcctcctccccagcctggaagcggcggaagaactgtccgtccggctggaggccatcggcaacatccactcggacggccgccccattctggggctggacagccgggatctgctggagttgaccctggagacctgcccagaggccgaattcatccccgcccatatctggacgccccactttgccatgttcggtgccttctccggctttgacaccgtcgaggagtgctttggggacctggcggaccagatccacggagtggagaccggactgtcctctgacccgcccatgaactggcgggtatcggcgctggaccggctgagccttctgtcccactcggatgcccactccccctccaggctgggccgggaggccgacctgctggacaccggcctctcctatccggagctggtccaggctatccgcaccggggaggggcttctgggcaccctggagttcttcccggaggagggaaagtaccacctggacggacaccggaactgcggggtgtgcctcacccccgccgagacggcggaacggggcggactgtgtccggtgtgcgggaaaaagctgaccatcggggtggagcaccgggtggaggagctggccgaccggccggcgggcttccggccggaggaagccaagcccttcgagagcctggcccccctgccggaggtgatcgccgcctccaccggcggctcggccgccgggaaaaagaccctggaacagtatgagcgcttgctgcagaccctggggccggaattcactatcctgcgggacgtccccatagaggacctgcagcaggaagcgggcccctgcgtggcggagggcatccggcgcctgcggctggggcaggtggagcgccgccccgggtttgacggggaatacggtgccatctccctccttgccccggcggagatccagcgcctgagcggacaggtctccctgtttggggcagaggagaccccaaaacagggggagaaaaagcggggacagctcccaaagcggccgaaggcggcggagcgggagggggagcagggcctccagcgctccaatccccagcagcaggcggccatctcggcggaggagcgaaccgtagcggtggtggccggacctggcacaggcaagaccaagaccctggtggaccgaatcgcgtggctggtggaggagtggggggtccggccgggggagatcactgcggtgaccttcaccaaccaggcagccgctgagatgcgccagcggctggaggagcgcctggggcggcggaccgcctcccgcatgactatcgggaccttccatgccatctgcctggctctgctgggggatgtggggctgatcggccaaggggaggccctgtccctggcggaggagaccctccgggtgctgggccggaaggggagcgcacgggcgctgctccagggggtgtcccgggtgaaaaacggcgcgtctctggagacggctggactggaagaggagatctggcaggcctactgtgcccggctggaggagcgggggatgctggactttgatgacctgctcatccgggcgctggcgctggacactgggggccggacctgcttccggcacctgctggtagacgagttccaggacatcaacgagacccagtaccggctggtccgggcctggagcgccagcgggtcgctctttgtcatcggagacccggaccagtccatctacggtttccggggggcggacgggaagtgtttccagcgcctgcgggtggaacggccggagctgcgggagatccggctggtggagaactaccgctccacgccggaggtgctggaggctgccgcccccgtgatcgagaaaaatccgggcggttgccgccgcctgcgccccaaccggccctccggcccggcggtacggatggtgaggagcccggatgccttctctgagggggtgtttctcgccaaggagatcggccgtatgaccggcggggtggacatgctggaggcccaggccctgggccacgagcggacagtgcgggctttctctgacatcgccgtcctctgccgcacccatcggcagctggaactggtggagaagtgcctgcgtcacgacgacatcccctgtgtggtcagcgggcgggaggactttctggaggaccgccaggtgcggggagtgctggctttcttccgctccctccaaagcccggcggaccctgcagccctggagaccgcgctgggccttctgtgggactgtcccgccgacctggccggaagggcccgccgcctctggacgcagggggcagacctggcggccttggaggaggcggtccgcggctatggccatctggagctttggctggaccgggtgaaggagtgggagccagcggtggagaaggagaagccatggaaactggtagagggctgggaggagcggtacgggacctcgccggccttggagaagctgcggaatacggcggtgttctacccagccttccgctccctctgggaggccctcactctgggggaggaggcggatgtgcgccgggctgcgggccggggctgggagtccggggctgtccggctgatgactctccacgcctccaagggactggagtttcctgccgtctttgtggcgggactgacagaaggcacgcttccccttgagatgcccggccgtccggcggatctggaggaggagcgccggctgctctatgtggggatgacccgggcccgggaggagctgatcctcagcgccgggggcggaccctctcccttcctggacagcctgccgcagggcgtggcccaagagcaggcgggccggaggcaggagcggagactagagcagctgagcctcttctgagacggggagcccccaggtccggcagaatcagtacactggaaaagagagacatctggggctgcgcccttgacagtgggtgtgtgtcccattagtatggaggagcggggacgaaaaaataaacggtccgggatggaacaaaatcccgtgtcgggtcgtctatacaaatagaaggaacactttggataccaggaaaggaaacgcgactatgaaatggaatcggctgttggccggcgcggtgtgcgcctccctgctgagcgtacccgtctgggctgtggagggcggggaggctccggccgccggggcgggccagacatcttccgcggcctgcggggtgacgctggacggagtttgcctggacctgagcgaggcgcccgccgcgccctaccaggagaacggacaggtgatgctcccgctgtggaaggtggcccaggccctgggatggactgtgacctggctgccggaagagaacgggacccgcatcgaaaatgaggatcaggtcatgaacctgacctacggattggaccgctatgcctgcgccagcaagtcctccatcggggtgacctcgccggagcactatggagcggcgccggtggtggtggcgggacgtacctacgtccccgcctccatgttccagctgctctcctgcaccgtgacgatggagggggggaccgtggccctgcggacagagggcgcaccacccgcggaggacgaaccgccctccggcggggcagtggagtatcagaccgcagccgaggcggagcaggcggtggggttccccctgaaagctcccggggagctgggagcccctgaaaagatccaggtgatcagcggagcggtggcccagctgaactggccggagggcatcagctatcgggtggcccgggggagccaggaggtcagcggcagctacactgcctacggctgggaacggagccagagtgcgggagaacagatggtgaccatcaaggggaatggggactggacctatctggccgcgtggaaggacgggacatacagccatgctctcgcttttgaacagggcgtgagcgcccagcgggcagtcagcctggttggggacctggtcccgctgtctggggaataagcgcatcaaaaaggagggagccccgctccgccggcaccatggccggcggagcggggctcctttgagaaagaaagggggctcagtccccctgcatcacagtcagggcctggcggcagttctccactacgttgatctcgtggctgcccccgtactccccatccagcgtccagggaatgggcttttcggcggtgaacttcagatgggaggcgtggaaggagagcacggcccctgactgggggggctcctgtcggataagggcctggaggctgtcagtgaggtcggtgatgctggtgggcttgcggaccagaatgacctcaaacagcccgtcatccagcaccacccggtctgtaggcagggccttcattccgcctacggagatggtgttgcacaccattccgtaaaagaaatcgtcctccagcacctggtcgtcgcactcgatcctcaggtggtagggggtgatggaggggagggaggcgatgcccgccatcacataggccagatggccgaaggtgtttttcagatcctggggggtgtcgtaggatacctcggtgaaggcgccgaaagcggccacatagacgaaggggcggccgttgagcctgccgatatcccaggggcggggaacgccggtctctgaggcggtctgggcggctttcaccgggtcccggggcaggcgcagggtggtggcgcagtcgttggtggagccgaaggggatgtaacccagcaccggcggatggtccagctgcatcaggccggacaccgtctcgctgagcgtgccgtccccgccggagcagaccacccggtcgaactggccgcccagctcggcggcgatgcgggtggcatccgccttcccctgggtgggatagacggtggtcaggtagcccgccttggtaaagacatccagaacagcggccagatcggccgtcacccgccccttgccggcggtggggttgtagagaaaaagcatggttttcaaagctggggcctcactttttatgagattggcgcccggagcgtcccgtccttggactccccggatgctgctgattacgaattattataaggaatgggacggaaaaaacaagggaaaatttgtgaatctttatgtcatctgtacaggagaggagaaaggaacgggtccgttcccggaaaatggcggaaaaagtgggaaaatcccttgcgtatccggccaaaaacgagtaaaatgtggaacgcaacaaacttggtgcccggcggaggtgtgtgctgccccgtctcagcagacggcaccaccgctatggggtgaatgagagagatggatcgaaacgtcctctccgccgctttccatgtcaccattccggtgctgatgggctatctggccatcgggatggccttcggcctgatgatggattcggcgggatacagtgtgttctgggccctgctgatgagcctgatcatctatgccggggccggacagtacatgggggtgactctgctggccgcgggggcctccccccttcagacggctctgatgaccctgctgctgaacttccggcacatgttctacggcctgtctatgctggaaaagttccgggggatggggctgcggaagctctatatgatcttttccctcactgatgagacttatgcgctgctggcgtccgccaaggcgccggagggggtgcgggagaaggactactacctggccattgccctgatggaccacagttactgggtgctgggcacggttctgggctccctgctgggcagtgccctgtcctttgacaccaccggagtagacttcgccatgaccgccctcttcatcgtcatcgcggtgggccaatggaaggggacccggaaccatctgccagctgctatcggctgcctggccaccctggccagcctgcggctggcgggggaggataatatgctgatcctggcgctggtggtcatcgtggccgccctgctggtattttcacctaaaatgccggagggacaggccctgcacaaggccgggacaggaaaggaggagcggacgctgtgaacggagagaccacacgggatctgctcctgatcctggtgatggccgtggtgacctttgccacccggctgctgcccttcctgctctttgaccggggggaggagccccccaaggcggtgctctatctggggcgggtgctgcccccggccatcatggccatgctgatcgtctactgcctgaagggcgtcagctttgccaccccggcggggtgggtacccgccctcctctcctgcggggcggtggtcctcctccatctgtggaaggggaacgatctgctctccatctttggagggacgatcctgtatatggccctggtccagggcgtgtttgggtaaggaggagcggaaatggaagactgtttggccgccctgcggcaagaggtggaccgcctggacgatcagatcgcggagctgtttttgaagcgcatggaggtgaccggccggatcggggcctgcaaggaggagctggggctgcccctgatggacccccggcgggagctggaggtgctccggagcgcagcggcggagacgttggatgagggccggaaactagagctggcccacctgtttgagactgtgctggccctcagccgccgggacctgcggcgccgggtgggagggaacgatcccggtccgggatacagccgatgccggagggccgaggccgccgcgcggcagccggtggagagacccagggtggtctatcagggcgtggcgggggcatacagcgagatggcctccctgcgtttttttggagaggactgccggtgccagggcctgcccacctttgaagaggtgttccagacagtggcccagggcggggcggactacggcgtggtgcccatcgaaaacagctccaccggggctatccgccaggtgtacgagctgctgggcaggtatgagtgctacatcgtgggggagaataccgtcaaggtagagcactgcctgatggctccccatggggctaccctggataccatcacccatgtctattcccacgagcaggggctcttccagtgcgagcccttcctggcccggcatcccggctgggtgggggtggcccacggggacacggcgggcagcgctcagtatgtggcccagaccggggatatcaccaaggcggccatctgttccagccgggcggcggagctgtatggcctggagattctggcccggggagtcaactacaacagcaacaacaccacccgcttcgtggtggtctccccggtgatggagctgcgggagggggcggacaagatctccgcggtcctcagccttccggacgaggtgggcagcctccatgaggtactcaccatctttgccgtccacgggctgaacctggtgaagctggagtcccgccctctgccgggacggagctgggagtatctgttcttcctggagtttgacgggagtctggcggacccggcgatggacggtgccctccaggagctgtcccaggcatccgcagagatgcgggtcctggggaacttcaaaagcaatctgtaaggaggagaggcgatggacagggctgtgcttatcaccggagcttcccggggcatcggggcggcggtggcccgccgctttgcccgggagggctggcgtgtgggggtgaattaccgcacctcccgtggccgggcggaggccctggcagcagagatcgccgccgccgggggacagaccgccctcctgcccggcgatgtgtctgacccggcccaggcggccgctctggtccgggcggcggaggaacagctgggccccctggacgccctggtgtgcaacgcaggggtcgccctgccccagcagctgcttaccgacaccacggacgagcagtggcgccaggtgatgggggtggatctggacggggtgttctacaccctgcgggcggcggtccccggctttgtccgccggcagcggggggccatcgtcaccgtatcctccatgtggggggtcactggcggctcctgcgaggtggcctattccgccgcgaaggcgggggtcatcggcctgaccaaggcgctggccaaggagctggggccctcccacatcaccgtcaactgcgtggcccccggggtcatcgacacggagatgaacgggggactgggtagcgaggccctggccgctctggcggaggagacccccctgggccggatcggcacggcggaagaggtggcggagagcgtgtggttcctggcagggggcggcgcccccttcctcaccggacaggtgatccagcccaacggcgggatcgtgatctgaccgcgggagcgggagagagggaatagcgccgccgaaaggcggcatactgaaatgagacgaccccccgagggagagggcggacccctttcacgccgggtgggtgggaaaggaggtccgtgatgcgcgggaagcggttcgtgtacggctcctaccggggacggaggagcaccacagacgtgttgaagaccgtagccctgatcctggcggtactggtggtgctggccgtggccggagtgtggatggcgcagaaatacatcgtctacgacgacgggggttatcacctggagctgcccttctttcaaaaggagggaccggcccaggagccggaggacttccgggtggcggtagagcctgccgcctcccagccggaggagacaccggaggagggagagccccttctggcggcggtgactgtccccctttcagcggtggaggacggctcggcggaggcgctggccgcccaggcaggagccaacagcgtcctgctggacatgaagacagaccggggccagctgggcttcgtctcccagctggccatggccgcctcggcgggggtcaacgccggacaggcggacatcaaccgccagctccaggccctcaacagcggggaactgtacacggtggcccgcctgtcctgcttccgggaccacgccctggccaaggatgagacatatgccatccggaccaacagcggctaccggtggaccgatccggaggagctgcggtggagcagcccagccagtcaggcggtccaggactatctggtcgctctgatggtggagctggcccagctgggctttgacgagatcctgctggacaactggggctatccggcggagggaaatctgggctatatcaagcagggggatgcctacgacctggagcacctgtcccagccggtggaggagttcctcgccagagcggaggcggctttggagccctacgggacgcggctggcccttcggagcacctgggcggtgctggagggggatgagagtcccggcggccagacggcccagctgctggagcggtatgcccagcgggtctggctggaggcgccggaggacggtatggcggacctgctttcccaagcggggctcccagaaggagaggagcggctggccctgctggtggaagagctggacccagacctggactgttcccaggggatctgggacccggaggcgtgaactccgtacgaggaaacaggcaaggcgtctgagtgagagctcagacgccttgtttttctcccaaagagggcggagccatgtggctccgccctctgaaagatagaatttacgcgtgggccccggcgtgggtgtaggaggagggggtgggggccgcctcccgggcggcggcgggggcttccccgccctgctgcttggccagcgctttggcgttggccagcatcagcttgatgcggttctcctggttgatcttggtggcgccggggtcgtagtcgatagccaccacattgctgtacggatagtcgtccttcagcttgcgcagcatgcccttgcccacgatgtggttgggcagacagccgaagggctgggtgcagacgatgttgggggtgccggtgtggatgagctccagcatctcggcggtgaggagccagccctctcccatcttattgccgtcccccagatagccctggatcatccggtgcaggtcctggaaggtgcccggtgcacggaagcggccggagcgctccagcgcctggatcatgtccttctgacaggcctcgatgtacttcataaagagctggcaggcagccttcttgatccacttgccgccgtacagatccacgtccactacccggttgtagatcttgaagatcatgaaatcggtgaggccggggaccacgggttcggccccctcggagagcagaaagtcctccagattattgttgcccaggggggagaactttacatagatctcacccacgacgcccacccgcaccttctgctccccggtgacggggatggaggcaaagtcggcgcagatggcgtcaaagttggtccgcatctggccgcggctcatccccttaccctgctggaagccctggatcagccggccctgccaggtggagaccatggcgtcagtggcgccccgctcccgctcatagggccggacctggttggccacattgacgatgatgtccccgtacatcatggcgtagaccatcttgcggatgatggggagagtgagggagaagccgggatttttctccagaccggacagattcaccgagatcaccggcacaaaggccaggtccgctttttccagcgccttgcgcagcaggtggatgtagttggaggcccggcagccgcccccggtctgggtgatgaacagggccaccttgtgggggtcatagccgccgtgcttgatggcgtcgatcagctgtccgatgaccagcagggcggggtagcaggtgtcgttgtggacatatttgagcccttcatcgatgatgccccggtggttggaggtgagcatatccaccttgtagccctccagctccagcagacgctggaacatcccgaagtggacgggcagcatctggggcatgaggatggtgtactcctccttcatctccttggtaaagaggagacggccggtgtcgtcatatactagcttcgccatatcaaaatccctttctgccgatagtcgcaataaaatcaggaatggggaacgaaaagtcaggaattgagggggccggctgcgccggcgcgtttgaaccggtcccgccggagcgggtcggtcccagttccctcatttctgatttctaattttcttttcgcgcatcaatggccgccatgagggagcggatgcggatcttgacggcgcccaggttgctgatgtcgtcgatcttcagctgagtgtacagcttatccccgtcctccagaatggagcgcatctcgtcggtggtgatggcgtcggtgccgcagccgaaggagaccagctggaccacctgcatgtcgggctgggtgcacacataccgggcggcgttgtacatccggctctggaaggtccactggttgagcaccttccggggggcgtagccctccagatagctcagggcgtcctccgtgaccagcacgaagccgaaggaggtgatcagatcgttgatgccgtggttgatctccgggtcgatgtgataggggcggccgcacaccacgatgatgttcagcccgtgggagcgggcgtagtcgatgtattccttgccggtggcgcgtacgtcgtggacgtaggcctcataggcctcgtaggcggcccgggcggcggctgccgactcctttttggggatgccgaactcctgatgcatcagctgggcgatgcgcttgccgaagtccttgtgccgccacaggcccacataggggtccaggaaacgggtctgctttagagagggcacgttggcggcgatcagctcggggtagtaggccaccaccgggcagttgtagtggttgtctccgatgccctcgtcgttgttgtaggacatgcaggggtaccagacggcgtccacccccgcctccaccagggcctctacgtggccgtggagcagcttggcggggtagcacactgtgtcggaggggatggtgcgctgccccttgagatacagcttgcgggaggactcaggggagaggaccacctcaaagttcagcttggtgaagaaagtgaaccagaaggggaggttttcgtacatgttcagcccgaaggggatgccgatgcggccccgggaaccgtccccctcccccttgccgtggagagcacggagcttctgatacttgtaccgcatcaggtcgggcaggtggtggggctcctcccccagggggcgggagcagcggttgcccgagataaagcgccgcccgccgtcgaaggtgttgacagtgagggagcagtggttggtgcacagaccgcaggtggcgggcttggcggtgtgggtaaacttctccaggtcctgggaggagagcagggcgctccgctccaggtgcaggtcccgggcggccagagcggctccgaaggcccccatgatgccggcaatggtgggccgggtcacctcccgccccagctcccgctcaaaggagcggagcaccgcgtcattgaggaaggtcccgccctggaccacgatgtgctggcctaagtcgtcagcggaggcggcccggatgaccttgtagatggcgtttttcacgatggagatagacaggccggcggagatgtcctccacgctggcgccgtccttttgggcctgcttgacgctggagttcatgaacacggtgcagcgggagcccaggttgacgggctttttggcaaacaggcccatcttggagaagtcggcgatgttggagcccagggccttggcaaaggtctcgataaaggagccgcacccggaggaacaggcctcgttgagcatgatggagtccaccgcgccgttgcggatcttgaaacacttcatgtcctggccgccgatgtcgatgatgaaatccacatcggggttgaagtgggcggcggccttgtagtgggccaccgtctccaccaggcccaggtcacaggagaaggcgtttttgatcaggtcctcgccatagccggtgaccgccgcgcctttgatctggatgcggtcgccgcacagctcgtagatttttttcagctgctccaggacgatggagaccgggttgcccaggttggagtggtagtaggtgtagagcagtccgccgtcggcggtgatgagggccagtttggtggtggtggagcctgcatccatccccagccaagcggggccggcgtaagtgtggatgtccgtctctgggggccggctggcattgtgccgggccagaaaggcgtcgtactcctcctgcgtgtcaaagagagggggcatggtgtccgccgaggtgttggtctcccggctctcctccagccgcttcagggcgtcctcaaaggggacgggctcgtaatcggtggcgcacagggccgcgcccatggcggcgaagcagtccccgtcttccggaaagacggcgtgctccccgtccagcttcagggtctccacaaaacgctgccgcaggcccatcaggaagtggaggggcccgcccagaaagacgatctttcccttcagctcccggccctgggtgaggccggctaccgtctggtccaccaccgcctggaagatggaggcggctacgtcctctttccgaccgccctggttcaggatgggctggatatcgctcttggcgaacacgccgcagcggcttgcaatggggtagatcttctcgtgcttcagggagagagagtccagctcgttcaccgacacattcatcagggtggccatctggtcgatgaaggcgcccgtcccgccggcgcaggagccgttcatccgctcctccagcgcgccgccgaaaaagatgatcttggcgtcctcgccgcccagctcgatgacggcatcggtgtccggaatgtaggtgttcaccgcggcggcggtggcgtacacttcctggacgaagtccaggccggcagccttggccacccccaggccggcggagccggtgatgaccagcttgacccgctggccgctgagctggcccgagatggacttcagggtctcacaggcccgctcccgggtcttggagtagtgccgctcataggagcggaacagcagcttgttctgttcatccagcactaccactttcaccgtggtggagccgatgtcgataccgatgcgcagactcataaatcaagaaactcctaccgttgggacgccataaggacccaaaataatcacttctaatgatagtgcaggcgcaaaaactttacaacaatcttaacgaattcttaacggctgaaaacgcaggaaatacgacttttttatgccagaaatccgtcaatttgacaacagggggaaaatatgccgcctcccacaggcacaagggccggggggaggcggacgggacggcgtcaggatatctttacgcccacacaagaggcgcgagcggctagaagccggactgggtggcgagacggagaagctgaggaatggtgccgctgggcagggtagccacggggacggccccgctggccgccccgtccagatagggcaggacatagatcgggccgttggatgagggatagaggtagaaatacatccagtcctccctcatggagagggccagttgataggaatatggagccatgtccgagaacccgaaagctgtcgtatccctgctgtcatcatactctaccgcctggagcaggagcgaccgggcctcctccagggcaccctcctcctctatggggggataccccgcgctggagactggcggcgctgtgagatggatggaccgagcgtcctccacggccgccgcatacccggcgtagctgtatggggaggggggaccgcccccgaaggcgagcaccgccgccagtgtcaggagcaccgccgctgcggccagagcggctttttgggggcggtccctctttaccagccgggccacccgctgctggatggcctgcctgccctccgctatggtggacaccatcagccccacactcccccgatagatacggtccaggaaggagcagacctccgactttgctgcctcctcccgccgcacacatgggtgatactgcttgtcccggcccacggctgtgctgcggatcagtcccttggcctccatccgctccagagtggtgatggtggtgctcttggcccagcctgcccgctgggagagatcggttgccagctgcattactgtctgaggcgcatacgcccacagacaatccatcacataccgttcgctctgagttagacagacttctttccgcaccaccatcctgtagaccctccctttgtctatcgtatagactgattatagcagggaaggtctacaatgtcgattcaataaagtgccgccttccattttgacttttagtgtggatttccttccggtgcgtctgccccgggaggatagggggtaaaagaagagtaggattacgcattaataaaataaaagggcccgccgcgggcgcgtgacgcgcctgcggcgggcggagacggggcccggcgggggctctctgaggggaacaggagttcacttcccgtagttgacatacagctcggggcggcggtccttgtaggcggggagctttttgcggacggcgtccacccggtccagactgacgcgggcgaccagtagctgcttttctccaccggcggaggccactggcacgcccatgggatcgaccaccacgctctcaccgatggacttgtcgttggcctggtcacaggccagcatatagacggtgttctcgatggctcgggcggtaattagggagcggaaatggaggctcttcatcttgccgcagacccaggcggtgggcatgataatgatatccgcgcccttggctcgctggtcccgagctacctcgggaaagcgcacctcgtagcagacgaacaggccgatgcgcccgaagggggtgtcgatgggctcaaagagctggtcgccgggcttgatcttgtcggactccttgctgccgaaggcgtcatacaggtgggtcttgtggtagtgagtgacgatctcgccctcactgttcaccaccacactggtgttatagttgcggtcatcgtccggatcgtccacgatttcgttcatgccgaagaccacccatgtcccgtactgcttggccaaggcgcgcatctccgtgacaaaggggccgtccaggcgttgggcggtgctgtggcagacctcgacaggggtgcccaggggaaactcgctcataaacaactccgggaagatcaccatatccggctcatatttttgtgcttctgccatcgcctttcgggcctcttccaggttgtgatcggggtatccgtcggaggccatctgagctagaacgaatgtgctctcgcgttttactttcatcatcgttcacctttctttcgtgcgtggaggacgttggactgggacggccgctccacgctccggcggcgtccggatcagatcataaagaagtcatcgcccagcagggaatcccagttggccagccgcgcggcgatgtctttggagaactccagctccagctgccgcgtcagatagttcaccagggtaacaggagctacaaaagagctctgataggaggaattttccatacagcagcggagaatgacgtcgaaatcgccctcctccatggtcaaattgaactcccggttggtgatgagcagcacgctggccttctgccttttcgcatgggagagcatctgataggtggcccggttgtaccgcggcgcccaaaaggccacaatcaggtcctctgagttgatctcgatcagctcctcagcgtaatccaggccctcattgtgaatcagatggacgcccttccgcagcatcccccagttgatataggcatatgtggccatggagcgggaaatgcgcatgcccacgagatagacccgcctggaggtcttcagtagggtgcaggcccgttccaggtcctcccgggacaggtcctggaacgtccgtttcaggttttgaatatcttggcggaaggacttctccagcagatactcggaactgtcctcttccgggctggactgaggcaggtcctccggctcctcttcccggtcgtggaagcggagccgtgccgccttctgcatatcggtgtacccctcaaagtcaagctcccgggcgaagcgtaccactgtcgccgtgctcacgttggcagccttggccagctcgtctgcagtgaagaagagtagcttgtccatgttgaacagcagatagttggctaccttcttctgggacttggtcatctggttgacctgttttccgatttttgtgaccaggcttgacattgcagatccctacttccgaactattcgcagattgaggcgttctgtttctccttgacggccgccagcaggacgaccgcgaccaggatggagaccaatccgcatacgacacgcggggtcattgcctctttatatactgtaatgccaatcaagacgctggtcaatggttcaaaagtagaaaacagagaagttttttgtgcgccgatatattttgcccctaattggaacagcagaacggccatacctgagagtatgccaaagagtgccaccaccgcccagccggagggctggatatcgatggtaaatgtgccgctgactgcggtgaagaggcctatgtaggccgtggcgagcaggttcagccagaacatgagctgaaaggcccccatcttttgcaggccgctcttcgacagatagactgcgtaaaaggcgtaggtgacgccggagagaaaggagagggcgatacccagcaggctcacacccccgcctggcgtatagagtagcaggattcccgcagtgcacaggaccacgcagaccactttcagcctggagatggcctcccgataaaaaatcacgcaccccaggatgaccagaaccggatagacaaagtggatggtggtggccatgccggagtctaaatagttgtaggaggaaaatagcaggatgggggtgactgcatagccggcggcgcagagggctagctggagcagagttctgccctttaccgaaaccgagtctttctcaaagatcctgtgcaggatcaggcccagcatgctcccgatcaccatgcggtaaagggcaagcaccgctgcgtttccgccgccagcgtacaccagacgcgccagcagggggttgaagccgaagatgacggctgacaggatgctgtaagccgtcccccggacgatcagatttgtattcgatctcaatatgccacttcctgacagggccccgtcctgaaagcgccagcggtcccgccggcgctttcaggggacagggaaccgaatgggggccagctcttcagcagccgaactgctccttcataaaggccacgatgcggtccacacagcgctccacgatcttctcgcctttctcagcgctggccaaggtggcatcgcccagagtgccgttgggagtgcgctcagcaaattcagggtaggtgataaagtcaggccacttgtacagggaggggtcctgctccacattgtacagcttgtccatctccacatactcagggtgtaggtggagcatcacgctggtgccgctctcactggcatggccgtgggcacgccagcccttattctcgcagatgtccgtggagttgggctggataaagcgccaccagtccacctgattgcacttgatgccgtactggcgctgcttctcccgggccagctgggagatgataggaacattgcccgcgtgcatattgatgaacatgaagttcttgaagccccagtgggccagggagtcgatgatgtcctccattactctatagtaggtatcaggcatgatcttgatggtgccggggaactgatagagggaggcggactcgcccacctcgaagcaagggccgataatggcgttggtcttggcggccacccgctcgcagacagcaagggacacgatggtgtcggagcccagtgggagctggggcccgtagacctcataggcaccgccggggatgatgaccgtgtcggtgccattcttgattgcctcagccagttcggcggaagtcatttctttcatccatttggtgtttttcatgattgcagtcctcctattgatatatttgtgtttcatcgcatttgggatgtgatccgtgaaaggagtcctgcccgtagctccggcggagcaccggacagggaggagcgctcattcccctctagcgtggatgcggcgtccgaagaagagcccgcagcccagcagcacagccagcagcagccagctccagatgtaagtaaacagcgggctggtcatgatgagggtggcaaagatcagggtgtactgaagctgataggtgtagcccagagtggaggaagaggtgatgttggtggctgcgttggttttgtagtcggggtccacgatcttcaggagcagcaggccagtggccagaacgccgcagcactggccgaacaggccgatgccggtctcaaactggccgttcttgggcaagacccgcttgcccaggataaagcaggcccagtaggtgacgatggagactcctatgcagaccacgatcagggggacggcgtaggtgacaaacacgcccaggtttgtggtagccagagcggagacgatcaggtactccagcgcagtcccggaaatgcgtactacggtggggcggtcgatcatgtcgttgatcttggcgctcttctgcgtacagatgcagaagacagcgctgaagatcagacagcaggcaaacaggggcagattggagaagaaggggttgatggccatcaggccggtgcgcagcagatagccccccatgatgatcaggccgaccatcattaactgggcacccagagggtctaaagtggcggaggaggtgacgctgttgcccagagaggggcggtgtccgggctcatagtagccagtgagcatatccttgggcaggtcctcaatcttcatcttgatgctggtcttgccgttttttgccgcgcggttgatgatgatcataccccagatcacgccgcacaacaggccgacggtagcgaaagtggtgcccagctcaatgccgctttccatatagccattttccacgaaggtggtgccaacggcgatggccatactgtggccaccataatagcccatgacaggtaacagaccaaagcccaaaggcaggtcctggatgaacaagcccagcaggaaggtcagtgtcaggcccacaacaatctggagttgatggatggtgccgcccagaaaataggtctgcatggcgccggcccccactttgttcagcttcaggccgaggaaagaacagctgaacacgatggcggacaggacgcccgaccactgccccagcgtggtaaattccatgtggatgggagagacctggccaaggacttgggggccgcacaggatcgcaaggatgcccgccagcagggcggcgggaatataaaagcgttgcagagcataaatttttcttctcaaccaggcagcaacgatcatgagtacgctgagttgtgcgaagtcaaccaatacgtctgttaatgtcatgtcagttcttcctttctgtttctggctgctttggtgaggcggaaacttctgtccggcaaagagatccgttcaccgatccctcctgtatgggaggggtattctcctttctcctgagatcggtcgaattgaaataattatttcattgagaacagtttaatttgaaaataagaaatagtcaattcaattttgaaacaaatatttcatctaaagtttgtgcaattttacattttgacgactaaaaatgaatgacaattgtttgatattttgatgcaatattggccaagtaatgacgatttttaaaaaatcaaagtaatattttgaagtttataatagaaaatcacagaatgctttttaacggccccgttctgagaccccttgataatcaaaagggtaatcttgagttggaaatgtcataataatttcaaaaaaaccagaagagaacggatcaaagctgtgcagtcaagatttcacgcttctgcgggagggagtgggaaaaggaggcaggcaccgaaaaaataaaaagcccgccgcaggcatggatcgcctgcggcgggctctggaaaaatagcgggaccaaagtgagccaaacttgggacaaaagccgtccgggatggttctgaatcatggaccagcgtggtggtcgtgattccgaaaacagaatgagcgcacgaggagctttacaatgaaatgaaaaagctcgtcgtaagcgataccgctacgaagcggcggccccgaaccggagcccagcggagtgagtctggtttagaacagaggagaaagagcgcggatgaatggtgtcttttttgcctcaggcataaaaagacgccggagcaaagcggactttgctccggcgtggtcggagtggcaatacagaatttcttgaaaaacctagtaatatcaatggttttcaagcaacaggaacgactatgtctcttaaaaggtagataccagttagatttctttgatataacgttctgaagcgttacaaatcagtttaaaaagtgtattaatgtaatcttggagctgttgcctgctttcgttgttgagtgtaagatgactgcggccaaatgctatatattcattgtaagtggactctaatcgctgtataatagaagaatagttactcagatagaaactatagtcattatagtaatccaataattttcttataccaaaattaaactttccaagattttgattaaataattcagtgctttctggatgatctgtcaaacaatgtcctaaagccctaaaattgtttttcgattccagcagcaaagagaacaactcagaattaatctttcgttttacttcgtccttgtgttcgttatgttttaatctagactgaaaaatagattggataataaatactagaataccatttgatataatagggacgaccattaaaatccaatcttttgtttccatcgtatgacaccccaacccaatgttcttattattccattaaaagtttttgtgttaaacaaaaacggtgagtccttgaaaggactcaccgttggtacggccgaagggactcgaacccccaacattcagaaccggaagcagtatatcataaaaccatataacccttgtggctctaagagatttctttatgccatttctctgtttccaccacaatttccaccgcctattgatctagtcccatccaataaggcgataccattatggagtgttgaactgtctctgtgggtgtaaatattggcggtcatctgaatgtcagagtgtcccatgagctcttttgccacattgagcgggacaccagctttttgcaaatcggtgcaaaaagtgtgacgcagacaatatggggtgagatctggagctaccacagattctacgattctattccgctcggtctttgcgcctaagtataagtctagttctctcttgaagccagtccaaaggcggcgcaggctgttctcattctgaaagttcccagccccggttgggaatacaggagcgaaggaatttttcttggcgttctgaagcctccaaagaaggtctgaatggatcggtatgtcccggacgccggaatccgtctttggacctttgatagcctgagagccgctttcttttgctgcgtggacatggatctcattatttacaaaatccacatcagcccaagtaagggctgccgtctccccaggacgcattccggtatagagtagggtaagaacccacagtccagctcggtgatgctcagctacagcaagaatagctgctcgctcttcctctgttatagagcgccgctggtgcgtctgaacatggggcagctctaggagctcagctggatcatatggaataaggcgtgactgtcgggccctcttaaacatttcctgcatgaccattcgcagcttctttacatgggatgcggatctccccgcttgcccatttaaaatacgctggaggtgtacgtccttcacatccttgagcttcatggagccgatggcaggcttgatatatccgttgaacttttcatcgtacataccaagggatttcttggtcagcccttttgggtccttgtaggtcgctttccactgcttataccatgcagttacagtcatcgaaccaccaatggcttcttccccgcgtttggctgctgccagcttttccgccagcttggtcatggcttcaagctctgttttccctgttgcctcgtacttctttccattgtaccgggcggtctttctgatatattcgcccattgacaacgcctcctattctgataaaatagaagggcagattgccgaccatagcttctgccccccttccctgcccggtgttggtagcgccgggtggggatttttatttatcaagttcctttatgtcttttgctgtatgcttggaaattgcagatttccctgttttctcctctagttcttgccgggcgtttttggcgatggcaccaccttgttgtgcaacctttttgcttggctcgagtccttgtgggttggtagctcttgaaatttcggttgtggatacttccgcaagcatattaaggactaattcagtatttgtcatattgtctcggaggctttcctttttcagtcccttgtatgctttatattcccctgtagtcattccagcccatgcttttgttaattcgttggtgagaattgcatactctaagtctttaatcccggcccggtcccactcatcggtaagctctttgcgaaattcaatagatttaagccgttgtgtgatccatttgtcggaatacccctttttcttgtaattataaagggccctttgaattgccaattcaggatcagcggtttcatccaaccgttggctacctaccatggcaagccactgcttaaagggttcagctttcggagacggaatggattgaatcaggcggagtagttgagtggtatccgccacatccgtcaaccgcattttcccatcggcacctggcattttcaactgtccgattttttcggacagttcactaccttcaacttgaagtttctttttcaagtcattccagtattttcttggcctatcggtttcagccaaaacagcacaagtatcgacaatggaaaaataccattcctctttttcagaatcccaagctgttctgatttccttactttcaaacaacttgattgctgtctttttatctcccatacaattatcctttctagtttctcatcctcgccacctcgggcggggcttttatttcccccaaagcctaaagaaccccttcctcctcttctctctcctgtccagctcttcgttgatctgctcagtctgctggatgatatgccgcagcccctcctctgacattcccttccggtgcgcctgggcgtacatcagaaacgcacgagcttcagcacagaacgagtcatcgtccagggacttgattctctctacggtccatgaggtgatattttcggggttgagatggttcatattgataagacctcggaattttgtgaagtattaggaattttgcggtggggtcacaatgccgaacgattcgataatctgtcgaattatcccaaaggttctctcttaatagcagattctaaataatcacggtcccaaaggagagtcccagttttttgagcgagttcttttgcgccctgtgtaaaatatctgtttgtcattacaacaccaacatggcatccatagaaaactcgtccagactccacttcttgaattgatgtattcccaagatcgtgagaatagcacttacattgaatggcatatttcacaccacctttttccgccagaacatctacgccttgatcgccgcttcctggagtaactttgacattttcaaacccattttttcggagaaggtctgcgcaccagaactcaaagttatgcccttccattacatctaccatagataagtctaaaatttgggtggattctatcagtttattttttgtatagttgtaattactcaggccagcggcgtttaacacgcgagttaacgccttttctgcaaattcctccgtactttgagaaaatcttttcctacagtcttctatatcatgtagaaaagaattggctcgtttttgttggtattcaacgctgtttcggaattttcctttgatttcatccaaagcagcatcctgagcccgttctattgcgtcgcacagatgccattgaagctcctcggtgagcctatagtaatctaaagttggtgttccttgaaattttacttttccctccagttgctttaattttttcaaattggacagcacaaaatcatagtgtcttaaaaaatctctaacactagtatccttgttggccagatcagaataaaatttaccatcaaagagtaaactggatgcaagggattcccgagctttccttgaaaaaggtattttaagcggttcgtcctcctgactcacgtcagttctatccatgtcatcttcgctagttgatggtttcttgagcgttagttttctaaacaatgccctcccacaattgtgctgtttgaatagcaaaaaagtcaaagctatggaaataaatacacatgaccaagcagcaattgagtgtattcggctttctccagtagctgtgtcaatataagttgcccctgggatttcgtttacaattacagccaacacagcgaaacaaagaaaccagataccaaatattttctttttactccaacgcttcatttattggccctcctgccccctgacgttgggttactaaaaataaagttctgttgccagattcccataagtgtaccagcagacggctttcttcatgaaatcttcggtgacatggaagtagtctgctaagtcccacaactccgtgtgtccctccgcaacggcttcatcgaggtcaacaactggtatcatttcctcgattgcccacttgtctgccctgtgctcgtgcttctgccggacatcacgggccgcccaccggttataaaacgccccggttttacaatgcccaagctcatgggccaaatggacacgtttgctggcctcatcttccaacacgccgtagtccattccgatataacaccgcctgtccgtctgtacacacatggagccattctccgggatgctgagatacataatgggaatgtctgaatcctgcgcctcttgaaacagtttggcagtctccattatttcttctccttttccgcctcctcccggagtttgaccatctgggcgaagcgttttacttcatcatacatggcgtcggtgatttcaccgtcgcccccaaacagggcaaatttaatatcatcgtcgctgacagcgcgctcgccatcctgggtgggcgctttttttgtttcttctccagttaaaagatagttggtagtgacatcaagataacttgcaatcttcgcaagtcgatcagcgggaaaaacaccttttttgagctggcccacatatccattagaaaacccaagattcgcctctaattttgaaattgggatttttcgttctttgcaaatttccttcactcgctcaacgctgttcatagagcatcctccagtttttcgagaaaagcctaaaaatagacttgacaaattagagaatactcgatataatgaacttgtgatttagagattcacctaattcatttcgagtaatctcgtatgttttggcaattcatattttagattattctctaatgaatgtcaagagtattctctaattctaacatgtaaaaaaggaaggaggacttttatttgatttacacaaatgtattcaatctttgtcaaagcaagggaattagcattgctagattggagagagaaatgggctttggaaattcgacaatcagaggatggtccaattcatctccgacagtggaaaagctgaaggcggttgccgactactttggcgtaaccgtggactaccttcttgcagaagatggtagcacaacagaagtccaataaaacggaacgatgaataagggggggaggtgagaaagacggagaaggcaaaagaagtcctcggaaggcagctggaaccactgtccgaggattttggcagagaactgaatttgtctggtgattcaactgatatcggcgtaaattcaaaaatatatgctgggtcatttttcataagagagccattgagccatattattttcgaatcactataacagacagatttttgtttacggaatcaaccaagttagcaacatcaaaacataactaaaacatagccgcatcttcggcagaaaggaggagccatgcaaagaagagagacccagcgaacagaaagtgcgctgggcaaagagatagctgaaaagcgtcggctactgtatgagagacacggcgggatcatgtcccctgtagacgtggctcgggagatgggctattacccaaagccatccagcggggaccgatgggcccaagaacacgatgttccagccgtccgccttggagcaagaaagcgaggctatgaaacagatcttgtggctaaggcaatcgtacagagccgcgggatggtataaggatgcccccgcccgtggtggcacacgggagagggcggaagacaggacacaggccaggagggaaaggaaatgaactgtcgttataacgatgaagaattgaaagctgatgttgaaaaaaccatcggaattcgcgcaaaagacattgaaaaaatccagttttgcgggctctggcacattcgctttcgtgcgttcggaacggatttctactattatcgtgttgattcagatgatgttgttcacctgaaagaatctccgtggcattttgaataaaatcaaatgatcccgccccggaggtcacgagggcaaacaaagatgccccgccaggtgtgcggacacctgacgaggctggcaaacctgattgaaagcggcagtcaggcttgatggaacaaatgtaccatgttctttcgagcctgtcaagaggaaggagaaagaatatggatgagaaaagtacaataaaagaccttgagcgtcaggccagcaacactaaactcctgatggaccgcttgaaccgggcggcctatggcatgacgtttgatgagctgatccggtatatggggaggcgtgacgatgacgccgaatgagaccatccgccgcatcacccagcaagctatggagcggcaccggctctcacaaaggggccttgcccatgagatcggatgcggcgaaggctctattgcaaagattctggacgagcaggaggttcgtctcactcaggagcagtggttctatttgatggcgttgggagggaagcagcttgcgtgattggatgctcgtgggcgcatacgcctgcattattgtagcaatggcgctgataatttgggatatatgggataggagaaggaagaaatgaagaaatatgagcttacttctgagacgaaaatcgtttttggacacatcttatatcgcatcaaggcgctttcctcgtttggctgtgtttccgctggagatttaggaggttttttggaaagcgagaaaaacctaagccaaaatggaaacgcctgggtgttcggcaacgccgaggtgtacggcaacgccgaggtgtacggcaacgcctgggtgtacggcaacgccgaggtgtacggcgacgccagggtgtacggcgacgccaaggtgtccggcgacgccagggtgtccggcgacgccagggtgtacggcgacgccagggtgtccggcgacgccagggtgtacggcgacgcctgggtgtacggcgacgccagggtgtacggcaacgcctgggtgtacggcgacgccagggtgtacggcaacgcctgggtgtacggcgacgccagggtgtacggcgacgccgaggtgtcaaaaattggttctatattttggatcggggctgttggctctcgaaacgatacagcaacatttttccggtgtacggatggagttattcgggttacctgcggctgcttctttggaaatcttgatgagtttgcgaagaaggtccgtaagactcatggggataacgaccatgcaaaggtctatatgttggctattgacatggcaaaaatccgtattagcactgaaaaggagaaaacagaagaatgagaacacgagaagagcgccgccagagggcccgagaggtcaggtggatgatcggaataggagcaatgctctgcctgaccttctggggcggtatggcatttgccttttgggtcatgagatgaaggtccttttatatccactgagggacatccaacagagcagtcctgtcgccatatgcgcaagatgcggtggcgagatttatgaagagtttgcagttatgcccggtgagctgtgccgggaatgctgggaagaggaaagtgaggaaagagagcaatatggaccgcataacaaagctgcttacctgggcagttgaaaacatgggaccgtttgaggaaattcgagctgtcaacggaactgtacatgtacggctgctggatggaaggtctggatttatctcaatgggagaagacggaaatcctgtagcaaacatcccgcaggaggtcatggtatgagccgcctgatttgtgttatgggtgagtccgggagcggaaagaccacagcaatgcggacgctggaccccaaaactacatattacattgattgtgatgggaaagggctggcctggaaggggtggcgcagccagtacaacgaagaaaacaaaaactttgcgtttacccgtgatatcccaaaaattgagggcctaatcgtcaatatcagtcagaagaaagcaagcacaaaaaccattgtggttgacaccttgaacacctgcatggtggacaaggaagtcaaggggatgaaagaaaacggatttggtaaatggatcgacctcacccagttcgtttggaattgcatcgagaccgccgggcggcagagagatgatctcacgatcatctttgtgatgcacagtgagacggtccgggacgacttcggatacagctttaccagagttaaaacgaatggccggaagctggagaaattagtccctgaaagcctattcagtacggtgctgcttgcaaaaaagacggatgatgatcgttatgtttttgaaactcaggctaaaaacagcacggccaaaagtccaatgggtgcctttgatacctttgagatcgacaatgatatggaggccgtgctcaaagcactggaagacttttgatggcaaaacagagagatgatggagtggccagctatactaaggtggtcgtggacctgtattttccggaagaccatgtctgttgtgacctctgtcctttgatggaaacatacgccagaaagcaatgccgaagaaccggcgaatatctattggatacctgatacagagggctttggtgccctttgaaaattgaagaaaaaacggaggaaattaaaaatgaaaccttttaatggatttgaagcaaagaagtctgctggagcccgtgagctgttgcctgctggcggttatgttgccaaaatccttaatgccgaggaggttccctatgactggggaaatgtgattcttatctcctttgacatcctggaaggccagtacaaggacttctttgcggctgattatcaccaccaggatcgtgaggacaagaagtggcgcggcacttatcgtctgagcgagccaaaggacgatggaagcgagaaggacagctggaccaagcgtacatttggaaactccatctggtctgttgaggcaagcaatccaggctatcactgggactggaacgaggaaacattgaaagggaagattgtaggtgttctgttccgcaaccgtgaatgggagatgaacggaaacactggatggaccaccgaatgctgtgccctgaccagtgtggatgacatccggcagggcaagtttaagatgccaaaagataaaccgctaaaggcattaagcggggcagacagcggaaacttctccgccccggctcctgtaagtgatgaacttccgttctgatggatcattttaatgtaaaaaaagctctttccactatgactattctctgggacacaagggaacagaataccccaagagccagaaagcgaatggaacaagtaggagtcccgattgagagggtcgccctctctttcggggactactccgtaaaatgtgatacgctggacctgagagacaaaatagcggtggagcgaaaaatggatcttacagaacttgcccattgctactgccaggatcgcaaacgctttgtgcgtgagtttaagcgggctcaagaggcgggggctaagattatactccttgtggagaacgggggccttgacgaggcttacagcggccattacagggcacacgtacatccatcagcattgacggcctccatattcgcctggctgtctcgctacaactgccagatcctattttgcaacgaaaaaaacagtggatatgtcatccatgatgtgctgtatcgagagttgaaagagcgattggaggccatgccagatgaagaagaaatttagaatcacctgcactcacaacccccaggatttcttcaacggcgtggaaccggtagagttgaccagaatttacaacacagatcaactagagaccgatgtgtcctacgaactgaatcagggttatcaggtgattgtatcggaggttttaaaggatgaaaaatgaaaagcggagaattaaaatcgactatcttccgtgccgctatgactttaaggttataaccaatggaaaacctatgaccctgtacgatctgacgatggatgagctgacctgtctcatggatgtttattttagaaacggatatgaacagatatatgccagaatcgcctcaacatgggagtaagctatggacgaaaaagcagggtggatcaaactctggagaaaatttgcggatgaccccttgtgggtttcagagccatttacaaaaggacaagcatgggttgacttgctcttaatggcacaaggaacagagaacactattttcaaaaatggaagatttttggaatttaaacctggaacggtttataaaagtgttctacagctatcaaagcgttggaagtggagccgggacaaggtttcgaggtttttagcatgcctcgaaaataatagtatggtcaagacaacaagcaatacaacggatggtacaacgataaccattgaaaactggacattttatcaaagtcaatcgcaacggacaaggcaacgattacctgaaaaacaagacaacaaaccaacaacgggccgacataataaagaaggaataagaagaaatagaagaaaagaagataactgcggcatcgccgcgccgtctgaggacggggggctccccgccgaaggaagcggcgatgactccattgtgattgatgggcgactgtatagattcccctcaagatggcggcgggatgctgaggcaatggggaaggacctggccctatttgtgaaggggatgtatcaatgagctatgagttcaaagcggaggacgcttatggattggcgagagtgataggagccgatacccacgaaaaaggggacgagcttttctttcggttatgcccaaagtgcaaaggtggagatcggcatcaggacaaagatacgttttccatcaatctgaaaaccgggttgtttaaatgctttcgggtgagctgtgattatcatggaaacttcgtggagctggcccgggactttgattatgatcttgggtttggggatcatcgggtatatcgaaaactcccacagaaaccggtggtcgttcgtgatggagctattgagtacatggcatgccggggaatcagcccagagatttgccgaaaatatgagctgaccacccggattgacaataaagacattctagttttcccgttctacgatgaatctggaaccctccagtttgtgaaataccggaacacgaagttccgcaagggcatagacaaaaacaaagagtggtctgaagcagacactatgccaattctgtttgggatgaaacagtgtagtaactttaaccggttgatcatcacggaggggcaaatcgacagcctttcggttgcggaatgtggatttgaaaacgccgtgtctgttcccactggagctacaggatttacatggctggccaattgctgggattggatcactcagtttgaggaaatcgtggtctttggtgacaacgagcatggaaagattacgctggctgacaccctgagggctcgtctccctcagccggttaaagtggtccgaaggaaggattacctgggcgagaaagacgcaaacgatatccttctaaaatacgggaaacaggcgattcggaaagcggtcgaaaatgcagagattccgcaactggaaaatgttaaagatttggccctggtccaatcggtagatattaacacactgccaaaaatcaagactaatattccagatatcgaccgagtaataggtggcctggttatgggacaggtagtgttacttaccggaaagcgcgggaacggaaaatccacatttatgtcccaactagtctgtgaagcgttggaccaacgggaaaacgtatttatctactctggggaattggcagactaccacttcaaacgttggattgattttcagcttgctggaacggattatatccaggccattaccaacatctatggggatctggaatatacgatcaatgacgatgtaatacgacaaatctcggattggtataagggtcgcgcttatatctacgacaataactggctgccggatgatggagcagaatttgaaagccttccggaaaccatcgagaaagtcattaagcaatacggggtccgcttggtttgcatcgacaacctgatgacagctatggaaacagttagagaaaacgaccaactctatctggctcagagtaactttgtaggccaactcaaaaaaatagctgtcaaatacgatgttgtgataattctggttgcccatccacgaaaaagtaagctggagtttgataatgacgatgtggccggatctgcggacatcacaaacaaggcagatgtagtgatgtcttacgagagagtcgaggacgatgacacctgcgacagtaaattgtcaatcaccaaaaaccgcttgttcggtaaatatgccgcaaaagaaaaggctatcaaactgtgctacagtgaaaaaacaaaacgcattttcccgtatggtctttatccgaggcattatggatgggaaggatattttaaaccagtagaggaggaattgccattatgacagaacttccttttgagcgggaagctatgcgtggagatccaatgccagatgacttggattttattgactcgataatgtatcaaggactttctgctctatattttcgatattttcatggtggggttagccaagaacaagggaaaaaagaaaaaggtgcaatgatttataaatatagcatcagaaaaaatgcggagagctaccagaaaattatgtataaatggtacgcagacctccgcaaaaatatcgaggccgcccaaaaccgttacaggaaagagcggacccttgaggcagccgacatgctattggatgttctggatgggatggtaaggcatgaatgaaaatccatgttggacctgtcagaaagcatgcggagggtgctcctggagccgcagcttctctccggtgccgggctggagggagtgagtgtatgacctggagaaaaatcgatggctatcaatacccttaccgcattaacgaggaggcccaggtccagaagtgggacggaaaacagtggatcgatatcagggcaagaatcagcggaaaccgggcggtggtctacctgcggacagtggaagggaaacagtacaaggcggctcttgtgcggctaatggatgatgccttttgggaaggccgggcaaagcgggatggactacatatcacacaccgaaacggcgtcaagctggattgtgagctgagaaatcttgttgcggtcaaaccaggacaggctgggcgaaaatatcatggacggccccataaaaggcccgttattcgcctggacctgcacgggaatgaagtgatatatccaagcgtcaccgatgcggccaggaagaacagcttgtctatatccgctatggacaggaggctataccatggtgtgctagaccccagaggatatcggttcgagcttttgaatcagcgtagaaaacgaaaggagaaaacagcatgatcaaggacgttcgggctgccctcctgggcgaccacgaggcagcgaagcggctgacggatgcgggggtgctgctggcgtgtccgttttgcgggagcgcagtcaacatagtagcatacgatccacgtttatataggccatcaagaaatcatacatactcgattgcgtgttatgagtgcgacatgatgttcggatgggacattgattatggcggtcgatttgacaccgaggaacaagcccgcctcgcctggaacacccgcgcgccgttgctgacagcggaagagattcagagattggaggcccagctatgacgcgggaaaaagcgaaagaaattttatcagatttgaatctttgccattataccccaagcagagaagccgcagaagcgatcatatcggccttagacccgttagagattatctccgccctccgccccctcagccgggagatggtggagaggatgcggggagagtggatgatcccgatttttggcggccagaaggatgcaaacgaccctcgctgtcagtgctccgagtgcggtagcatcgaaacaccgcttgcaaggcatcggttctgccctgcctgtggcgctcccatgacggacgaggccgtggagatggtgatggagagattggaggcactgaaagatgaccaggcctgaatttattgccctgattggtcaggatatcgtggtagattatccatttttcaaggaaatccagcggtggagtatgaaaaatttttcctatgaccctaatacagacactatcactcataaccgtttgcttgtaaatgcagaggtcatgattccgcgcatgagcaatccccacaaagggaaggccacgcatggttaaggaggcgctgaaagatggaccggaacaatgaaactattcggcggctggcaaagaaagctgctgatgcatggaggagcactgacacatatcatcaagcggctcaaatcattgatatgctgatctctgcattggagggagagcctaccctccccccgccgaacgagccgctgacgtgtgatgggtgtgtagactgcaaaaggtcgtcaatgagtatgtgtaagttttgcatccggaatacagaactacgagattactaccgccgcccgccggagggagaggaggatacatgaaaggctgtaaggattgcccggcatatgcaaaatgtaccgtgacctaccgtgggtcagcttgtgatgctctgcgtggtacatatggaattgacagcgacccggagattatcaccaacgctgaccgcatccgtgccatgagcgacgaggagatggaaacagaacttctgcctctgtttgaagaactatgcgaggacgggataccgagcacggattatatgcgcttttggctccggcagccagcagaggaggaaccctgatgtcaaaagaaagaactgatccaagcggtgatgccagaaattctctcaataaacaggccaataatcgcaccaagaaaaaccagaagcacttgaaatatgcgctctcgcttattttcggagtcgttcttggactcttgcttggcgcgatactcgaactccgctaaagcatcttcgccgcgtggagtgaggcgccaggatgtgggattgatggataaatcgtctggggaaccttccgtacgataactgtttggctcgatatatttttgttcccgaaaatatctcatacgactatccactttcccgctgactggtccggagcgaaatttaagaagcgcattgtagttttcatctgacagcatatatatcacctcacgccgattataccacaaggaggaaaaaatggacattgaaaagctgatcgtcagccttagatccccatcatggcaggatcttgaggacccggacgcaacccttttagatgatgcagccaccgccctctccacgctccaggccgaaaacgagaggctgaaatccctgcttggtgaaagcgggcaagacctatggagcaaggaaaaccaacgcgcggaccgcttagaggccgaaaacgagaagttgcgggccgagctggagcaggctcgtgaatcactggattttgcgcgcacaaaagatgctgaaattgtacgccttggaatggagctggagcaggtgaagcgggagaatgaaatcctaaaacatgcattacaaaattggcacgaggaggactgacatggaacggttgagtgactttgctgctgatattgtcaatgatctgtatgaaaattctgattggtacggcgaccgctctttgatagaagctgccattaaccgcctcgcagcctacaaggacacggggctggagccggaggaagtcaatgttatcgctggccttgcgtctgagaactgcgcaaaggtagcggacaagatagaccagcttctttccgatgacaaagagctggagcaatatcgcgctctcggccccattgaccgcctccgcgaactggcccaggcggacaaggagggcatttcaccgtgtacattttgcagattcaatcctccgtcaagtggtgatgggaaaccatgttgtatgtgcccagcagaggccgcactacggagggagctagaatgagtacatttggagattgtccaaaacaatcaatttatgaagatatttgttaccaccagagtcaaaataatatctccaaggtagaacttatgacaatgttggctgaaattattgcctatataggggagaattttgaatgaaggagtacatcgagagggcggccgttctgaaagtcctggaggaatattaccctggagtagatgagcgactacatattgtcaaggatattacgtctatccccaccgctatcttcgcaaagacgcattcccatcgctgaaaaatgagatggtcgttacactttacgaaatcatcggaggtgcggaatgagtaagcactggatagataatggggattcatggatttgtccaatttgcgcacatgaagaagaaaaccccaataaatttcctaattctgaatgtccagtttgtggatttcaggacccaaaagatgcaaacaaggaccagcaggtcaaagctgacgcaggaaagcctcgccctacgctcactcccgtcagcctgatcgatgctgtgacagcggtccgcatgtacggaaacgaaaagtatcacgacccggagaactggcggcaggtggagccgcagcgttacagggacgcactctaccggcactggctggcctatctcaagggtgagaagtgcgatcaggaaagcggactgcctcacctatggcatttggctacaaacgcggcgtttttgattgagatggagggcaaagaatgagagaaatcctttttaaagccaagcggctggataatggagaatgtgtagatggattctactgctgtattgggccagttgggcaagaaaagcactatatcattccgatgtatgcctctgctttttatgggattgaggttgacccctccacagtctgccagtacaccggtgtgagaaatgcgacaacaagagccatacagggagctgcccgtggtttaatgacggggagggcggacaatgaaagagtacaagatccaagtccctgatgatacggttggaatatcgatcacgatctttcgacagacgaaaaataagaagctgttttccagaagctttaatgtcgaagctgctttagagacctacatccttgacttaatggatgaggagggatagcccttgaacgagttcccggagaggctgaggaggctgagggagagaaatgggttgaaaatgtgcgctttatctgagtgctgcgacctagatagaaatgcaatcggaagattggagcgaggagaaatagagccatccaggaaagcattagaaggactggctgaccggtttgatgtttcggttgattacttattggggcgcacggactggccgaatagcccaccgaaaagccaaaaacttttatcatctcataaaaaattttgatagattcacacatttgtgaaaaatatgacttgtacatgcgacaatgggagcatgggggcataccctgtgctcccgatctctttctccttcctacacccggcagtcggcctcctgctgccgggaatatatgcctctcctcgccgcatgaggcgggcggtggcaccagctccgcaaggagacaggcccgcggaaagcctgaccaaacccgcagcataccccgaaaggggtatatataccgcgccctgttgcacgagacggggacgggatcaaaagtttttatatgaggtggtgagcatggctgcacggctgacagataagcagaagaagaaaatcgttgctgactatgtgcagctgggcagttataacgcaacagcaaaagtaaatggcgtttctcttaacacggtgaagaaaattgtgcaaggaaatgcagatattgcagaaatgtgcaatcagaaaaaagacgagaacaccgccgatattctggcctacatggaaagccagaagggccttgtgtgtgagatcatcggtaaagggttggctgcgctcaacgacccggagaagttggcagaggctacgcctgcgcaaatcactaccgcgcttgggacgctcatcgacaaattcacggccttcggcggcggaccaggcgatacggccaaggatgacggcttgagccagagcctgagagaacttgcggaggggttgggaagcgatgattagcccgcagcaaaagaaaatcctggctttcccctattcccgctacgacgccatcatctgcgatggcgcggtccgctccggcaagacctccatcatgatgtgggcctttgtggactgggcaatgcgggagttttccggccagcggttcggcatctgcggcaagacagtggacagcgcaagcaagaacataatcgttccgtttaccgctatgacgctggcgaaagaaaagtacactatccgctggcggcggtcggagaagattctggaggtccgccggggggccgtaacgaactggttcgaggtgttcggcggaaaggatgaatccagcgcagccctaattcagggccggacgctggcaggtgttctgctggacgaggtggcgctcatgcccaggtcctttgtggagcaggccctggcccgttgctccgtggacggggcaaagctgtggttctcctgcaacccggattccccacagcattggttttacctggagtggataaagaagcacaaagagcgcaacgccttgtacctgcatttcaccatgcgggataaccctgggctgagtgaaaagacgctggagcggtatgagaacatgtataccggcgtgttttatgatcggtttatccgtggcctttgggtggtggcggaggggcttatctacccacacttcggcgagaactgtatcacggacgaggacccgccagcgggccggtattatatctccgtggactacgggacgctcaaccccttttctgcaggtctttggtgcgtaacaaagcaaggagcggttcgcatcaatgaatattattacagcgggcgtgggacgcaagagcagctgaccgatgaggagtattaccaggcgatacgggaactggcagacggctataacgtggactatgtggtcattgacccgtcggcggcgtctttcatcacaacagtattccggcacaacgagttccacgtggtcaaagcgaacaatgacgtaatggacgggatacggcggacatccgtctatctcaaaagcgacaagctcaaaatacaccgccggtgtaaggacgctatccgggagttcggtctgtaccgctgggacgaggactcaacggtggacaaggtcatcaaggcggatgaccacgccatggacgatatacgatatttcgcaaacactattctggttcggcatttcccggtaatgaggtgaacgaatgaccatcatcgacaaattgaaatcattgggctttgccaccatcaacgagggattttacggtaaggtccaggagtggaagtcctggtatgagggcgacgtgaagggatttcatcgttaccgggtgcgcaatggggccgggattgtgcggtgcaagcggtacacgctcaacatggggaagaagatcccggaggactgggcaaatctcctgatgaatgagcgggttgaaattaccctggacggaacgaaagagcaggagtttattgaccgggtgctggaagagaacaatttccgggtgcgctcaaacgagatgcaggaaatggccttcgctcttggcacggtggcttttatcccccgcgtggttggcatggggttcaccgaggcggggcccgttcccggaagcgccacagatatcatcatcgactatgtgacggtggagcatatctggcccctggcctggcagaacggcattattaccgagtgtgcctttgacaatatcgtcaatgtcaatggggacgattactgctacctgcaaatccacaggaaggtcaacggcctgtatgacattgagaaccggctgtatacataccgcaaccagaacgtggatgctgaggtgccgatggcatcggtgcagggatttgagagggtgccgcccgtggttcacaccggaagtaaccggcggcaattcgtcattgaccggcccaatatcgccaacaacttcgattactccatcccactcgggatttcggtctacgccaacgctatcgacagcatgaagggcgtggatattgcctttgacagctacgtcaatgagtttgtacttgggaaaaaacgggtgatggtcaagccgtccgcccagcagtatttggatggtgagcctgtctttgaccctgatgatcttgcctattatgtgttgccggaggatatcgagagcggagccgccatccagcccattgatatgaaactccgaacgtcggaacacactcagggagtgcagacccagcttaatctgctgtccagcaagtgcggatttggcgagacctactaccgatttgacggcgggaacatcaccaccgccacccaggtcatcagcgagaattccaccatgttccgcaccatcaagaagcacgaaattatcttggagagcgccatcaaggagctgtgccggatcattctccacctcggcaacacggcaatgggggcggggctgaatgaggatgcagaggtcaccattgacttcgatgattccatcatcgaggacaagacgactgaacggaacaacgaccgccaagaccttgcggcgggcatcatgaatccgtgggaataccgcatgaagtggtataacgaggacgaggccacagcaaagaagatgctccccaagatggaggatatgacggacgaggaggaagaggagattgaatgaaatatcccttcactccagaactattagactccctcccggaagagctggcggagctgtaccgctcccttgaactgaaacttctggatgaaatttgttcccgcctgaaaatcgccggtgagctgaacgaagtggcggtacaggatatccgagcgctacgctcccacggtatcgacctgggcgatattgagaaagccatccagcgaacctccaatctctcacggaagcagctggacaagctgttggacgaggtggtggagcggaaccagcgatattataccgacctcattgatctggcaggcgtgaccaagccagagacgatggtgagcgtagaggatacctgggccatctatgagcagacccggaaagaactgcaaaacctgacccgatccatgggctttttggtggacaatgggcggacgatgttagcaccggcaaaagcctatcagtgggcgctggacagcgcggagatgcaggtcatgagcggggctgtctcttacaaccaggccatcaaaagcgccgtcaagcagcttgcagacagtggcctccgcatggtggactatgagagcggccaccgtgaccatattgacgtggcggcccgtcgggcggtcatggcaggtgtatctcagctgtgcgcaaagtacacggagcagagcgcagagtacctggaaactccatactacgaggtgtcggctcacattggggcgcgggacaccggtgtgttgtggaaaaaccacaaaagctggcaaggccgtgtgtactctgtcagaaccggagacatctatccgaacatctacgaggtctgcgggcttggattggtggatggactggagggcgcaaactgtcggcatatccgccatgtgtgggtggagggtgtgtctgagcgcacttacacagacgagcagcttgcccacattgatgacggccacgacgtgacttatcagggcaagcattacacggcctatgaggccactcagcagcagagaaagatagaacgaaccgttcgaaagctaaagcgggaacagaccgcatacaaggccgcagggctggaagaggacgctcaatcggtgacagcccgcattcggcggctaaacgcagaatataagtcgttcagcgaggcggcggggctgccgttgcagcgggagcggatgaaagttacctataccgatgtggcatctgagcaaatggcttcagccctcaaaatacagcgcgatgcggaagcaccgatcaggcaggcaatccaaagcggtgggtatccgttggaaatcaatccagagaaacaagcgcggcatatggctggtatggctataccgggtagaagtgtaataacggtttctatggaggagttacaagccatcataaacgcaaaggcaggtagcgggaaaatcaatcttacagatgattttaaaaagtggaaaaacacagaaattattgatgctggaaaagaaattggctatacgatcaacagaaatggtgatataatgattgcaagaagcatcaaaatccattatagcaaaagcggaactcatggcgttccattttcggggaggtggaaaaaatgataattgaaaatcctgagatttacttcggaaagaaaattaaagttttttccacaagcgggcgcatgacgattggggagctctatgggtatgattacgactttgacgatgatggaaatgagtttctggagttcgatgtggagaatgaaaacggtttgctgatcggatttacggaagatgagattaaacgcatcgaaattgtcgggggaagcgaatgacaaaaaagatcaacggaagaatgtggtactgctgcccgcactgcgggaaagcactttttccaatccggccagatacgaaggtacaaaacatgcctttccgatgcaaagcatgtaagcacgatatcgaagtgaatattgcatagagccaagagcctgtgagccaagagccattgaaccggttacgaactgtaacggtttgatggctctttctattttgccgagaggcgtaaaaccgcagggcgacggccctgacaaaaaacggaggtatttatgagcgaacctatcaataaccctaccccggcccctgcgccggagcccgcccctgagaaaaccttcactcaggcggaggttgacaccttgattggcaaacggcttgcaaaagccatgaagggcatgcccagcgaggaagaaatgaccgctttccgtacatggaaggaaggtcaggctggtgagaaagaacgctgggataagctgaccggagagcgggatacgctggccggaaggcttaccgccgcagaggcggagcgggaccagctgaagcgggacctgtatctggcccaaaagggcctgaccggcgaggaggcggagtttatcgctttcaaggcagggaagatggtgaacgataagaccacctttgagcaggctgtggacgcgctgaccgctgaccgcaaaaagaccacttttgactggaccgctcctgtgggtggcggaagctccaaaacaggagaaaacgacctgatgaatgccctgattcggggcgcactgaaatgaaaggagaacctaaatggctgttgatattattgatagaagtaaactttccgggcttattcctgaacccgtgacccgtgagattatccagggagccgtaacggagtccgccgtgctgcgaatggccagacggctgccaaacatgaccagtaagactcagacccttaacgtgctggacgcactgcccaccgcctactttgtgaacggcgaggctacgactggagcgtctgactccaaggcatccctcaaaaagaccaccaacatggcatgggacaagaaaaagatctacgccgaggagattgcagttatcgtgccaatccctgaggcggtgctggatgacagcgactacgacatctggggtgaagtacgcccccgtctccaggaagcattcggcaaggtcatcgacgccgctattctgtatggaacggacaagcccacctcctggcgtgatggcttggtcccttctgctaccactgcaaacgctgttgtgactgctaccagcgatattttcaaggacatcatgggcgagggcggcgtgatcgccaaggtagaagagagcggttacatccccaatggtgtaatggccgccatccagatgcgtgccaagttgcgcggcctggttgacaagaatggacagcccatcttcaagaccgacatgcagggtgatacccgctacgcactggacggcatgagtatgtatttccctgtaaacggcgcttacgatccggaggaatcccttgccatcgtaggcgattggagccagctggtctacgccattcggcaggacatgaccttcaagatttttgacagcggcgtggtgcaggaccccactaccgggaatatcctgtataacctgatgcagaacgacatggtggccctccgcgccgtcatgcggctaggctgggagatccccaatcccatcaatgcatataacgtgggcctggaaaatgctttcccttttgctgtttacgcaccggcggggggttaagcgcgcgcctctcggggctgacgattggcgcgctaacactcactccgacgtttgacccagatacgacggagtacacagccacaacgaccaacgcaacaaacactgtaacggccacaccagaggacgaggatgcaactgtgaccatccttaacggagagagccctgttgataacggcacggcagcaacttggacggagggggcgaacaccctgaccatcactgtgaaaaacggggtagcccagaaggtttataccgtcactatcacaaaatcggtctaaaaggaggctctataatggcttatgtagactatgggtattacacaaccacataccttggtacagccattatggcatccgatttcccacgcctgtctctgcgtgcaagttcgtttctggactactatacacagggacgggcagctcaaaacaaggatctggatgccgtgaagatggcttgctgcgctgtcgctgaacagtatcaggccatcgacacggcccaggcactggcgcagaagtctttgtctgctgcactgtcccaggatggcggagaacttaagagccagactgtgggaagctggtctaagacttaccagagcggaggcgagagtgcggcacaggcggccgcctccgccacctccgtaaaagctggcctggcggaagcggcgaatatgtacctggccgggaccggcctgctctaccggggaagggggtgcgtctgtgttcccccatactgtgacgctctataacgtgtcggtggagattgacccggccactatgaaggaaacgacggtcaaccatatcacagtgctggaaggcgttcttctggatgcggtgaaggggaaaaacgtcaacgagagcggacttgtggacgccgatgctgtaacactctacataccgaccaacgcatccgccactgacggtgtgaccggcgagaagaagcgttacgttggacccgtggagttttggaacggcgagagccgggacgggatgtggaccctatctcctgggcagaacaccttttttgtcaaggggaaggccatccacccggactggagtagccagaagatatcagccgcctatgactacgtctatgacgtgaaaacggttgacttcaaggacttcgggggggagatgtcccactgggaagtaggtggagcctgatgttgaagttcagtgtccacactgaggggctagaggcaatcaaggataaattaatgcaagcatcttcaaaagctgagcatactctcgccattcaaattcggaaggacacatctcaatacgtacctgcgttaaccggaagcctagataccagaacaagaatagaaggggtcggtgatgcaggattcggccctgggacgggaggctcaacaattgtatatccaggcccatacgcccgctacctctactacggaaagctgatggtagacccatctaccggaagcagctacgcctcaaagggcggcacaaaaatcctgacggacaaaaatcttgtgtttaacaaagcaatgcatgcacaggcacaatcccactggttcgaggccagcaaggccgaaaatctggagaaatgggtccgtgtggcggacaaggcggtgaaacatgatctctgaaaaacgggaaaagccgcggatgctggcgacggcggaagaggtagacaaaatctcccgctccatgaacgtgtgggtgaacacctttcctgaaaagccggtcacgatgatcaagtacgaatcgctggacaccgcaatcggggaagagacagccatggccctgtccaccatccaggggacctatattaccaagcagtacattttgggcggataccaggcggagtatcaattcaaactgatctaccgcatcaagcctggaaacagcaacgaccggagattggaagcagacgagctactgaaccacttcggggactgggccaggaagaacctgcccgaccttggagatggggttcgtgcgctgaaggtagagccgacaacccaatcttccaaattcgcctcctatgaggggggcattgaggattaccagattttaatgaagctgacctatgaggtcggcgtgtgaaaggagacagcacaatggctgatttagagtttaacactaccccaggccagaccgtagcccgtgaaatgcttatagcctatcttaacactgcaactacgactccggaagagacacctgaatggtccccggtggggaagcgggtagaggacagctccattgagctcgattggcagaccgaaactaaggtggatatcttcggaaacacttacaccactggcaagaaggcaaccaagacccagactttcgacccctgtgagctggatggtgccgataaggctcagcagaaaatttggaatctgggcatcaaggacaacaatgtcaacgccttgcttaaccaagatatgctgatcgtccacctgtatgcaggcacggcaaacacggcagtatttgcggagaggtattctgcctgctctgttcttccttccggcctcggaggtgagggcggcggctccatcgggatgcctattgatgtgacctatggcggcacccgcaccactggaacggcatccatttccggaaccactgttacctttaaggctgacggagaggagtaatccatgaaagagctcaatttcgattctggccttgttacatattccctgaatggaaagtgtgaagtgtctttcaacccaactgatagcaactttgtggagcgtttgtactctgcctttgaggagcttgacaagaagcaagaaggatataaggcacaagtcgagaagatggctaataaacgggagattttcgacttcgcccgagagcgggacgcagagatgcgcggcatcatcgatggcgtatttgatgcgcccgtgagcgaggcggtgtttggcgggatgaatgtctacgccattgctagcggtcttccggtttggtgcaatctgatccttgctatcatggatgaaatcgacaccacattcgccaaggagcaaaaaagtacaaacccccgtttgcagaagtatctcaataagtatcagaagaaataagaaatggagcacgacatgggatatggacttccaacaagtgtagagataaacggaatggaattccctattcgttatgacttccgagtcattctggacattttcgaggctttgaatgatccagagttggacgaccaagaacgttcctttgtcgtgctccacatgttttatccagatttcgagagactgacagattacaatacggccatccatgagatgttccgattcatcaacatggaccaggaagaggagcagaaaaaacagcccaagctagtggactgggagcaagatttcccgtacattatagctccgataaatcgtgtgttgggttatgagacccgatctgtaagctatgatccagacaccaacaccggaggagtacattggtggaccttcctatcagcatacaccgaaattggagactgcctatttgctcagatcgttggaattcgcagtaaaaaggcaaaggggaaacgcctcgataagtcggaacaggagttctaccggaagaacaaaagcattgtggatattaagacccgatataccgactccgaaaacgaactactgaaaatgtggacaggcagggggtgatattatggcagctgatggctccattgtcattgaagctaatattgatgacaagcaagcacaaaaagaactgaatagcctaaataagaaaatagattctctgcaaaataagttaacgcaaaagcagggaaaacaaaatgcccttgctgaggaggctcgacaaatcgggattgagtacgacaatgcccggcgtaaactagaagaaatgcagagcgggacggttttttacacctctgaccacatcaaacagcagcagtctgatgtttctgcacttgaaaaagagtgggataaggtcagactttccgctgatagacttcaaacagaaatttacgatggaacgcaggaacttgaccggatgaaaacaaaggccggtgaattataccaacaaattggaaaggctggggctgcgtctggcgctatggagcgcgccatggatcgtatgcagaaaagcgcaaaccgtttttctctccgcctccgtgaagttgttcgtagcgcattgatattcaccgttatttctcaggcgcttgcttctttgcgaagctggctaggaaaggtcatccaaaccaatgatgaggcgagagcggcgcttgctagattgcaaggcgcgcttttgacattagcacagcctcttttacaggtcgtgattcctgcgtttgttaccttcataaatgttttaacgcaaatcgtttctacggtcgctcaactttttgctatgctttttgggacaactattgagcagtccaaagaagccgcatctgatttggaagcagaagcgtccgctattgaaggagttgggagcgccgcagaggaagcaaaagggtcccttgccagcttcgatgagatcaataccatatcgacatcaactggtggatcagggggtggcggagcaagtgcaggaggaacttctcccgactttggatttgaggcgaatatggatgaatctcagcttcaaaatatcctagacttaatcaaggccattggaagcgctctcattgcatggaaaatcggaagttcgcttgggttagggctaaaacaaattcttctgctttttctggcgatttactctgcggccacgttcctggaaaaccttttcagcgcatggacgggtggggttacccttggcaacgcccttggaatgattgcatcgtcgttggcgacagcgttattcttgttccttgcacttgggaaaacgctgggacctatagcggccggaatatcccttattgtaacggggttagctatgctcgtgaccggattccacgatgcaatgggaaacgggtggaactttgaaaatctgttgctttcaatagccggtattattgcgacggggcttgggatagctattttaacaggctcttggattccgcttctgattgctggtatcgcctcattgctattggcatttgcagtggctaccggtcatggagaaaaactattaaacggcatccaaacgatcttgcaaggatttctggacttctttacaggaatctttaccggcgatattgaactggcgattagcggggttgagcaaatttttgacggccttggaaccgctgtcggagccgtgtttgatgggatgattgataccatccttagtttcctggattggcttgacgagaaaacaggcggcgtacttagcccgttgctgaactttattaaaggactgttttcgagtgttttcgggtctgtaaaggacaccgttctaaatgtgattgactcaatcaaacaaatctttacgggcctcgttaagtttgtttctggtgtatttactcaagattggaatcttgcgtgggaaggcgtaaaagatgtattcagaggcatttggaatgggattgttggtattctggagggggcaataaatcttattgttgacgggattaactgggtaattggaaaaatcaatggattgattggcgagggaatcatttccgctggtttggaattgcttggtgttcctggcggtaaaattcctagattgcctcgcacgacaattccccgtcttgcgcaaggaacagttgtccccccaaaccgtgagttcctagctgttctaggcgacaacaagcaggagacagaggtagtctcccccttgtctaccatgaaacaggctgttttagaggctttgagagaggctggaggaataggtaatggaactgtaacagttgtagtgaatctggacggccgagaagtggcaagaaatactgtaaagcatatcaaccgaatgaccgaccaggccgggcgctctgttctgaagttctagggggtgccgcatgaacattctgacgatcaacggacacgactactcccgttttatcgaatcctctggctacggctggagccgggaggacctagacagcgaaaagaccacccgcacgaaggatgggcgtatgcggcgggacaagatcactacaaagcgtaaactgtcctatactttgatgcacatgacccgtgagcaactttcccagctagacgatgacctgagtccatccactttcagcgtcacttattttgacctccatgggtccatgaccaaagagttttactgctcctccttctctgccaaaatggacacggcatacagcggggacggaacagagtggtctggggcatcgtttaatctaatagaggtgtgagatggcgcaggtaacaagtgaactttggaaaacgctgtggcgcaccagaaacacagtcaaggaatacaaatttgacatcaacggcgtggaatacggaccagaggacgaggtggaacactcatacagcaacggcgtattcgaggacttcggaattggcaacgcctataccgcaagcctgactttgggcttatttgctgatagtatcccccgagcagcaaccatcaaacggtatatccgcctgcggaatggaggacaggtgtcggagtggcttccaaagggcacgttcttcacaaacactcgatctgaggacgatggatactggactattgaggctttcgatgcaatgcgaaaagcggaagtggtgtgggagccagaccaaagtctggaatttcccatgaccatgcctgatgccgtgacagagtgctgccgcattatgggcgtgacgttggatagccgtacagtgctgaacgcccattacaccatcgactatccggctaacgagtacaccatccgcaatgagctgtgctttattgcggcggcccacgctggaaactggatcatcactgatgaagggaaactttacttagttccgcttttgtcagccccgccggaaacaaattatctggtggatgaatacggagatgccatcgtgtttggaggtgaccggatacttgtctgaaaaattttttataggtttagacatcacaggatttgagaacacgggcaagtatcggcccatctcccgcgtgacgcttagggtggatgacgaaaatgtctttactgcgggcgatgatacaggattggaaatcacagcctcctgcccacatgccacgcaggaaatggtcaatgcgctcctgacacaactgcaaggctatcagtatcaatcttttactgctgatgccgtcaacctggacccagccgcagagcttggtgacggaattacggtgagtggaatatactctacactatctcagctgaatgatgatgggaacggattccctgatatttccgcccctggagaggtggcactggaagaggagtacccgtccgccggaccaatggagcaggagttcaatcagaaactcgcccagacccgatctctgatctcaaaaacctcagaagagatattgctccaggtagagagtgagatcaatgggctctcctccagcttttcggtgcagctgcaaagtatcaccgggcgcattgatggcctggatggtgattttgcggagatgtctctgaccctggacggcctgacagtgactgacagcactggaaagactgtgataaacgggtccatgatccagaccagcaatctatatgtgaatgcggcgaatattaacgggaccctgacggcgaaccagatcaacctgactggagctatcacctgggtagacctcgacagcggagttcagggagatatcaatgaggcggtcaacacagcaaacgatgcctatgacctggcctataacaatcagctgcccagttacatcaagagcacatatatcagtgccacggaggtcagaagcccgactatctcaggcgggaccattatagggtcagagatctacgccaccgaggacggagacacttacgcaatgatggacggagactcctttaccctcatgcggacaggaagctcccggccaagagcaatgttagaagccaccgacagcgatgtgtctttggtccttgggagcgggagcagtagcacatcgtattccgccgggcgcttgtacattcaaaaggcgtatatcagcgggtttggcaatgccgccgggattatgtatgtaaaagacaacgatgtcccgtttgggatcatcatggagagtgatggtacattgacgatctccgcagaccaggtcaatggcgtgcccgtgcggtttggctaaaggaggctcaaaatggccttttcagcctcctttagttctattactgagacctccgcccgatttagagcatcgtttaccggaggagactcaggtttttcctattaccgatatgtcagacttgacattgatagagatacctatgagatccggagcgattcagccggaggggcttcatcttccttttctgaaacgattcggggactggaccctggaactacttatgactgggaagcacagcttggatatgaggatgcgtcagggtccattacatggctgagcatttatgacagtggttcttttactacagattcagcagctccggctattgatctatggtcctggagttcatcgaatggagaggccagttccagccagacaagagcggccagaaatgccatggataatgaagagccagcagagaatttcccgcacgaggtctggaacgatatcgtaaataaggtgcaggaggcgttggatgcttcggggctcagctgggaacgaagcagctcgcaaggggccacgttatcccgctctggctgcctgatgtcctctggagataccctgttgacggccgccatgtacaactccgtcaagtatcaaatcgggcaaggaaacggatcggacggtatctatgtagattcagaagatgaatttacatggtcccacattgaaagcctgacggattatctcaacctgtggatcgaaaacatataggagggtctatgaaggaagttaacgagaaactgaacaaagtgtttaagtggctatccgccatcccggtcagcggtgaagcagtggacctcatgtttgcggccaagcaagagctgagagcggcatacaagatcctgaatgagtccaaaaaggaggataccgatggctgataaaaacataggctccctccctgcggcatccacattagacgatgattcgctgcttgttgcagaacagcaagggcaggcggtaaaggtcacgggggcgcagttcaaaggatttgccaagcagtcagtccggcagtatgttgagcaggctcaggaagcggcgagcgatgctttggaagcctctgaacgggcccttgaggctgtggctggtattggtactgcggtggaggataccaaagcaaacaaggaagccgcagaggccgctcaagcagccgcagagcaggcgcaggccggggccgaagctgccgcccagggtgcagcggaagaggtcaaagaagagctccaggggcttgtagatcaggcggagaccgcaaagaccggagctgagacagcggagagcggagcggaagcggcaaggactgcaatcgaaaatatgctagtagaggccatcacactggagactggacagccggccacggtcagcaagtctctggtggatgaggtcgtaaagctgacctttggcctcccggcgggtcctgttggcccgaagggtgagaccggagaccctggctccagcattgaccgtatcgagcgaacgagcggtactggggcggcagggactacagacacttacaccatctatctgactgacgggaaaagcagtacattccaggtctacaacggcgctgatggtattggatctggcgacatgctgaaaagcgtctatgacccgcagggaaagaacacagatgtttttaagtatgtagacgataagattgcagatattgacatccccacgcctgagaatatcgtcactgtccccggtggtggtcagctggaaatgtcggaaagcctgggaatcggtccgtacaccatcactttctcggaggatgagggtggaattgatggcctttccgcatctgatgtggattacagcaacaccaccagcggtttggaggcaactgatgttcagggggctattgatgagctggcggggcgtccttcaagcggtctaactcaggagcaggcagaccagagatatttgaagctgtctggtgggacaatggaagatagcgccgaaatcatagggaaaaatttggttattagctcaaatacaattaaaaatgacgattttggcgcattttccgtcagcggtactagcgcaatgatgcaaagcaaagagcaaaattttatttcatttgtgggaacatcgaccgcagaggcgcatatgtttgcacaatatgacttaaattcaagcgcctattcttctgtcgtggctaatggagaaaaagtcaggcttgaaagcgttcaagacaatacccacaaagcatatatggagttaaagcatgacggtcagataggttttgcgttttacagcggggagatagttcacatgttctcagtagatgcaagcggagtaaatgtgttcgatcctccaacggaaggcaccaatgtggtcaataaggattatctggaacaagcgatttcaaatgtccaggcagcaatagaagaagaactaaaagcctacgtcgatacctccatcggcaccgccatagaagggagctactaatggccgtacatcaaacattgacaagcctcttctccgccattgctgatgcgatccggggcaagactggaggctcagaccccatcgttgcggataactttccggaagctattgcggggatctccagcggcaccgataccagcgatgccacggcgactgctggggacatcctctctggcaagacagcttatgtggccgcaggaaaggtaacggggaccattgccagcaagagctccagcaacctaactgcaagcggggccactgtgacagtccccgccggctactaccccagtcaagccagcaagtcggtggcaactgccacccaggccactccatcaataacgcttgacgaagaaaaagggcttattactgcaaaatcaactcaagcttctggctatgtatcttccgggactacgacagccacaaagcaactaagtattaagggaagtaagacctacacaccaggaacaacagatcagaaaattgttggaggatattatctgaccggcacccagaccatcaagggagacgcaaatctcgtggccgccaacatcaagaagggcgtgagcatcttcggcgttgcggggaccaacgagggagaagatatcgttcagaaggtcattagcgaaggaactgaattaggtaccgccgaaaaacgggtaagcatcaatgtctcgattggtgacattattcatgttgtcgtcaaatggaaacctttattttcggatgtccccgagtattcatatttgaaatacctcaatgacgatccaagtgttactaatgcagttaagagctatgctcttgggtatagtggcgataccgattatgaaattgacgttggtacgtttatgtttgttacagttgagagaactgctaatgctgccattttacgaattagcggagttgctttggaggatggagttcttgccagatatagtttttccgaattaaaagccactgtttactatctcattgagtaagagagggtggacaccatgatatacgtcaacggaaaaccagtagccggatttggctccgggaagtcccggcagttttcggtctcactccctgccagtgggtggatcgagaatgagcagattgtgagcaacgacctgttcaaatccagtggctacgcatatctggcaaaccctgattcggattcctatctagcgtgggtctcttcgcaagttcggccggaggatgaggtagcggtggatgggaaggcggtgtttatctgtgcggaggcccctgcgtcagatatcacagtcaacatcatccgtatggaggtaaaagatgggcagtaaatttttgacgatggttggcggcggagcaggaggcggaatcaagctggagagcattgccatcacgacaccgcctgacaatatcacatatctccccggagaggtctttgaccctgcggggatggtggtcacggcatcgtactccaacggggccacattgacggccaccggctggacctactctcccagcggagcactgcccgaggggacgagtgaggtggagatcatctacaccgaggccggggtgacaaagaccgctgtgcaggccatcactgtggagcgtgggaccatctctgtgcccacggtatccgggagtcttacatacaatggacaagcccagagccccaccctgacgggatacgatgcagacaaaatggtcctatccggcgacacgtccggcacgaacgctgggagctatacggcggtggtcaccccaacagcgcagtacaagtgggcggacgggagcacggaggcgaaggatatccagtggtctattgctaaggccacccccagcatcacgtttgacccagaatctgtgagcctggatacctccaccacatctcaggcggtggctgtcacctacacgggggacggcactctgtccgcacagtctgataactccggcgtagctacaacatccctggaggggacaaccctgacagtaacaggtgtggagaccggcaacacggccatccaggtatcggccagcgaggggacaaactacacggcggccagcgcctctctgagcgtggcggtgcagtttgcgattatcattccggtggtgccgagccaaaagggtacgcttacttataatggcgaagcacaaatggcagaatggaacgaccttaacacagaagaactcactttggttggggcatcataccaaacaaacgccgggacttatactatgggatttcaaccgaagcccggctaccaatggtgggatgggactacggagacaaaaaacgcgacgtggacgattgggagggcacctattgtagtttcattttctccaaggtcaagtccaagttccccgcttgtattaggagcaaacaataaaacggctgttgtatcggtgcagactaacgctgaatcaacaacattttttatcgagtcgcagcaaagcaaagagtacataagtacaaatgttgatgttgattctggcaccattacgataagtgcgcttaaaagcaccaatagattagcagcgaattccacagtattttatgtccatattagcgcaggaagcaattacaccagctccgcccaaggatattatgtccgtgtcgaatccctcacctccgtcttcggcgtctcctgggacagctccaacccatccaccgccctgacccgtctgaccaaagccaacgatcccaacaagctggtcactgtggacatcacaaccgagccagtacccgcagttgggacaggctcaggctcctcaccattcgacagctatatgccgtggatggggatggaggagtactctgcatcccttgttggttcttctccaccaaaagaagtttctgctttatacaaaaaaggtgaagatggatttgaacggactaatcccaataagcctgtatttgttaaaataccggaattctactacaaaatcgaaaagatcggcaatatattccgatattacatcgcagatggggccttagacggattcttgcttcatcctggcagcggttgctatgtagcgaggtatgaaggtgtcaaaggaaacagcagtggcacttcaacgatgaggagtaattcgggccttacaccttcgacttcagatacaagagacggatttcgtgttacgtcaaaagcgactgcctccggcttccagctctacgacttcgccgcatggtgcgctgttggtctgctatatctggtcgaatttgccgattgggatagtcaagagaagataaatcgtggaatcgtcaacgacagctctgtccacaaaaccggcgagactgacgccatggtctatcatactggaagggcggcgggaggtcttataaatactgccgcggttcagtaccgttggattgagaacccgtgggggaatgtctttgagtggatcgatggaatcaacgtcaacaacagagttccatatatctgcacagaacccgaaagttatgctgatgacaccacgtccaattacacatcctctggtattactcttccgaactccggttggattaaagggcttggatttagctccgttttcccatgggcactcttacctgatacaaccggtggtggtagcgctaccacctacatcccagactacacaaactcgagcgcaggctggtctgtacttgacgtgagcggttgctatacaaatgcatccatagctggcctattctttttcgatgcgagtcaaagctcaggcatctcaagccagtacattggagcccgtctccagttccgggaggtgaaagcatgagagtaagaggcgataacaaccccggcacgttctccattgaggccatgcccaataaacccggctggtgtctggtgcggttctatgaggacgcccaggagtacactgaagagctggaggagaccaccatcacgggctgggagtatgacgaatatcacctggaacagcccaccatctcccaggaggatatcgagggaaaccttgaggtctatctgagggcggcaaaagaggccgaggtcaccccagagagccgtctggaggatgtagagaaaaacaaagcagacaagcaggaggtcgccgcagtatgggacagcatggcggcggcgtaccaggagggggtgcagagcgcatgacaaccaaagatttggtcctcagcataatgaggtcccagggtgcggcagacgcccttgacctgcgaagccgagccaccgatcttgacggcacagccatcattgctgaggagagcaagacccccaattttgactcggaaaaggactatagtctgtggcccatcggggccccggtgagggacggcgagcaggtgtacaagctcctccagccctacaacgcctccacatggcctgaccagaggccggcggacctccctgccctgtggtctatctgccacacgaaagaccccgccagagcaaagccctatcaggcccccaacggcaccagcggcatgtacatgactggggagtgctgcgtggacggcggcgtagtatatcgatgcctgacggacaacaccgtacatagtccaacagattacccgaaggcgtgggaaagggtataaaaaatcccccctgtatgggtaagaatacaggggggacgcatccgattgtcgaaaaagggggtaaccttttctgaattgggagccggatgcaacgccagtatagcacatcaaaagagggcccgcaagaggagagcaaaaattttgtcgaaatggaggtcaatacttacctgatggatgataaatgcttgattgacccacaaagagactgcctgggactccaaaaggcaaacatgctggagcggcagatggagaaaatgcaggagcaggcaagagatacccacaataagctgtttgaccgaataagagacctggaaaaagcagaagcagccaggaacgagcagtacgagaacatcatgggaaagctggacaagctgatcgcttggcaggaggcagaacaagcggccccaaagaagagatgggattccatcaaggataaggcaatctgggctgtattggccgcagtgattgctttcctgctgggaaggatcggcctatgagcacgcagatgatcctggccgttgtagcggcgttctcgctggcctgcgtgttctgtctggggctgtggtggctgtccgcccaccggtccagaagggggcgcacagagaccatgaaggccatcgtctggctgtgcctgtgcaatggctgcgcctgggtgtggtgctcctatctgctggcctatctgggccgtgagcagatcgcagaacagctatccgggaaagctgtcacagagatcattgccgtgatcctggcttatgccatcaaatcactggtggagaacctgagcaagaataataattggcccgataaggccagaaaggatgaaaaagatgcctgaatctattttgaagcgtttagctgccctgatgtccgtcaagtccgtggtcacgctggtcttgaccggtgtgttcgcctatctggccgtcaccggacagatcgcccaggacttcatgaccgtctatgcggtggtcattgccttctatttcgggacccagtcccagaaggtgcaggatgtgttgacagatggaacggaagatagccctacgaccatcacaaactactaccagcttcccactgaggagggagaaaatgtcgacagcaaatgatattctggaaatcgcccggtcgcagatcgggaccaaagaatcccctgccaaaagcgataatgtgaaatacaacactgcctactatggaagagcagtctcgggcggtggatatccctggtgtgccgtgttcgtctggtgggtgttccgggaggccggggcctctgacctgtactatggcggagataagaccgcctactgccccacgctgatgtccttccacaagaagcaggcggtgactgactaccggccgggagacatcgtgttcttcaacttctccggcagaagctccgccggacatgttggcatctgcgagagctgggacgggacctacatcaccaccattgacggcaacaccggaagtgccagtgaggacaacggaggtgcggtactgcgccgccggagacacaagaaattcattgtgggcgcatatcgccccgaatatcaggaggatgatgatatgactcaggatcagtttaatacctttatggagaactatttgaaagcgaaagcaaaggaaccggccagcgattgggcaaagccgtttattgatacggcaatcgatgtcggagccatgaccgatgtgggcgggacgatcgagcggcccaagtcgtggatgacccgtgaggagttagccgtggtggttgcagcgctggcaaggaagggataaagaaaggacgtggagcatgagcgcaagagtaaaacttccagaaccgttggacaggctcttgcgctctcagctcgaaacagccatccgggaagctgccttccatagagatgatgacttgatcgcaaggcgatatattatcgaaaaatgggcacagatagatattgccgccgaactgggctggcgtagatccactgttggagatcacttgaaatatatcttaaagcgagtgatagaggtctctgagcagctgtacacaaaacgtacataaaccgcacaaaaccccgactgggaccgcacccagccgggggatttttttgcgataatttaagcatggaggacgtggggatcaagggttggtacacgtcgccgccctcctcacggactccattatttttatacaaaggacgtgtgatatatgaccccggtagaaaggctggtggccgccggcatccgaccggactgtgccgccgagagtgtgatgtggtatcaggcccagggggatgactatgggctccaaaaatacttggacgaggtagaagagagacatgcgctacatacattacaaccccaatcctgcgggtcggaacgtgggggactgcactgtccgggcgctgtctaaagctctcgaccaggaatggtacaccacttacctgggactttgcgtggagggcggcctgatgggggacatgcccagcgcaaacgccacatgggggtcatatctgcggcggcacggattccgccgggaattggccccggaggatgtaaccgtctcggaatttgcagacggacatccgcatgggacatatatcctggcgctgtctggccatgtggtgtgtatccggaatggggtgctttatgattcctggaacagcgaaaatgagatcgttttgtattactggcagaaaggatgattgacgtggcctatacaccttactatccgggctatcagcccatgtattaccagccgcccatgccggatcagctggcccagcttcgtgtgtctcagtttcagcccgcgcagcaaccgcagcaagcccaaccttctattgtctgggtgcagaacgaaatggaggcagctaactatctagttgcgccaaactccgctgtaacgttatgggacagcaatgcccctgttgtgtatctgaagcaggcggacgcaagcggcaaacccagcatgaaaacctatgacctcgtagaacgcacgcagagagccgcacaggctccggcggccccgtctattgagtatgccactaagcaggacctagatgctttagcggcccgtgtagaggctcttacagcgaagaaacagactactaaaaagacggatacaaaggaggatgcggaatgaacccctttttccaggcgatgggcggaagcagacagcccaacatgatgcagcaattccaacagttcatgcagcagatgaagggcaaggaccccaacgccatgatacaagagatggtatcatctggccgcatttcccaagatcagcttaaccaagtccagaaacaagcccagcagatgtcagggatgtttgaggggatgaggggaatgtttggtaaataacttcaatcaaaatcccggccgggttttgaaaataaatcaaaaaaggagataacacaatgagtctttcttctgacggcgctgtgatgacgatgccggttacccccgcctatcagggcggaaacggcggtttcggcggctggggaggcgattgggcctcctggatcatcctgttcctgatcttcggcatgtttggctggggtggctatggcggcggctggggtggtaactccggcaatggcctgggctctccctccggtcagggctgggcgacccgtgctgacatcaatgagggattcgccctgaataacctccagagcggcatcaatagtctccagcaggggatttgcaatctgggttatgaccagcttgcccagatgaacggtatcaacaccaatatcctgaacaccggttttggcatccagaacgccatccaggcaaacaccgtggctgggatgcagaataccaacgcgctccagactcagcttgccgagtgttgctgcgagcagagagccgccacacaggatttgaagtacaccatcgccactgaggactgcgccacccggaacctgatgcagtctaccactcgggacatcatcgacagccagaacaacggtatcaatgccatcatgggcaagttgtctcagatggagtacaacggcctgaatgacaagtatcaggcggctcttgccgaaaaccaggcgctcaagttccaggcttcccaggcggcgcagaacgctttcattaccgccaatcaggaagcgcagactgctgagctgatccgccgtatcaatcccatgcctgtcccggcatatcaggtccccaatccctatgctggctgcggctgctgcaatccctgcggctgctaaaaccaaatacatcaacttccgaggattcctcggatgttcggccccgtgccgattttgaactatgcggcggggcaatagcctcgccgctaatctttttgaaaggaatgatttttttggccgagtacacaaatagcgcaatcgtaaccgttgctgctggtcagaacgtgccctttactgaggaggccaacacgagcaagccctgcattgtgcatcgagaaggggctgggcttgtaactcttcgtgggctcaccaaccagtgccgggcgaaattcaaggtctcatttggggcgaatatcgctatccccaccggtgggactgcggaggctatcacggcggcgatctctatcaatggagaagccctgaacgcctccaccgctactgtcaccccggctgccgcggaggatttcttcaatatctacgtctccgctgtggtagacgttccccgtggctgctgcgtcacggtagccgcaaagaacaccagtacacagcccattctggtcgccaacagtaattttattgttgagcgcatcgcgtgaaaggagcaggatcatggaatacatgtacgaactgaaagaaaagctttgccaggagctggacgagatcgctcgaaaaggtgagttgggtgctggtgatctggagatcgtccataaactgaccgacaccattaagaatctcgacaagattgagatgttggaggatgacggatactctcaggagggctacagccgggagggcggaaactcctatgcacgtggctccagctatgccaaccgtggcaagcattacgtccggggccattactccagagatgggcgcggtggttatagccgtgacgggcgcatgggaggatatagccgccatgatgccaaagaggccatgatggagcaggcccacgatatgatggacagcgcgaccagcgagcgtgagcgtgaggctatccgccggtttatggctgaactggagcgggactgatagggggtgacccctttgcttgaccgcaaagagatagatattgagattgcccggttggagtatggggagagtagctacccggcctatgcaaagctagccaacctctacaccatccgcgaccgcatggaccgggaggaacgccaagtgtcctatgagacgtcctattcagctgcaccggcgactgccgagttttccgcggcagttgaaagctacggagacagcgacttcttgcgagcagtatatggaaaggagcaggcggacgcttgggccgtcatggacgacctgatggatacacttcatactgttaatccacgggtgtatgagggggtcatgaggaaaattagggctctctaaaatagtccgcccccttttatagggggcggatttttccaccaccttttccaccacctaatagcttgaaatagtctattttagtcatttgaagcttttctcttagaaatggaaaaagccccgaaaaacctttaaaatcaaggctttcggagcttttttctttggtacggccgaagggactcgaacccccaacattcagaaccggaatctgacgctctatccattgaactacggccgcatattaagaagcattttctcaatgcgctccgttattatagcagggatcttccaaaatgtaaaggggatttttcacttttgggggattttctttcccacgggagggagttgccccggcgtgagccagcggatggaggaggcgcagcgggcaggagagcagacggcggcccgccagccggggccggagaacagggtgaagcagacggaaccgaaggggagacaggcgccggaagggaggatctgccggggaagggggacggggatggcggagatgggccgagtcagacccagaccggtgaatttgcagaagctctccttcagggtccagagctgggtaaaggcctccgggtcgtctcccagccccagcagccaggcccgctcctctggggagagcaggcggtcgagaaaagcggaacgccgcagggtgatctgctggatgtccacccccacctcgtcccggtccagggcacacagggcccggggtccgctgtggctgaggttgaagtggagctgggggaagtccggaaaaaggggctttccccgctttccacgggcgatggagggcagctgctccagatcccagtgctcccgcagtcccacagccagaagcccgtaggcctggctccggtgcgtcatgccgtccaatccgtacagcaccatggtcctcacctcctgagagggattttaccacaccggcccccaaaagtcatgccgaaaatcaggacaggtcggcaaagagcaccccggcaggcgggaaaaaggtgaacaggaggatcagcgcccccagaaggaaagccaggattgcggggatgcgccaccgccagccccggaagggaccggagaagcggacagggaaccagaatccgaaggccatcagccccagatacagggcgatgtccagccacagggcgtggagggcgagcgccgcatggagcagcaggcccaggaccagcatcaggggacacaggatgacaagggacagcagccaggggcgcatcccggtgggacgcccccaggcgaggaaggcggatgccgccagataaggccagtacaggatcttgatatgctcccacaggctctcacagacgggagacagaagggcggagagggtacagggaaatctggcatacaaaaagtggaggcccacgcccgccagaacggcgcagacaaataccgggacgatcagctttttgggataaaacatggatatgcctccttccatgagaacggtcctggagcattgtatggcgcgtcaaaaaaattatgcagatgccgccgtataatccatgaaaaagaaggggagattaggaacgagaattttttggatcgcggaggtgtgccatggatatgacgaatcaggactatggaaaactggtcaaccaatactctcagtcctcccctctggggaaaaatatggtgtgggcctttttggtgggcggcgctatctgtaccgcggggcaggggctgtccaacctctatcagaactgggggatggatcaggatgcagccggcggcgccgtctccatcaccctgatcctggcggcggcgctgctgaccgggcttgggtggtttgacaagctggccaagcgggcgggggccggaaccctggtgcccatcaccggttttgccaacgccatggtctcccccgctctggagttcaaaagcgaggggctgatcaccggcacagcggctaagctgttcgtagtggcggggccagtgctggtgttcggaatcagtgcatcggtgctttacggactgatcttgtgcatcttccgcggataatatcagcagacgccgtcccaatcgagggacggcgtctgctgtgtgcgcaaaagaaatttttgacagttcgggaagagaactccctgtaaaaaatggaggtccctgcgcctgaggcatttccgcattttccatggaaggagtggaaggtcccgccatggtttttcggcggaagggatggccataatgagtgtgtggacggcgccaagggcagtccacgacatgatttttgaaaacagggggtgaaattgatggagcaagagacaaagcagaagccatggaccgggatcgctgccggggtcctggtcctgtgcctgatcctgagcctggcactctccgacggcggagcgcgggcggcctcggcgggggcggtgctggagctcccccggagcggcggaggggctcagccggtctcaggcgcccaggtgggggacaaggtggtccccctgggccgggcggtgggaatcaagctgttttccgacggcgtgctggtggtgggcctgtcggcggtggagacggacagcggtccgtccagcccgggccggacctgcggcctgaaggcgggtgatatcatcacccacatcaatggtcaggaggtcaacaccatcgaggaggtccaggacatcctgggtgatgaacagggggatgccatgaccctgcgggccacccggaacggaaagccggtccagctctctgtccaggccattcagaatacccagggcagctatcaactgggcgtctggctgagggattccatggccggaatcggtaccatgaccttttatgacccggacagcggggtgttcgctgccctgggccacggcatcaacgacgtggatacggccacgctgatgcccatggagtcagggagcattatgtacgcttctgtgaccgatgtaaaaaagggagagagcggcgcgcccggagagctccatggcagttttgacgtgaaccgggatctgggcgatctgtatgccaataccaatctgggaatctatggcgtcctgcgggacggagcgctctcccctcgcggggaggctgtggaggtggccgcccgggaagaggtgcatgtaggaggcgccaccatcctgtccaacattgccggagagcaggtggaggagtatcaggtggagatcactcacgtttaccccgcagccgcgggggatacccggaacctgatggtgcaggtcaccgacccccggcttctggaaaccactggaggaattgtccaggggatgagcggcagtccgatccttcaggacggcaagctggtgggggcggtgacccatgtcctggtcaacgatcctacccggggatacggcattctggcggaaaatatggtctcccagtgtgtgtgggaggagcaggcccaggtctcctgagtgccggcgttctgtcgaaaaaagcggaagatacccgaaaagttgatttccaaaaaataccaaaaacatcttgcgtatgctgtctgattatgataaattattggtgaccggtcgaaaccccataagggaaaaacaagggcaggtgcggaagcctgtcggaagggatttgattgtgaaaatgggtgcaaaacggattttggtcgccgataccggggaagaatttcgccggagctttatcgagaccgtggccagcgagcctgacatccaggttttgggagagacgggagacgggcaggaactggtccaaatggtaaaggagatggctccggacctggtagtcatggagatcgtgctggcccagatggacggcatcgaggtgttggaggagctgggaaagctggagcatcggcccaaggtgctgatcctgtccagttttgccaagggaagcatggccgagctggccgccgccaagggagcggaccactatatgaccaagccctgccgggtgagcacggtgtgtgagcgcatccggcagctgaccggcgaaaataaaaaggaagaaaatggagatatcccctataatttggaaaatactgtcacctccatcattcacgaggtgggggtgcctgcccatatcaagggctatcagtatctgcgggaagccattctgatcgcagtggccgatatggatgtcatcaacgcggtgaccaaggtgctctatcctgaggtagccaagcggttcaataccaccgcctcccgggtggagcgggccatccgccacgccattgaggtggcctgggaccggggcgacttggagacgctgcaaaaatattttggctatactgtatccaatgtgaaggggaaacccaccaactcagagtttatcgcaatgatcgccgaccggctccagctccagcagaaggagatgtgatgcggggcggcaacaggcgggggatcgcagggaaagatcctccgcttgttattttttccgccgcctggtatagtagcaggagcggcccggatgaaagagagcccgggccggaagatcagggaagggaggtgggagtccatgacgatccgctatcagcccaggggcgtgtgcgcccggcagttcgaaatccaggcggaagatggaatcatccagtctgtacaggtgacggggggatgcagcgggaatctccagggcatctccagtctgctgaaagggatgccggtgcaggaggcgatccagcgcatggaggggatccgctgcgggatgaaatccacatcctgtcccgaccagatggcccaggcgctcaaacagttcctgtaaaaaagaaaggtccgcggatcccgtctgtgagacgggcccgcggacctctttttttgaatcggtcggcaggtcagcggcgccgccggccatgatagctgccccggcgcccgcctgctccggcgcccgctcggtaacggcggcgcttacggaagaccagcaggcggagcaggacgaggacggccacgaccaggactgcggccaggatcagcttcgtaccggagttggcaaaaaactgacggatctgctcctgccgatagagcagctcggagcgatccacagaggtggtggccaccaggtccagggtgccgaatacctccccgtcgtaggtgagggtcatggtccccatcacctgcccctccttcaccggggcctctaccgtgtcttggaacagggaaatagtgggctcaatggcctccaggtccatatccaccgggagggtgcgctccagggtgcccaccggcttgaccaggacttggttggcgtcttgggacagggtgacgttcactgcggccacgggggtgtcctcctgggagatggtggtgcgctggaaattccggaagccccatttcagcagggcggtgctctccgagaactgcttcaggtcggtggagccatcctcccggaccgccggctccgctcccaggatgacagcgatcagatactcatccccgtccacggcggcagagaccaggcagcgtcccgcctccggcgtggtaccagtcttgacgccgatggccttgtcatagacatagcccatgtagtgccagttggagaggagggcgttggtgttgtagaactcccggggctcagacaggttggtggcggggacggtgtagaccgaggtgcccaccacctcccgaatcaggtcgtgcttcagagcctcgcgggtgaacaggcagatgtcgtaggcggtggtgtaatggtcgtcgtcgtgcaggccatgggtattggcgaaatgggtgccggtgcagcccagctccctggcccgctggttcatcagctcgataaaggaggctacgtcgccgcacacggcctcggccaggatgttggccgcctcgttggcggaggggaggagaagacagtacatcaggtccttcaccgagatgacctcccccggcttcaggttagcggtggagccgtcggcggagaggtcgaactgggaggtgctgctcaccgtgatcatctgatcctgggacagctcgccccggtcgatggcctccgacaccagcagggcggtcatcacctttgtgatgctggccgggtaggccttctcccgggcagccttctcgtagaggatctcaccgtaattggcgtccatcaaaacggcatggcgggaggtgatgtggggggcgtcggccgccagggcggagaagggggccagcagggtgagggccagcacaaaggtgaccagcagggaagaaagacgatattttttcataggaaaatcctcatatttatgatatactaccatcagcgcgggagcagagcgctcccgctcctggtgagattataattacaatcattatagcaggatctgacgaattccgcaacagctaggagggaacaacttggccgccatgaccagatttgacaagatcgttctggggctcaccgccgcctttctggtggtgacggggggctattttgtctccggacagctgggggaggcggagtaccaggtgaccgtctcaaaacaggtgcctgcggtcagcgcctccttgccggaggtggaggacggctatccggacagcctgctggagggagaggtcattgatctgaataccgcctccgcagccgacctgacccggctgccggggatcggggagaagcgggcccaggccatcgtggactaccgggagagcagcggccccttccaaagcgtggaagagctcactgaggtgaaggggatcggcgagggcatcctggcccaggtatatgactatgtgacagtggggggaccggactcacccgctgagtaaggagaaagacgcaatggcaaagattctgatcgtggacgacgagcgggtgctggtaaagggcatcaagttcaatctggagcacgagggctaccaggtccaggacgcctatgacggagaggaagcggtggagctggcccgggaggggggcttcgacctgatcatcctggacgtgatgatgcccaagatcgacggcctccaggcatgcatgcgcatccgggagttctccaatgtgcccatcatcatgctcaccgccaagggggaggacacggacaagatcatcggcttcgagtgcggggcggacgactatctcacaaagcccttcaacatcttggagctgaaagcccgggtgcgggctctgctccgccgggccggggctgcccagcagcagcgaagcggcaatgagctggccgcaggccacattatcctcaacacgggggagcggacggccagccgggacggggtctccgtggagctgaccgccaaggagttcgacctgatggagctgctgatgcgcaaccctggccgggtgtacagccgggagaacctgctgaacgtggtttggggatatgagtatatcggggatttccgcaccgtggatgtgcatatccgccgcctgcgggaaaagctggagctggacccggccaacccggagtatatccggaccaagtggggagtggggtactatctcagcgcccgtggcccgcgccgcctggaaaacgtttgaggaaaggcgtgtggaagagatgtcaaagcgagaagaacagggcaagcagggtgagccatccctggaggagctgggccatggagtgggatcgcccttttggggggagctgcacagctttcttcgggagtcctatggggtctcccccactgtggagtacagcgggtgcagcctggcccccggctggaatgtaaaatatcgagccagaggacgagcgctgtgtaccatctatccggataccggcacctttacctgtatgatctccatcggacaaaaagaagccccggcaatggaactggcgctccctggtctgaccgcctatgtgcgggaggtctatcagaattccagacccagccgaatggggcgctggctgatgatccgggtatcgggaccggagatcctggaggatatcaaaacattgctgcggatccggatgccggtccggggagcgggaaacaaaggctgaaaatatccggcttgcgggaaaagggagggagcgctgtgcgggaggaaaagaagaaaaagaggggcagagttccgtttttttcctccatccagatgaaatacgccatgagctacctggccatcgtgtcagtggtgctgattctgctgaacacctacccggtgctggcctcccaggacctgctgtttggctccaagcgggattcgctgaagagccaggctgcggtgatggcctctgccctgatggagctggagctgctcacctcggaccaggtggagcgggtcatgaccatgctggacagcagcggcctgacccgggtagtggtcaccgaccccgcagggctgattctgtacgacagtacccagcccagggagaagcgtggggagacagcggagaccgccccggtccaggaggagccggaagaaccccagtaccgctatgccctctatcaggaggttgtgctggcccttggggggaatgacgtgacctgctccgagttcagcggccaggtgttccgttccacggcggcggtccccatcgtgtaccgcaatatgaccatcggctgcgtctatatctgtgaggaggacgcggtccagggcgcgctgctgttgaacttacagaaaaatttgcggagcatctccctggtggttgcggcggtgaccctggtgatgagcctgtttttcgcccaaatgctctcctcccgctttaccgccctgctcagcgccatccgcattgtgggggagggggagtatgggcaccggctccagccctcgggccgggacgagctggccctgctggcggaggagtttaaccagctcactgaccgtctccagaccacggaggaggtgcgccggcgcttcgtatccgacgcctcccacgagctgaagacccctctggcctccatccggctgctggcagactccattctccagaacgagaccatggaccaagtgaccctgcgggacttcgtttccgacatcgggacagaggcagaccggctgacccggatcaccgagcacctgctggccctgacccggctggacagcctgccggcggcagagaccttcccggtggacgtgtcggcggtcacccggcgggcgctgtccatgctggcgccggtggcggacgcggctggggtggccctgggatccaatttgaaggataaatgtgtggtccaggggacggaggacgacctataccagatctgcttcaacctgctggagaacggcatcaagtacaaccggccaggcggccgggtgatggcggacgtgtaccgggacggggaccaggtccttctggaggtatcggacacgggggtgggcatcccggaggaggacatgcccaaggtattcaaccggttctaccgggtggacaaggcccgctcccgggccgccggcggcactgggctggggctgtccattgtccgggacacggtgcgccgccacgggggatgggtcaccgtccgggcccgccagccggagggcagcgtgttcacggtgggctttcccgctgtgccggaaaaacggaaggagggagaccggggatgaagcggtggacgatgtgcctgctcctggggctgctgctcctgctggggtcctgcagcactgccgcggagaagggcggataccagctctatttcgcctccggtctggaggacggcagcgccatcctcagcgagccctaccagggggaggcggacccgggccctcgggaattgatggaggctctgctctccggtcccacggaggaggagctgaacagccccttccccagcggggtgtccctgcggagctgggggctggaggagggggtgctggtcctgaatctgtcggagcagtacggcggactgacggacatctccctcaccgtggccgactactgcatcgtcctcaccatgagccagctggacggagtggaggcagtggagatcaatgtggccgggcagccggtgagctaccggaaccaccagatcctgactcgagaggaggcggtgctctcccagccggggcaggggcaggaggccccgaatgaaggggcttgacaaaacgggcggacccgtttaatctaaactacattgtaccgaagagcggcgccgccgctccggagagaaagaaggaatcagagcatgagtcactatcagatcggcaccaactgcctgcatgcgggctaccgccccggaaacggggagccacggaatttccccatcgtccaatccaccaccttccgctatgagaccagcgaggagatgggcaagctgtttgatctggaggccagcggctatttctatacccgcctccagaaccccaccaacgacaccgtggcggccaagatctgcgccctggagggaggcaccgctgccatgctgctctcctccggccaggcggcctccttctactccattttcaatattgcctcctgcggtgaccatgtggtgtcctcctccaccatctacggcggcacctacaacctgtttgcagtcaccatgaagcgcatgggcatcgagttcaccttcgtggacccggactgcaccgccgaggagctcaatgcggcctttcggcccaataccaaagccgtttttggggagaccattgccaacccggccctgactgtgctggacatcgaaaagtttgccgatgcggcccacagccatggggtccccctgattatcgacaacacctttgctaccccggtgaactgccgacccttcgagtggggggccgacatcgtgacccactccaccaccaagtatatggacggacatgccctccaggtggggggggccatcgtggattcgggcaactttgactggacccgctatccagacaagttccccggcctgtgcaccccggacgagagctaccacggcgtgacctacaccgagcggttcggcctgggcggcgcctatatcaccaaggccaccgtccagctcatgcgggacctgggctccatcccctccccccagaactgcttcctgctgaacatcggtctggagacccttcccctgcgcatggccaagcactgcgccaacgcccaggcggtggcggagtacctggagaagcaccccaaggtggcgtgggtcaactacgccggcctgccgggcaacaagtattatgagcgcgcccggaagtacctgcccaacggcagctgcggcgtggtctccttcggggtcaagggaggccggagcgcagcggagaccttcatggccggtctgaagctggcttccatcgccactcacgtggccgatgccaagacctgcgtcctccaccccgcctcctccacccaccgccagatgaacgacgaggagctggccgcggctggggtagcccccgacctggttcgcttctcagtgggcattgaggatgtgaaggacatcatcgcggacctggagcaggcgctggccggggtgtgacaggcgtcccagctggaccctgaatgccgaaggatgggaaaactgccggagccggatcttccggctccggcgggaccagaaggagggactgtcatggcaaaggaaacagttttgctatacaactgcgggggcgatgaatttaagacgctgcgggcgctgctcatgatgctccgggtccgggtccgcatggtggagccttcccggtaccacctgcccctggagcaggtggccgccggaaaaggcgaagaggacccgaaacagcaggcggatatcccggaagcgatgatggtcttctgtgacctggggcccggcaggctggaccagctgctgaacaccatgcgcaggacggagtttccgcctgtgctcctgaaggcagtgctgactcccaccaaccggacgtgggattcccgccagctctggcaggagctgcgccgggagcacgaggcgatgcggggcggtcaggaaacccagtaaaaatccattgacaaacccctgtaaaaattgtataataatcaagcggttctgaaagagccgctgatttgcggctgtgctggaattggtagactggcaagcttgaggtgcttgtgtcctatgggcgtacgggttcgactcccgtcagccgcaccaccagaaaaccccgaaagtcctttgagtgcaagactttcggggttttactatttctgtaaaaggcgtcttgggcatgattgcgcatctttcttttagtcgtgagatcaagaagtcccctaccgcctgactggccgctgccttggataggcatagatatttagagtggtggatacctgaaaatggcctgaatttgcagctgcggtttgtccatcggcacgggagtttatcagtagaactgcattgagatggcagaaagcacggacgacaagaaaaaagtatagaaaaacgaaggcccgtgagcacgacttgtcgtgcccacgggccctttttctataggacagagggaagccgggatcagttgttgatgccggtccactgctcggagccgccggccttgatgtggccgtggctgtttgaagcctccatgatggggtagaaggcccagtggctgctgttcaggtcagagaaactgaccagccggtccaggctgcggtccacgaagctctggtccggggtccggcccagcatgtggttgacgatcacggccacctcggcccgggtgatggagccgctggggcggaaggtgccgtcggggtagccgccgatccagccgtactctgcggcgctggccacgtaggggtagaaccagtcctgcgcggacacatcggggaagctgcaccgggcactgggagccatatcggcgaaggagagggccgccgccgcgaactcagcccgggtgatggtgctgttggggtggaaggtgccgtcaggatagccggtgaacatgcccagggaggccagcgtctccaccgcgtcagcgtaccaggcgccgtcgggcacatcggagaaggagaccgtggcgggcacattctggtcattcagaagggcgtagaacatctgagccacctcggcccgggtcatgttccggtcagggccgaaggtgccgtcgggatagccgctgaggtaggcgatgtggtcccgggtattcagccagcggtccacgccgttcagcttctggctggcggtaaagacagcggtgatggtgtggttcttatgcaccttctcgaaggtgtagcggcccacggctcccacgctcctgccgtccaccagcacgtccgccagctcatagccctcgtccgcctggatgatgaagctcttgttccggtcataggccacctgcacccggccgtccgggctgatggagccgccctcgccggccgtggcggtgatggtcagataggtgatgccgccgtcgtcatcgtcgtcgtcatcatcgtcaccgccctcgtcggtctccgtaaaggtgacgcggatggtgtggttctccgtcacctcctcaaaggtgtaggagctgcggacacgctcactgtctccgtccacccggacacggtcgatctcatagccgcggtcggggtcaaagtcaaagcgctggtccccgccgtccgggacgaacacatccccctccgggtcgatgccgccgccgcttccggcggaggcttcgatggtccagtaggagggctcgtcgggcacgccgtcttcgtcctcatctgcaccgaagtaggccaccacttcgctgtcctcccggatatcctccagggtccagctgccggtaaaggcgttctccgggtcgttgttggagtagaccacatcgccgttgacggtgatgtagtccagggcacagccgtcctcggcgtggatggtgaagggcagatcatctccggcgtctacggtcgcctcggtgggatcgatggagccctgctcctcgttgtccgaggaggcggtgacggtgtactgctcctcctccggctcctccttgtcgtcgggcacgccgttgtcattctcgtcctcgccgaaggtgaccacaacttcggccgcttcctgaacattttccagcgtccaggtgccctcaaaaggagcggttatatcgtcgttggtgtactcagttttactgttcacctggatggtgtccagggcatagccgtccttggcgtcgatggtgaactccacgtcctctccggcgtttacggtcttgctggtcggatcaatggagccgccctcgccctccacgcgggcggtgacggtgtactgggtctcagtgacatcgggctcgccgttgccgtcctcgtcatagccccaggcggcccagaccgccttgtcctcatccatagcgacagaggtcacggtgtcgggggcggtgtcctcgacgctgtaaatggtttcgtggtcgccctcagtcatccagccgatgaagaggacggggacagatgtaccgtccaaatcgactggatcatgggtgggcgctttatccctcagctgatatgttccagagagatccttgacctcaagggtgtcttttccatcgtcgaacgcgccgccgttggcgtggtaggtcagggtataggcggcctccggctcgttggcgtcaggcacaccgttgtcgtcctcgtccagaccgaaggtgacagaaatcgtgtgatcctccgtcacattggagaaggtgtaggaggcccacttttcggccacaccagtggggagggagccgccgttattggtgaggacctgttcacctgcttcgtccgcatcaatggtaatggtgtccacggcgtagccgctggcgggggcgatggtgaaggtgacgcttcctccatcggacacataggcttctttgggattgatggagccgttgtccccggcggtggcggtgatgtggtggtcatcttcggtgacatccggcttgccgtcatcgtccccgtccaggccccacactgcgtagaccgtcatatcgccgctgatggtcaggcgcgtggaggtttggggcagagcatcgccgcgctcatagacttcattctgtgcggaagtatctgttgtccagccgatgaacagcacctgatggttatcctgcccggcgtgggtgggctgatactcgtctgtggatttcagagtgtgtctgtccccgtcgttcaggccggtctccgtcttttcggtcgtgccctcactgccgaaatatccgccgttggcgtcataggtcagggtgcggtcatatttgtccggagtgccgtctccgtcattatcactagcaaaggtgacggtgatggcgtagtcggaccggacatcactcaaggtgagggttccgctggtatagccggggatgttgtgctccccgtcgttggggtaggtcttagtttccactgtggaaccaccgacatcctgcttcacaatggtgacggtgtccagggcgtagtttgtatcgggagtgatggtaaattcggcatccgtcccggcgatcacatagcgggtcgggggcgtgatggagccgttggccccggcggaagcggtgatggtataggactcatcctgcacgtcgggtttgccgtcgccgttggtgtcatagccccatacggcgtagacggtcttatcctccgaagagacatccaccgtggcggcgaggatgctgggatcatagttgtcattcaggccgtaaatggtgtcattatcggtcagagaccagcccacaaaggccacctttgtactgttatcattcgcatgggtgggcttgaactcggcggtggtgttcagcctgtagcggtcctgcgccgggaccgtctcggttttggtctcatcactgccgaacgtgccgccgttggcgttataggtcacggtgcgcttgtcctctgtaacgtcgggattgccgtcaccgtcggtgtcgtagccccaggcggcatacagggtggtgtcggcgttgacagtgtaggggctgagcacggtggtgggggcggtatcgttggcggacaggatcgtagtggtcttgttagttgcatccgtccagccgatgaaggccactgcgacgctgcccacggcgctgtgtgtggggccgccggccagggttacctgagtgccgcctgtgatgttgggctgggcagacgggacattggtcacactgccttgaactgcgttgccgttgtaagtgagggtaaagcttcgctgagaggggtcataagcgtggctgacggtaacagacgcggctatatcgccagtcgagtcatacacgacccggccctgtggggtggttgtatatccgggataagaattttggtaagtatcttcgtagcccgcaattgccgtctcagtcagctgataggcggttcccgctgggataccggaaacggtcgcggtctggccgggctggagctggaaggtcccatcggagttcagcggagtctctgagccatccccgatcttgactgtgacaggggccttctgggtatccagcttcccatttacagttccctccggcgacacgttgtaaagctccagcgtgtaggtgaatgtgggctcagaactgggagcactgctgccagtggtcgtatttaccttcaccgtcagcgtcccggtgggggtcttttcggtgcgcaggccgttgttgcccagatggacggtgactttggtgtcgtccacattatagaccggatggcggtagtggacagcggtgccggtcgtgttgccggtcttggcggcgttgccgtcggacacccggctcagcttggcggagccttctttgatagacaggccgccggcgtcatccactacatgaccttggagcgccctggggttgagcaccagatggtagtcggtgagcaggtcggcatcaagctcgcccgtgtcccctgtgtcttgcgcctgataataccggtgctcatagaagaaggcggcgccttggcctttatgcgcctcctgagcgcgcacgatattataggtcgttccatcgatcacaacggtccctcgctcgggaataacagtggactggagcaggtgttccagggcctcctggtgcgtcagcagcttctggctgccgcctgcaacattgtccaccagcacatacaggggggtgtcctcggtgtagtggtagaaggcgttggaggcagcgggggtaaagacggcggtggcggtgccgtactgagcgtcatccttggcggcggcatcccaggcgttgctgtagaagctggtggtgccgtctttggagtgggcgatcaggtagtcattgtcgtcctgatcgaatgtgacggtctcatcccagtccaccgagtagaacaggcggatggggtaggcctcctggttctgctggatggtgtgggtggtctcacccagggcgttggtggcgctctcggcggtgacggtgcgcagggggatcaggctggccgggaccttccaggtgagggtctgggtgtccccgcctggtgtgacggtcagctccagatcagacaggtcggccgctccatagatctcgttgccctccacggtgccggtaaaagtgtaagtagcgccgttgtcgcttgttgtggccttgaccgcgtggtctccatagagcacggtgggagcgcccaccaccttcatataggggcccagctcatcggtaaaggtgatgaagccgctctccccgccggtgcccggtgcgccctcaggggtctcagtgggggaggtgggcgcctgagtggcaatgtcgtttgcgatctcatcaaagatctctttccatgcctctgcgttgtcgacatctgttacctcgtagtacgcgtcgttgtaggcgaggctggtgacggaggccgggaagttattaaatgtaacgcggtcagtacgacttgcacctccgccatatctcatgatatcaacgctggtgtttgttttatactcgttgaaataattattaaaatcattggcgtgcgtattggaggagagctcccccttggggttcaggcagagacgggccaggttgggggcgtctgcgctgcccggatttacgccgatggtaataaatgccccgtcgtgggcgtagtgatcggcgacctgtccctttacataggcagcggtcatcatcatggcgaaggactgggcgtggcgggattcatcactgcccgcaccatctccaactacaaatttttggatattattactgttagttgttgggggagcggtgatgttggtatcgccgtccttcggctcgccctcagagagcaggatgatctggggcgcccggtcgacctgggccccgcccaccctaacggtggtgccggcattgagaagctgctgtgcgcccagataaataccggactgggtgtatttatcggtgccggaactctgccgatcgatatcaaatgtattttcaacgggatttgtactgctgttgatcccataagcggttactttgccgccagttcctatggtgttgggattataattaaaatagtcagcttgcgccccgttctgatagtgatccagaggcagcagcacagaggcgtaatcggaatatccgatcaccgcgacccggttgttgggatttgcggccatcagggtgcggatagcggattctgtcgcggtcagcatggcttccgcttttgcatccgggtctcccatttttggcgacatatccaggatcagcacggtgtcgatgggcacgctgaccctgtccacaatggtggccgccgagcccaggccggacagggccaccagaaagtcggcgacagcctctttctccaccgtgttgttcgtcagccccgttataacggggccgggcaatgtgatatcctgggtggacacggacttgtccgtccagatgcgtccgatgtccttggtggtcaggtaggcgcttccgcccacaccgaacaggtcctcccagtcggtgtaggtggtcgtgtccgcgaccggagccgggtccgggtccgccgccagggccgtgccgggcagcaggctgaacagcatacagaccgccagcagccagctcagcggctttctcagttttcgcatgtcgcatttctccttttctcatctcgaacagagtgtagtcagcccgcccagggcgggcggtgtgttcaggcgcccctcacctcctgacagccgccccagccgacggcggcctgttccgcctccagcaggcgctcatgggtctgctccaccagctgggccacagtggcctcgatctccgctcgggtggtgtaatacagcttccgcaggcagcgcgggttgcccttttccggggggacctgggcatcccggcagagccggcggatgctgacagagaccccggcccggccgcaggggcggccggtgcgggtgacaaagatggggccggaggagatcccccgcctccgggcgtagtccagcagctccctccggaggcagtcgggcaggcgctggggcatcgcctcccccgggaggagcaggaccccctcgcccgccgcctccactgtcacctgttccagctcgtggaccggcaatccggtggaggtgaacagcttgatcagcagatagacccgctcctgtctcagagcccgggcggtggacagcaggcgcaggtattcgctccgggtcagctcgagctgggcatccctgccgcaggagagccgccccgtcagctggaactccctacagcccagccactccaggaagctgttggccgcggacacgctggtgttgaccgtgctgggggagtatccctggtccagcagctgctcccgccactggcgcagggtgccccggccgatgcggccgccgggcagggcggcatacagcagctccagcttctttcggtaggaggatactgtgctggggttccgccctcgttcccccaggctggacagataggagccgatctgctcccgggtgaccgtgatcccctgtgtctggggctcctgcaatgcgttctccccttgggagatgcggctctctttcgttaccccatacgaccccctcccatttatagacagaatcgttcttccgtcatcaaaaatatgcgggatagagcggcgttgacagtttcctcctttccaggcagaagaaaaaagtgtctaaaacatcaggattttctgaaaaaaggcacgacaaatcaggccaaaaagaaaaaatgttttttggcctgatttgtcatgcctgaatccggaaaaaagattgatttctatttcagaaaatggtaaaatataaactactccaattatgtattttgaaattttggagcaattttaatgacagaagaacgattttgtcataagctaggagatcagccgcagctgatccagggtccgggcatgctcggcgccggtggagatgaggtagatgcgggtggtctcgatgctggagtggcccagcacgtcagccagctttgccacatcccggctcacccggtagaaacaccgggcaaacaggtggcgcaggttgtggggaaagaccttggacggagcgaccccggccgcccggcacacccccttcatctctgcccagatctgcttccgggacatgggcctgccgcttctggtgaggaacagctcgccggaggtgatttttttttgccgggcgtacttctccagcttccggcacagcttccccggcagaaggatggtgcggatcttccccttcagggcgatctccgtccggccctcccgcactgcctccgccgtgatatagcgcacctcgctgacccggatgccggtggcacagatggtctccatcagcagggacagccgaccccgccccaggcggcgggccgtctccaccagccgggcgtactcctcccggctgagctcccgggcggagtcccggaacagctgccgctgcacccgcaggtgcttcacccggcagtcctcccagcccagaaaagccagcaggcggtccagggcagtcagcttgccgttgaccgtggcgggggactggcgggcggccagctcctccctccaggcggcggccagctcccgggtcacctcacggccgcccaggaaggcggcgaactggcggacctcccgcaggtatttttccagggtggcggggctgcgctcctcctctcccagctgtcgggcaaaggccgccagcgtctcctctgtgatcttccgtggttccatatgattcctcctgtgtctaaaggtctttccttagtttaccttgacagaggaggattattgctgtctgcactgcaaaaacatcttccttgtgcggccgcagcaaaacagagaatggaaatcttgacaagcgggggatgcatctatataataaatatgtttcgcatttggacgaaaacactcgaatcggatcataaaggaggcagtcgggttgagtacagaaaaccaggcgcaggaaaacaaaatgggggtcatgccggaaaaccggctgctgctgaccatggcgatccccattgtcatatccatgctggtccaggcgctttacaatgtggtggacagcgtctttgtggcacagctgagcgaggacgcgctgaacgccgtgtcgctggcctttccggtgcagaatctgatgatcgccgtggcggtgggcaccggtgtgggcatcaacgccctgctgtccaagagcctgggcgagggcaaccaggccaaggcggaccgcaccgcgatgaatggactgttcctcagtgccctcagttttctggtgttcgcagtcatcggcctgacctgttcccgcctgtacttcaccatccagacggacatccagcggatcgtggactacggcgagagctacatgatgatctgctgtgtgtgctctttcggcgtgttcttccagatcacactggagcggaccctccaggccaccggccgtacactctataccatgttcacccaggccaccggcgccatcatcaacatcatcctggaccccatcatgatcttcggcctgttcggcttccccaggatggaggtggccggagcggcgctggctactgttaccggacagatcgtggcggcgatcctgggcctgttcttcaatttaaagaagaatccggacctccatctgtcggtgcggggcttccggcccagccgcaccatcatcggaggtatttacagcgtgggcattccctccatcgtcatgcagtccatcggctcggtgatggtctttgggatgaaccagatcctgatcgccttcacccagacggccaccgccgtctttggcgtgtacttcaagctccagtccttcatcttcatgcccgtcttcggattgaacaacgggatggtgcccatcgtggcctataactacggcgcgcggaagcccgcccggatcatgaagaccatcaagctcagcgtctgctacgcagtgggcatcatgctggtggggctgctcatcttccagtttgcctcccctgcgctgctgcggctcttccagtccggggagagtgcctccggcgatctgctgcgcatcggagtgccggcactgcgtatcatttcttacagctttttgtttgcaggctactgtatcgtggccactgccgtattccaggcactggggcacggcgtgctcagtctggtggtctctgttgtccggcagcttttcgtactgcttccagtggctttcctgctctccagggtcggcgggctggactgggtctggtgggccttccccatcgcggagctggtggcggtagtcctgtgtacggtgttcctgagacatgtgtatcataaggagatcgcccctccagcaggagaacgggaggccgcctgagcagggtgggagtccagaggatcgccccgcttttttctgaaaataaaaacagtccgtaattcttctcagaagaattacggactgtttttgcgttggggtttaacccagcagatggaaggccacgatgagaccggagaaaacgatggacacggtggaacacagcttgatgaggatgttcagggaggggccggaggtgtccttgaagggatcgcccacggtgtctcccaccacggcggccttgtggcactcggagcccttgcccccgtgatggccggattcgatgtacttcttggcgttgtcccaggcaccgccggcgttggacatgaacacggccatggcaaagccggtgacggagacgccgcccagcaggcccgccacaccgacggggcccaggatcaggccggtgaggatggggacgatgatggccagcagggcgggcttcaccatctcccgcagagcgcccttggtgcacagggccacgcaggaggcgtagtcggggtctgccttgtactccatgatgccggcgatctcccggaactggcggcggacctccagcacgatggactgggcggcggtctgcaccgcgctcatggtgtaggcggagaagacgaaggtgagcatggcgccgatgaacagccccaccagcatcaagggattggtgagggacaggtccagggtctccggggtcttctcctggacgatgctcacataggacaccagcagggccagggcggtgagggaggcggagccgatggcgaagcccttgccggtggctgcagtggtgttgcccaaggagtccagagcgtcggtgcgctcccgaacggcctcaggcaggccggacatctcggcgatgcctccggcgttgtcagccacgggaccgtaggcatcggtggccagggtgatgcccagagtggagagcattcccactgcggcgatgccgatgccgtacaggcccaggttgaaggactggctgccgccggcggcgtagaagctgacgatgaccgccgcggccacgatgaggatggaggccatggtggacttcaaccccagggagatgccgccgatgatgatggtggcggagccggtctcagaggcgtcggccagctgctgggtgggcttgtaggtgtcagaggtgtaatactcggtgaaatagccgatggtgcagccgcccaccagcccgcagaggatggcgatgtagaccccccagttccccagcatgagataggtcaggggggcggcggccacggcggagagggccgcagccagataagttccggtgcggagggaggtgagcagggacttctgggtggcatcctccttggtcttgacgaagaaagagccgatgatggagcagacgatgccgcagacggccagcatcatgggcaggatcatgcccgcccagccgtacccggcgatggcgcccagggagaaggtggccaggatagagcccacataggactcgtacaggtcggcacccatgccggccacatcgcccacgttgtcgcccacgttgtccgcgatggtggcgggggtgcgggggtcatcctccgggatgccagcctccaccttgcccaccagatcggcgcccacgtcggctgccttggtgtagatgcccccgcccacccgggcgaacagggccatgaaggaggcgcccatgccgttcatcaccatgatgttccccagggtgagggggtcgtcgatgccggccacgaagcggaggatgacgaaccagatggagatgtccagcatgcccagacccaccacagtgaaacccatgacagagccggaggagaaggccacccgcaggcccttgttcagactctcgctggcggcctgagcggtgcgggcgttggagctggtggcaattttcatgcccacgaagccggccagcatggaccagatacctccggtgagaaaggcgaagggggtgaactgggagagcatctctcccccggtggcaaaggccatcaccagcaggacgaggaagaccaccagaaagaccttcgccacagtggtgtactggtgcttcagataggcgttggccccctcccgaatggaggcggcgatcttggccattttgtcactgccttcggagaaggtcatgaccctgcggctttggagccaggcaaacgcaatggcaatggccgcgcccacgaaaccgatccagaacagattgtccatcattcaacacactccttcgcgcttggaaaaagggcccccgccagagcggaggcccttccatgcaaccgctgttatggtcatattgtaccatactagacgggctttgcaatagaaaatttatcgttaagtaaaaaacaaaccgcaggaatggagaaaaaacgcagagatctgcctagacccggcgccaggtgctgcggctgaacatgactaaaattgggaagatctccaggcggccgatgatcatgcacagggagaggaccagcttgctcaagggggagaaagcggagaaattgccggccggtcccaccgcgcccagtcccgggcctgtgttgctgatgcaggtgatgacggaggtaagggtctcggtaaagggaaaatcgttcagggcgaccaccagggaggcacccagggtgatcatggcataacaggagataaaaaggagcacggaggcgagcgtggactcgtccaccggcttgccgtccagcttcacgatctccacagagcgggggtggatgatgcggtggacctcccggcggatggcccggccagccagcaggatgcgggagcatttgatgccgccgccggtggaaccggcacaggcgccgcacagcatcagcaggataaagataatttgagagaactgaggccacaggcagaagtctgccgtggcgaagccggtggtggagatgatggaggagacctgaaaaaaggcatagcgcaggcactggagaggcccctggtacaggtgccggatgttgaaggcgatgacggcggtggacaggcccaccaccaccaggaaaaagcgcagctcatcgctctgaagcacttcccggaagcggcggcacagcaacaggaagtacatggcgaaattgatggagaacagcagggcgaagacggcgatgatcatctccagcacggggtcgccataggcgcctacactggcattgcggttggagaagccgccggtgcccgccgtggagaaggcgtggataaaggagtcgtacagaggcatgccggccagcttcagcagggcgacctcggccagtgtcatggcgcagtagatcccgtagaggatcttggaggtctgggactgcttggggaccagcttggaaaagaccgggcccggggtttccgcttgggtgaggtagtgagaacggatgcccagggaggggagcagagcggtgagcagcaccagcacgcccatgccgcccatccagtgggtgaatgccctccagaagaggatgccacggggctgggcctcgatgtcagtgaggatggtggcaccggtggtagtgaagccggacaccgactcaaacaggcagtccacaaaggaggggaaggtgccggagaagtagaaagggagcgcccccatcacgccggtgaccagccagatcaggcccacggcaaagaagccctcccgggcgtagaaatgccgggtggcgggtacagcggacagggccagtcccagaatggccatcagcaggatggtcaacaggaagggggcggggtcctcctggtacagcagggcgaccgccagcggcaggagcatgaagaatgcctcgaccagcaggacgcggcccaccagccgggataccaatttcagattcatgacatgccccccggggcagagaaggtgtgctcgccctcgtcatagatgtcgttgagatcctgaagacgcctgtctcgggagatgaggatgacagagtccccctcttggatggacgtggagccttccgggataatgatctcgcctccccgggccaccacggccaccagaataccgggcttcagggacaggtcccgcaggggcgtgcccagatggcgggtggaggcggtgacggtaaactccatggcctcggcggccccatccgcgatgcggtacagagcgttcatcacgctgccctgggagttctgcatcccccggaccacctggagaatgtgggaggtggccagctgcttgggggagatgatgctgtccagaccaacggcctgggcgatacggttgtagttctgccggttggatttggtgatgactttggaaaggcccagctgggcggcgtacagggagatgatgaggttgtcttcatcccggtcggtgagagccacgaaggcatcacaggaggagaggttctctgagtccagaagctcctgatcggtgccgtcgccgcagatgatggtggaatgggggagcagttcactgagaaaacggcagcgggcctcgctgagttctacgatcttgacctgcatctgcatcttctccagcaggatggccagatacagagagatcttaccgccgcccacgagaaagacccgccgcaccttgggggtgtagcggcccagaaggcggaagaactgatccaggccggtgggacggccgatgaggtagagattatcccctgcctgggggacaaaggagccgttggggatgatgacctcgccgtcccggtctacggcgcagaacaggagggagagctttttgacctggctggacaggtcctgaagcggattgcccaccagaaagtcttcctccatcaggcggaagcccatcagctccacccggccccgacagaaggtctcgatattggcggcggaggggaagcgcagcagccgggagatctccacagcggtggcattctccggattgatgaccatgtcgatgcccaggtcccgcttcagctccgccaggccagaggtgtactcctggttccggatccgggcgatggtgtagctggtgcccatttttttggctgtgaggcagcagaccatgttgacctcatcggtgctggtggcagcgatcaacagatcggcgtgctctgccccagcttcccgaaggacggcggcagagacaccatttcccttgacggacatcacatccagcgtgtcagaggcacggcgcagggcggcctcatgggtgtccacgatggtgatgctgtggtcctcactggcgagctggtcggccaggctgaagcccatttttccattgccaacgatgatgatatccaaaacgcagcacatcctggaaaagatttacggcaaaaagcaaaagaatatgaggccccgccgtatccgggcccaagcaaagaaaaatgcgccctcgaccgaaccggagctggagagggcgcgttttaaaagggactagatcgtccactgactgtggatgatgcctaccagctgccagcaggagtcggaaggggagaagaccagcttcagggaacaccagtccagcccggcgttggcgggatccaggccgggaaaatgaaactcaacgaaacggcagccggggtatgcctcggtcaaattttccaaagcgttgccgctctgcagaatacggtccactccgatctcaggggcctgggtgtagtcggtattgaacacataggtggagaaatattcggctggagtcagctcgatcaggctgcccaagccgtcggacacgccccaggtgtacaccgtctgatcagtggagaactgccggacctgagcggcagtgaagcggaggtcgctgtcccggtcaacagtggaatagggcgtaaaggtaacgccctcctccgggtggacgaaagcggccagagtatcataatcccgctcctgaatggcgcggaccactgcacaggcagagctgagcaggggaaagttgtcgctggaattgaacgctggcaaggtatttgcagagctgctgccggaagcggaggcagaccctgcggagacaataatggagttgaccacagacggggtcatggccgtctcccgctctttccagggaaggtactgggcggggcacagggtgcccacaaaaaatccgaggaagagggctaagaagccagttataatggcaacgcgtttgataaaactcatctccttgcggcagaatgaaaagcatatgggatcccctctatccccgctcgagtatctttcagacggggaagaataggataaactgcaaattcaaaatagattctgggaagctattgtagtacaaaattgataagacgtcaagcatggcctgtctgaaagccgcgctttccgaaaaaacgcaaagaaaaaatggaaaaataaaaataaaaaagaataaaatggaagataaaattcacgatttaaaataaaaacgactgggcgccgtcctgcgacggcgcccagtcgatcgataaggtacgagagaaaataggatcggaacagcctgtcaggagaaggagctcccttggacggagcctagatcctcccagcttgccggcagttcgccaggactgtacgcgttcctatcctgacgggaacgccagacgcgtccgccgaacacacagcactctcccgtctgccacagtccccgactgccctgaggcgggaggtagtccttggcccgggcggggtccgtggtgtggcagatgtcccacagggagaaagccaagtccgggctccagcccggctgaccggtggcgtcgtgctgctgccagaggcggtagacctgtccgttccaccggtagggcttgcccaccggagtctcttccgtgagataggagcgggggcgccaggtggggatggcctgctcctccgcgatcagggcggtgccgtcggcctcgccggacacagaccgccctgccagggccagggcgtctgccccgccccggtgttccagctcctccagggccagggtcacgatgtcagccacagagctccacccccttctgataggcatcctccagctctgagcgcagctgggcggcgctgcctgcctgctcaagcgccgcgatcatcgactcctgctcttggaggagcgcctgcttctcctgaagagtatcctccagctcccccaactgggcctggaagccggccacatcccccagatactgctccgctgtctggagaagcaccgtgtagctgcgggtagcgtgggcgtaccggatgtcccggacctgaaagccataccctgcgggcagcgggctttcccccacaacggcggggcgggaccagtcgatctgctcgatacgggccagctccgccatctcccgctcaaagacggccagataggtcccgttggcgcttccccgcaggatcagcccgcagggaacgccgtccacttggatcttgtttggatacaagctcattgtgttctctcctctctgaactgttgtgccgccatgcggccggggatatccccctaagtgtggcgggacggccctctcagttgcccggtgccgtacaccttgccccaggatctcctggcgggccccgggaggcacacccgcccggctccggcatataatgggggtgcatccacttgatgtgaggtgatccttttgacaacgatgcaagccaccgtcctccaggtggggaacggtcagctcctggtccaagaccagagcacatcccagcaggtccttgtgaatacgtccatcgcgggctgttttgccgtaggcaatcaggtgttcatcacctataacggtgtgatgaccgccagtatcccgccccagatcagcgcgatgagcatctgcctgatccgcagctgacgcggtgatgggaaaagcgccccggacgcctgaaaaggcgaccggggcgctcagcttgtggaaaaagactcgcgtagttcgcgcccgcaggcgcgaatcaagttctgacctgttttccccggcggcatgtgcgtcaggggaaacacttgcagcctgagactttttcgacagtctctttttcgaccgcgggtcagggggtcccctgctgggagaaccaggagcgggcatactccgccaccaggggggccagcgtcttcagggacaggccggtggtgttcacgcacaggtgatacccctcccggctcccccagggcaggtcggagagcatggcgtggtgccgggcccggtgctggtccacctgccggagcttccgctccagctctcggagagtgaaacgctcgtcgtcggagctgcgctcccggcaccgccggagcctggactccaaatcggcgtagacgaacagcttcagggggcggtgctccgccaggatcaggtccgcgttgcggcccacaatgatgcagtccccgtgggcggccagggcccggaggacgcggcgctgctcctgaagcagctgccgggagtcatggggcatggaggggagataggcaaaggtgcggccgatggtcagtgggacgccgcgaaagtggccctgctccagcgcatcctccacatagccctcgtccagtgcattcctccgggcaacggcggagatgatcgcgcggtcgtagtagggccagcccaggcagtcggacagccgcttgcccagctcccggccgccgctgccgaactcccggctgacggtaatgatcttcatggatcggcacttcctttcaaagaggcatggctctgtccagcggagcggcgctccagaaagaggaacatggacagacagagcaggatctggaccacagaggaggcaggagtgctcagaccgatctggaagagggtggcccccgccatgcggctcatgagataggctacagggatgcggacgaagaaggcacctatgataccctggatcatgacgaacagggtcttttcacagccattgtagtagccggtgaagcagaagagaaagggagtgagcatgcagtcgatggcataggccttcagatagctgtgggaggccgccacgacctccgggtcgggggagaagatggcggagagaaggtcaccgtggaagaaggtgagcagggccatcaccaggccggccgccacagaggtgaggatgccatacttcagggcctttttcgcccggatcgggttgcccgcccccatgttctgggccacaaaggaggacatggactgcatataggcggaggggaccagcataatgaagacgcacaccttttccgccacccccacgccggcggaggccgccacgccgaaggagttgacgatggcctggatgagcaggaaggaggtccccaccagcagctcctggagggccaccggcgtgcccagccgcagctcagcgccgataatgtcccggtggaagcgcaggtgtcgccgggagaaagcgaagggcagagaccggcggcgcaggcggatcaggaacagggagacaagcacgctgacggtctgggcggccacggtggccagggcggccccggcggcccccatgtggaacccggccaccaggagcaggtccccgaagatattgatgacgcaggcgatggcaacggtgagcagaggggtcctggagtcgccgatcccccggaaaatggagcccaggacgttgtaggccacaataaagagggagccggccccgcagatgcggatgtacagcaccgtctgatggaacgcgtgctcaggcgcgtgcatgagccgggccagtacctcggctccacccaccaggacggcagtgagcaggacggcgaagcaggcgaacaggcagatgccgccgccgatggcgcggcccgcatcctccggctcccgccggccgatccgctcccccaccagaatggtgatccccatggacaggccggtgacaaccatggtgacagtctggagcagcatgctgccggtggctacgccggagacgtccgccgtctgggcaaactggcccaccaccagcaggtccacgccgccgtagagcgcctgcaggaacagtgtgaagagaaccggaacggcaaaacggatcagagagctgaagatgttcccctccgtcaagctgcgcggtcgtcccattttatcattcctcctgagtattttgtcgcggcccgaagaaaggctgtgccccggcagtccgggtggtccgcgtcataacaaaagccggataagttcagcagacatctcagtctgccgccttatccggctcatcatttccagcgaatgacttgccctccgagcgagcggcatttattttataacaggttccgaggaaatgtcaagggcgaaaatgatgcagtttccggccccgggccaagcgccccggatcgagggagcgcccggcggccttccgggggcctgtgcaggggcgcatatcatgcgcttattatactggggggcggctcactggggagaccggcctctgcatggtgcgtagccttccgttcaccgtgcggcggggccacgtccgttctgctgacctgactggatggaagggggcacctgcggcggcacggtacaccagaggtttttcagatctttccggaaataagaagacatgcggaaacaggtcaccagagcggagttctccattttgggcgattttcacaaaaaaagagaaaagatatcatggaaatctcctctttacaaatgacaaaatgtttgttaaaatattgacaatagaatcgttaaaaaattaacgattctaaggggcgggccaccgctccatttggaaaggagatacagcgatatggcaaagaaagcccagtattctgtggtagacagcaaagagagcttcgaggcactgttgacccgggtccgtcaggcccagcaggagtttgcccgctattcccaggaacgggtggacgccattttcaaggccgctgccatggcggccaaccaggcccgcatccctctggccaaggaggccgtggcggagaccggcatgggggtcgtagaggacaaggtcatcaagaaccactacgcctcagaatatatctataatacctataagaacgtgaagacctgcggcgtggtggaggaggaccccgcctttggcgtgaagaagctcctggagcctgtgggggtgatcggtgcggtgatccccaccaccaaccccacctccaccgccatctttaaggtgctgctggccctgaagacccgcaacggcatcatcatcagcccccacccccgggccaagggatgcactgtctccgccgccaggctggtgctggaggcggcggtggccgccggcgcgccggagggcatcgtgggatggatcgacgtgcccagcctggagctcaccggcctgctgatggcggaggtggacctgatcctggccaccggcggaccaggcatggtgaaggcggcctattcttccggcaagcccgccgtgggcgtgggcgctggcaacgtccccgccatcatcgacagctcctccgatgtggccctggcggtcagctcggtgatccactccaagacctttgacaacggcatggtgtgcgcctcggagcagagcgtcatcgtcctggaccccatctacgaccaggtgaaggcggagtttgccgcccggggctgctacttcctgaaaggagaggagacggacagggtccgaaagaccatcctcatcgacggctccctgaacaatcagatcgtgggccagagcgcccaccgcatcggcgaactggccggcattcagacgcctgagaccgccaagatcctcatcggcgaggtggacagcgtggagccctctgaggagttcgctcacgagaagctctcccccgtgctggccatgtaccgggccaaggactttgacgacgcgctggacaaggccgaccgcctggtggccgacggcggctacggccacactgcctccatctacctcaatgcggtgactcagcgggagaagctggaccgcttcgcccagcggatgaagacctgccgcatcctggtgaacaccccctcctcccagggaggcatcggcgacctgtacaacttcaagctggccccatccctgactctgggctgcggctcctggggcggcaactccgtgtcggagaacgtgggcgtcaagcatctgctgaatatcaagaccgtggcggagaggagagagaacatgctctggttccgggcacctcagaaggtgtatttcaagaagggctgcctgcccgtggccctgcgggaggtgatggacaagaagagggcgttcattgtcaccgaccagttcctgtacgcaaacggttacgctaagccggtcaccgaccagctggaccagatgggcatcgcctatgacgtgttctatgacgtggctcccgaccccaccctggcctgtgccaagacgggcgcggagcggatgcgggccttcggacctgactgcatcatcgccatcggcggcggctctgccatggacgcgggcaagatcatgtgggtgatgtacgagcaccccgaggccgatttcatggacatggccatgcgattcatggacatccgcaagcgggtgtacactttccccaagatgggggagaaggccgctttcatcgccgtccccacctccgccggcaccggctctgaggtgaccccctttgccgtcatcaccgacgagcgctccggggtgaagtaccccctggcggactatgagctgatgcccaccatggccatcgtggacgcggacatgatgatgaacgcccccaaggggctcaccgccgtttcgggcatcgacgctgtcacccacgccctggaggcctacgcctctatgatggccaccgactacaccgacggcatcgccctgcgggccctccagatgatcttcacttacctgccccgggcctatgacaacggccccagcgacccggaggcccgggagaagatggccaatgccgccacgatggcgggcatggccttcgccaatgcctttctgggagtgtgccactccatggcccacaagctgggtgccttccaccacctgccccacggagtggccaacgccctgatgatctgccacgtgctccggttcaacgccgctcaggtcccggccaagatgggcaccttcccccagtatgaccacccccacaccctggagcgctatgcccaggtggcggacgccctgggtatccggggcgggaacgaccaggagaagctggataacctgtgtgccgccatcgaggagctgaaggcgcgggtgggcatcaaggccaccatccgggactacggcgtggacgagacgtatttcctggaccacctggatgagatggtggagcaggcattcgacgaccagtgtaccggcgccaacccccgctaccccctgatgagtgagatcaaggagatgtacctgaaggcctattacggagaataagaagacagaaaggccgcccggctcacgccgggcggcctttctgtccaaaaagcggagaagccacgttcctgaaaaaggcacagtccaggaggccgcttccccctttggtactgtgccggagggatcagcggttccgggtgcgccaatacatgagggagtggaagctcaccaccagcacccagccaaggccggtggccagggccacgccggacaggcccatagggcgtatcagggcgtaggagaggatgacccgggcggagatctggatgatagtgccgtagacggggacggtcacctgtccccggccccggaagtagcccacgaaggtgtttcccaggaagcagaggatgtaaaagcaccccaccatccgcaggtaagccacgccattggtctgggtgaaggaggaggtctcccccgccagcagggcgatggcggcgggggcggcagcgtacagcagcacagacatcactgcgcccagggccagcatcatgagaaagctggtacggaacccctcccgtacccgccgttcctccccggccccggtattctgggcggtgaagacagagacggcctgggccccgctgtccccgaaggagttggcgaagccctcgatgcgggtagtggcggtgtaggcggagatcataggggtccccatggagttcaccgccccctggaccagcagcttgccgatgtagaggctggactggtgcagggcggacaccgccccatagctcaccgtccggcggagcaggccccggtccagccgccggtcctcccggcggaacaggagctggggatagcgccgggccagatagagcaggcacagcgccacggagagcagctgggccagcaccgtagcccaggccgccccggcgatgcccatgcccagccgggccacgaacagcagatccagagccagattggcggccatagccgccagcagggccagcagggcggagcgggtgtctcccacagagcgcagggcggcggcgcacaggttgtaaaagaaggtggccagcaggccgccgaagatgaccaccagatagtccgcggccagccgggccacgtcctccggggtctgcatcagggtcagcaggggccgcagcaggagcagggcggccaggctcagcaccagggtgaacaggccgccgaagacagaggccagaaacccctcctgccggaagccggccagatcccggctgccatactgctgagcaaagaggacggagatgcctgtgcagcagccgctgaggagaaaaaggaacaggttcatcaccgtccccgccaccccgatggcggcaaaggcggtctccccggcgaagcggccgatgaccatggcgtctatggtgttgtacagctgctggaggatgttcccaaaaatcagggggagggccagcgacaccagctggggcgggatggagccccgggtcagggcggcggtctccacagcgtgtcacctcacagtttcatcaggtgagatcaggatagcacagggagaaacagttgtaaaataattgttttctccctataatatataaaaaagttctattttggggtgagacaggtgacagagctggacaccctgcgggcggagctggtccaggtcgagggcatcgagctgtgctgagggctcagggggccaggtagaactccagggcctcccggaccaccagctggggcatgccggggccggacaggctgtggtccccgccgggcacttggatgagacgggcgccgaaggtctgggcaaagcgccgggccgcctccggcgaggcggtctggtcctcatccccgtggatcatacagacccgctcctccccggagcggtacagttgaaagaggtcgtgggcatccagatccgccaggaaggcaggggtcagcttcagggggcggacgtagccctggtccagcatgaggaagccctgccgcgccagctcctccgcctgctccggcgtgggggaatggaaaagcaggggcatctccaccgccgcgctgcgcaggaaggaccgcgtcccccggtgggggcgggtggacaggtagatcagattcaggtaggccccgaagctggaggagaaatagaccacccgggccccgggggccagctccagggcccgggcctctgcccgggccaggtcgtccaggcagtggcggatgcttagagcgtccccatccaccgggctgtccccgtgagcggggaggtccagtgccagggtgccgatgccgtgccgggggagctccccggccagcagctgggcggtggggctgtccttgctgctgccgaagccgtgggtgatgaggcagaccatggactcgccgccctggatggtgtgccggcaggggatgttatatccgttgagtccggagagaagttcctgtgtcataagcgctcctttcaaagggcgagggcccctttttctgctgcactgccaaaagctgatttgaaaataccacagcaaaatgaccaggcgggcaaccggcggtcaaactggcagttatcgtttcaaggtatcctgataccattcgtaagtgggtttgataccctcctcttgctcaaagcgttcttccaatgctccgtaaaaatataactccagtaatttcttcaaatccggcagagccttacttccgtgaagcagtccatcttcactcaggtattcttcattccaatcaaattcctcgtggtcaaaccagactaaagaccaggtgagtgggtcgttttcatcaatctcctcctctggtatggacaaatcaatgcacagcggcccccaaccacctccccaatcgccaatgggaatcaaatttcgaaagcagtcctccggtagttcacaaaaatcacggatctcttgcaaaatttctatgttttttgacacttcgttcatagattgtgggcagtcgattgccaaccagagtgggccaaggtctcctttgtcttcaataatagagcatagaaaattgtcattgcgaatgttttgaggaagccggaatgaagtcagaaaagccctgtagagagagggcagcttgacctgatgcgcttgctcaaatgtagcaatgtcctgttcagtaatggaagatgacacaaattccttgccagggaaccaaccccgctcttgtaatttttgacatgcgcttatcacaaaatttctttcttccaaaggtatcatggtgtcccttgctccttccttgggagtccaaacaacctccaatttgtctttttacttactttaccatatttttatgtcttaatcaatgtgtagtgaaatggccagagttggaaccaatcagtcaaagataaaaatggagaggcgggacccgccgttgtcagccaggacagactctgctagaataggagagagaccgaccggggctctctggagaggaggaatggagatggagggatgggacctgcgggcgctggcggtgctggagcggctgaacgctgcgggacaccgggccgtcctggtgggaggctgcgtccgggacaggctgatgggccggacgccccacgactatgacgcggccacctccgcccggccggagcagatccgggaggcctgtgcccccatgcgggtggtggagaccggcgtgcggcacgggacggtcaccgttctgtccggcggcctgccggtggaggtgaccaccttccgccgggaggggcggtacaccgatcaccgccgcccggaccgggtggagttcacgggggatctgggggaggatctggcccgccgggacttcaccataaacgctatggcctgggagccctccggcctgactgaccccttcggaggccgggccgacctggcggcgggggtcatccgctgcgtgagggagccggagcgccgcttcggtgaggacgccctgcgtctgctgcgtgccctgcggttcgctgcccagctggacttccggctggaggaggggacggccgccggcgtgcgagcctgcgccccccagctggcctgcgtctcccgggagcgggtggcggaggagctgaagcggctggtctgcggcccggcggcgggccgggtgctgctggactgcccagaggtcctcaccgggcaggtgctgcccgagctggctcccgccgtaggctttgaccagcgcaatccccaccacagctatgacgtctacacccactgtgtccgggctctggagcgggtcccggcggagccgggactgcggctggcggccctgctccacgacgtggggaagccggggtgctgtaccgtggaccgggagggggtgggccacttttacggacacgccgccgccggggcggagctggcggatgcctgcctgcgccgcctgcggctggacaatgccctgcgggagcgggtggtcaccctgatccggcgccacgacctccagctggagccggagccccggctggtgaagcggtggctggggcggctggggccggagctcttcttccagtggaccgccctggccaaagcggacgccggggccaaatttccggaccgggctccgggggcagcccgctgggagcaggtggaggcattggcaagacagatcctggccgagaggccctgcctcaccctgcgggacctggaggcggacggaaacgacgccctggcccggggcctgcgggggcccgcggtgggccgggcgctggccgccctgctggaagaggtgatggagggccgtcttcccaaccaccgggccgagctgatggccgagctggaccgtttggcggggagggagcgctgagcgctccgccgcccgctgggggcacaaaacaggaccgggggacagcgcgggctgtcccccggggcatttatcccagcatcacatccagcagcatcatcaccaggaacccgcacatgacgctggcggtgcccacatgggagtgctcccccaggtgggcctccgggatcagttcctccaccaccacatagatcatggcccccgcggcgaaggaaaggacccagggcatcaccagggagacgctgcccgccaccagtacagtgagcaggccgaagatgggctctaccacgccggacagggcgcccgcagcgaaggccctgccggtgcccacgccgtcggaccggagggggagggagatggcggccccctccgggaagttctggagccccatcccgatggccagggccaccgccccggccagggcgccgctgccggtgtcctgggcggccatggagaaggccagccccaccgccatcccctccgggatgttgtgcagggtgacggccagtacgatcatggtggtgcggctcagatgggcgggcagcccttccggatcgctgctgccgatgtggagatggggggtgagccggtccaggaccatgaggaaagccccgcccagcaggaacccgccgcccaccggaagggcgggggactgccccatctcctccgccatttccatagaggggatgagcagggaccagacagaggcagccaccatcacgccagctgcgaagcccagaaagatcttctgggtggcgggtttcaggtcctcccggaagaaaaacaccatggcggctcccagcacggtggccagacaggtaaagccggtgccgatggcggcaaaggtaagttctcggatcagcatagcgacctcctgccccagggactggggcacgttcagtttatgtagagcggggccattctatttgggcgtccccgctcctggggcgggtcagaacagaaacccgggctccaggccgggcaggagctccagctctcggaacatcccggcagtgagggcctcaaactccgccgggtccgccgccttgcgcagctttttggcatagctttccgggtcccggaagaggtggatgagataggaccagagctccttcatccgcagcatggcgttgcgccggctgccgaagtcacgggcatagccctcatagagggcgtcgtggaacgcgcggagggtgtcccggtccgcgccgggcccgcccttggccttggaggccagcgccgggtcggccaccagccccctgcccatcatcagacctgcgccggggaagcggacagagaaagctcggcagtccgccgctgtcaccaggtctccgttgtagcacaggggggtgcggctggcggccaggatggcggggaacagctccggccgggcggggcggcggtacaggtcctcccgcacccgggtatggacaatgagctgggcgatgggatacttgttgtagatgtccaggatgggccagaactcctccgggtcctggatacccagacgggtcttgacagagacggcagtgggggaggcggagaagatgtcctccagcaggtggtccagttcctccggccgccccagcatcccggcccccttccccttggcggtgacggtgccggaggggcagcccaggttcaggttgacctcccggtagcccatccgggccagctcacctgccgcccagagaaagtccgccccgctccgggtgagcagctggggcaccgcatccaggtccccgtcttgctccggcaggatgtcccgcagctcccggcgggtgaacacgtggtgctggctgggggagagaaagggcatgaaataccggtccacccccgggaagaaccggcggtgggtccggcggaacagggctcctgtgatcccctccatgggggcgaaaaagcagcgcatagcctgcaattacagacccgccgcagccagcagggcctgagcatctctctcatcagggcgggtgcggaccgcgtcgaagttcttcagcagaagctctgcctgtccggcggagacggggtcctgaagcatggcctcatagcggcggcgcactccctctcccatgcgcccaggacacatgtaccagccaatcacggtgcagttctgggggagttcaccctcaaggcggcggatgatctgagaaaaatacgcctgatccgcaccaaagccggcggtgccgaagagaaagatctgcttgcctgccagtgaggggagaacagcccgcagacggtcggagcaggtgcccttgtccgtccagaaacccagatagaccagctcggctttcgagcagtccagggacccgactggaccgcatgggacgttgggcagggcatgggagagggctttggccagatattctgtgtttcctgtggcgctgtcatataaaatgatctgcttcatcatcgggctcctttttattctaagcaatagggactgatcctcatggtgattatagcatcccggcggggctcttgtcgacagcaagagaaggaaaatcatagcggtagggagggaaaatgttcatggtaaaatcttcacaaaatgaaggaggccaaaaattaaaatttcataaatatgcaaggtatgttttgacttttggacaaaaacacagtaaaataaaaagggggcttctgcccgattttccgcggcacgggatggccgcccccagaattttaggatgacaaaacgcaggaaaaggagaatagaatgatgaagacaggtttgcggcgcctgttggcgctggccctgggagcggggctgctgaccgcgaacacctacgcggccgccactacattcaccgatgtgcccgccacctactggggctattattacattgaccgggccgccacagaggggctggtgtccggcatcggagacaaccagtatggaccggagcagaccctgtccaacgcccagttcgtcaccatgatctgcaacatgttctataagacggcggtggccgccaaccagaacagctccggccagtggtggtatccctacatggccgcagcctactcggcgggcatcctgagcaacaccactgttgcccagcgccgcgccgccgccggcggctggaccgaggccatggtgaacgcggagatcagccgctatgacatggcccagatcatggtcaacgtggccggctccaaggggtgggagaaccccagcgcactggatctgatggccgcccggatcagcatcaaggactggagcaccatccccagcaattaccagaatgctgtggccggggcttatgccaggaagctgctcagcggcgatgagaacggtaacttcaacggcgccgccagcaccacccgtgcccaggcagctgtggtgctctgctccctgtatgacgcctccaccaccatccaggtgcccacctacgtcaactccaaccggctggtgagcggcaagaccccctccgagtccaacgtgtatgacgacttggtggccctgaagagcgactatcccgagaactacctgtgggatatgacccgcagctacacctccaaggaactgggcaccgccaccggcgtggaggcctttgcctacatgctcagcgacaaggtgttcggcgccatggccgccagcaagctgaaggaccccgcggacctgcgggtgggcgacgtggtcagcttcgactccggcagcgacttcggcgtggtggtctctgtggaccggaatgacttcacctatgtcacctgtgacaacagcggctggatcacctggaaggagaccgcggacctggacgacctggacagcagggatactgtctacacccgctatctcaccaaggcctccggcgacgacaccctgagcaacggagaaaaggccactgagtccaacgtggaggaccttctggacgacctgatggacgactatgaagacggcgacgactgggatatgagcgaccgctacacctccaacgtgttcggctccgccaagggcgacgaggcctttgcttacaccatcagcgacgagatctttgacgagctggattacaagagcgtgaaatatgccgaggacctgcgagcaggcgacgtgatctatgacagctggaatgagctgtggggtgtcgtggtggatgtggacaccaagaacgaagtctgcacctacggcagcattgattccaaggacaggatcgcatgggatttcgaggctgatttcgatgacctggacgagatgtacacccgctatcccagcagctcttcttcatcctctgacgatgaactgaccaacggcaagagcatcacggagagcaatgttgaaaaatatctgagcgagttcgaggacgatagggattacggcgatggcaaagagtgggatgacgatgatgaagactttgcctggagcctgagcgacgagatcttcggtgatgtggactatacgaagcacagcaagaccagtaagctgaagattggcgatatcatctatgatgacgacgaaggactgtatggcgtggtcatagatatcgatgaagaccgtgaacgggcctactatgtgagcgtgtactctgacggcgaaatcgactggaatttctggacctattttgacgatatcactacgatttatacccgctatcccgacagcacttcctctgacgatacactggcaaacggcaagacagccacgacaaagaatgtaacagccttgctggatgatctggagaacgattattctggaacaaaatggtcggatagcaagagctatacctccgatgaatttggaaagggcactggtccccaagggtttgcttataagctgagtgatgaggtgtttgggaatctggaggcccgcgaggtaaaggactttgatgacctgcaggtcggtgatctgattgaactctgggacgaagacgagtatggagtgatcgtcgagatcgatggtgacgatatctattacgcttatgtgaaaagtagtgaaaagatcagttggagcggatggatcgatgtagatgacttggacagtgatgatactgcctacacccgctaccccgactgatacgcgaacgacagatctgacctcacaggcgcgcggctcaaaaagccgcgcgcctgtttcatctccttcccgtccatcttcacgccccatctcaggggcgtccctccacacgggccaataggccgggcgagcctgggacctgcccctgcatggaagctgggaacaaatataccccgcatggcgcgcatgccctgatcccgatgtaggggcgggctggccccgccggccccaaaggtatcccgccctgtcaccagctttcctcaaaaaagaggtatattttttcccaaaaagctggtagaataaaccgaaaacatacacaaggagtgagcttatggtccatctttactgcggagagggcaagggtaagaccactgccgccatggggctggccctgcggatggcgggccggggaaagcgggtggtggtggcccagttcctaaagggggcggacagcggcgagcgttatgccctggccatgctgcctcaggtcaccctgctccccctgccggagcgggtgaaattctcctttcagctcaccccggaggagcgggaggcggagcaggcccgctatctggccttggcggagcaggcccggacactgggggcacagccggactgcggactgctggtgctggacgaggtctgtgctgcggtgaacaccggcctgctcccactggaagaggtgatctcctgcctggaccgtgcggcgggggaggtggtcctcaccgggcgggaccccgacccggccctggtgggacgggcggactacatcactgagatgggcaagctgcgccatccctttgacctggggacggcggcccggcctggggtggagtactgagggcaacatcgccataaatgtgaaaaaatcgtgaaaaactcccgccggacagttgcaatatttcgtgcaaataggtataatatttccgcgactgtcaaaggaggcctgtgggggcccccggagggcggcggcgacttgggcttgtttgagacatgccggtacgtccggtgccgccgtgtttcagacaagccccaggattgaagaaaggaatgaagtaaatggcaacaaagtatgtgtacctcttctctgagggcaacgccaacatgcgtgagctgctgggaggcaagggcgccaacctggccgagatgaccaatatcggcctgcccgtgccccagggcttcaccatcaccaccgaggcgtgcactcagtactatgaggacggccagaagatcaacgacgagatccaggcgcagatcatggagtatatcgtcaagatggaggagatcaccggcaagaagttcggcgatctggacaaccccctgctggtctctgtccgttccggcgcccgggcctccatgcccggcatgatggacaccatcctcaacctgggcctgaacgagcaggtggtggaggtcatggcccagaagtccaacaacccccgctgggcctgggactgctaccgccgctttatccagatgtactccgacgtggtcatggaggtgggcaagaagtactttgagcagctcatcgacaagatgaaggaggagcgcggcgtcacccaggacgtggagctcaccgctgatgacctgaaggagctggccggccagttcaaggccgagtacaaggccaagatcggcgtggacttccccaccgaccccaaggagcagctgatgggcgccatcaaggccgtgttccgctcctgggacaacccccgcgccaacgtctaccgccgggacaacgacatcccctactcctggggcaccgccgtcaacgtgcagtccatggctttcggcaacatgggtgacgactgcggcaccggcgtggctttcacccgcaaccccgccaccggcgagaagaagctgttcggtgagttcctgaccaacgcccagggcgaggacgtggtggccggtgtccggacccccatgcccatcgcggagatggccgagaagttccccgaggcctttgcccagttcgagggcgtctgcaagaccctggaggaccactatcgggatatgcaggacatggagttcaccgtggagcacggcaagctcttcatgctccagacccgcaacggcaagcgcacccccgccgccgccctgaagatcgcctgcgacctggtggacgagggcatgatcgacgagaagaaggccgtggccatgatcgagccccgctctctggacaccctgctccacccccagtttgacgccgaggtcctgaagaagactcctgtcatcggctctgctctggccgcctcccccggcgccgcctccggcaagatcgtcttcaccgctgaggacgccaaggagtgggccgcccggggcgagaaggtggtcctggtccgcctggagacctctcccgaggatatcgagggcatgaaggccgcccagggcatcctcactgtccgcggcggcatgacctctcacgccgccgtcgtggcccgcggcatgggcacctgctgcgtgtccggctgctccgccatcgttatggatgaggagaacaagcagttccagctcgccggcaagaccttccacgagggcgactggctgagcttggacggctctaccggcaagatctatgacggcgccatccccactgtggatgcctccatcggcggcgagttcggccgggtcatggcctggtgcgacaagtaccgccgcctccaggtccgcaccaacgccgacaccccccacgacgccgcccaggcccgcaagttcggcgcccagggcatcggcctgtgccgcaccgagcacatgttcttcgacgaggaccgcatccccgccatccgggagatgatctgctccgacaccgtggagcagcgcgagaaggctctggccaagctggagcccatgcagcagagcgacttcgagggcatctatgaggctatggagggctgccccgtcaccatccgcttcctggaccccccgctccacgagttcgtgcccaccgaggaggctgacatcgagaagctggccaacgacatgggcaagactgtcgctgacatcaaggctatcatcgccggcctgcacgagttcaaccccatgatgggccaccggggctgccgtctggccgtgacctaccccgagatcgccgccatgcagacccgcgccgtcatcaaggcagcgctgaatatccaggccaagcaccctgagtggaacatggtccccgagatcatgatccccctggtgggcgaggtcaaggagctggcctatgtgaagaaggtggtcaccgagaccgccgacgccatcatcgcttctgtcaagtccgacatgaagtataaggtgggcaccatgatcgagatcccccgtgccgctatcaccgctgacgagatcgccaagcaggccgacttcttctcctttggcaccaacgacctgactcagatgaccttcggcttcagccgtgacgacgcgggcaagttcctggatgcctactacgataggaagatctatgagaacgatccctttgccaagctggaccagaagggcgtgggccgtctgatcgagatggctgccaagctgggccgtaccgctaaccccgacctgcatctgggcatctgcggtgagcacggcggcgatccctcctctgtggagttctgccaccgtgtgggcctggactatgtttcctgctcccccttccgtgtacccatcgcccgtctggccgccgcgcaggctgccatcaaagagggctgatcccaagcaatcctctgtgaaaaaagcgccccgctcatatgagcggggcgctttttttagctcaaaggcgggagagagcacaaggagtgcctcagaacaggctgaggatcaggatggtgtaccgcttcaggtccagcatcccgcacccgagagcgatgtggtagttttctgatgcgccccatcccagctcgcacagcaatgtgctggatctgctgactatgtggagttggactcctcgaaaagtccgcgtccccaagggctgaaaagggacactgggaacgctttaagaacaaaaaagacgcgcagcgtttcaaccggaattacgcggtaagacgctgtacgttgtatccatattatctaaaactgcaaagggaattttgcaaaaaatgcagagaatagagcaaagaagagcggcacaaaaccactttgatcttgaaaaaaggttatgctgacatcagatgccagacctcggaaggagtaaggcccacgtatctcttaaaaacacagtaaaaatagtgagcagaagagtatccaagatctgtggccagatattccagttgaggcaattttttagagttagagaaatattccagcgcaacaaaaatgcgttttgtatgaagcaaatctaaaaaagtaacgtgaagattttgggagagaacacgggagagataagacgggttgattttaagggcggaggacaaatcgtgaagacaaattttctggtaatgctgttcaatttgccggatggcataggagcacagggcaggatttttccagcgatccaaggattcatgggttgattcgatcatatggcaggtatcctgaaccagtttttcacaatgatggagctgcgctttggtgtagtgatcattcatccagatcaagagatgagcggcttggcccaggtggaagatacgcgcccggtattgcttttttatataaagcaggatcaaatagcggaacaacatggatttgctgggaatgtccttcttcagaagcagatccagcccttttgagatctgttcttgaagcagggcggcatattgctgagaaaaaaacgggtctccctgataatggtccaatgcacgcagtatttcatcaatatcataaaaaaagttgtcattcatgttcttcctcgctgtgaggcggttcagactgagaagtgattgggtgcagactgaaggcgttttggacatggagagagatcaaccgggtaccttcttccttgtcacggttgcagattgcctggaaaatggcggcatgctcttcgcaggcaacatccatgcgatttggacgggaaatagcatattctcgaaaaacagaggtgtacgacagaaggcgatccatgatgtctaagagccagatattcccgcttgcacgggcaatttgggaatggaaacgagagttgtatttgtgaagatggtggaagtctttgcgctttgtataaaaactgatgagagcaatggtttcctccatatcgttgaggtcctctttgctggcatgatcaatgcagagcattagggcgagatggtggatgctgtccaaaacgatggctaaatcggtaatatctttttctgtcagagaacggatctttgcttttcgtccatggttgatttccaaaaggccatcattgcttagctgtagcatagcctcccgtataggggtccggctgatgtgaaggagtgcggagatctcggtctctgtgatctcactgggaaacatgttaagtaggatggcatctttgagggccgcatatgtagcgtccttcagtgtagaatactccttagaatatgactgaaatcgctctataaaacctgaatactgcgcttctggtttcataaaatccacctctttttgttaagatgccccagagcttggctatattgtatcagaagatatttctgtttacaagtattttttatgtaaaaaaatagacatattgtaaagaaagtaaaaagacggatgcttttttctgtgttatgatggccccatcagaaggaggggggccgagtatatgaacaaaactacgcagttgaaaaaactattgctgcagcgaaaagcattgccctgtcccggagtatatgatgcattaagcgcgcggatggtggaatactgcggatttcaagcatgtcagatttccgggtttggagtttcggcatcttcgttggggatgacagatgccagctttacctctttggaggaaatcgtccggatcacatccaatattgtgcgggcagtagatattcctgtcatgacggatgctgataccggctatgggaatgcagtcaatgtctggtggacgacaaaacggctggaggagaccggcgcagccggtatgaacttagaagatcaatgtttccctaaacgctgcggccatatggctgggaaacagcttatctctttggaagagatggtgggcaagataagagcggcagtagatgccaaaagagacccggattttgtgatcaatgcccgtactgatgcagcttacgtatgcggaattgaggaagcaatccgccgcggaaatgcatatttggaagctggcgctgacatggtttttgtagaatcccctgctagtgcagaagaagtaaagcgggctattgaacagatcaaggggccggtcagcatcaacatgctggaaggaggccgtacaccgatgttgacttttgaagagctgagacagcttggcgctgcaagggtcagctgccccatgtttacctcgctgatagctgcatatgcgttgcagaagggcttgagttatctgatggaacacgggaccagttccggcttcgaggaacacatgtcatttgaggcgttcaaagtatttacagatactccctctgtccgcgcgatggaagaaaggtacattccgaaagattgaatcaacaataaatgaatagaaggaaagaatatgcgtacttcagaacaatttcgaaatatgataaaggcatcaggggtcattcagatcccgggctgctatgactgtattacagccacgattgtggaaagagcaggatttccagccgcatatttgaccggatctggtatttccttgacgctctctggtattcctgatctcaatacgatcagttatctagaacttcggcaagtggtacaaaacatacgcagtgcgatccaaatccctatgctggtcgatattgatactggatttggtgcacctcttaacctctaccgacttaccaaagaatttgaacagctggatatcgcggcagtccagattgaggatcaaaaggttcccaaaaaatgcgggcatgagctggggagaagacttgttcgggacgaagaaatggtaaagcggattcgtaccatccatgagaaccggctggaaaacggtctcgttattgttgcccgcacagatgcccgtacagtcgtagggctggatgaggcgattcgccggggcagactgtatttggacgcaggtgcagatgtaatttttgtagagagcccagaaagctatgaagaggtcaaaaagattgcatccgagattaaaggccctgtgctcttcaacaacgtagagggagggcgcagcccattcctatccagacaggagctggaagaggcgggggtcaagatgacgatctatcccaatgcccagactagggtggtcgcaaaaaaatgcatggagcttctcaatacgcttcaacagaccgggacaacagcagggatggaaaatgagatgctttcccacagagaattgtggagcatgtttaacagcgagaagtgggtagcaatcgagaaaaagtatatgccggattaaacgatatgcccgaaagaaaacatcttattatagaaaagaaagcgcaatattgaggacagatgtcccgttcagacagcgtgctgataacacggtcaggttggataaggaggatatgaggtgtataaaacgatccagactacaacaggacaattttccattcaaaagctggaaaaggtactgatgcacgagcatatcgtattgggctatgcagggtggttttatgatccgcgctgtgcagaatttgaccatgcgaaggcagaggaaaagacgctggacaggctgaagcgcctgcgagactacggtgtaaatttggtggtggatccctgtccaatcgagctgggaagaaatccagtgtttatgcaggaaatgtcagtcaagagtggagtccaaatcatgtgttcgacagggtttgatttagaggcccgcggatatttgtcggcattccggaccgcgacggcggaagagattcgagatatctacctctatgagattgaaaatggaattggcccggagcggataaagccagggatcattaaagttgcgaccggatacggacagattacagattatgaggatcggtgcatccatgcggcctgtatggcgagtattcagtctgggcttccaattattacccatacagagaaggggacgatggggcccgaacaggctcgtgctttcaagcggtatggagttgcggctgaccggtgcttgatcggccactgctgtgcaaatccggatcttcggtaccagaaatctatattggatgaaggcgtatatgtcggatttgaccgctttggaaacgagtggcacggcgatgattacttccgaatggctacattgactgcgttaattcatatgggatattcagatcacctttttattggcacggactctgtggcgtttttgttaaaagaacttccgggaaatcggaactttgaacattgggacccggtgcgcttatttgacactattatccctgagcttgaaaaacggggagcaacaaaacaggatattcggaatctcgtaactgaaaacgcaaaacggttttttaccgggaatacctctctaggcccacaaaagcaaagcaaacaataaaatgaggaggaaagacaaatgaaaaagcaattcacattcattcttgcccttgcaatgctgatgattatgttggcgggctgtagtgggaatacgtcgccagggacttctggagtgagctccaccggaacatcggcagttacagatgacagcaatccgttggggctggatgaaaagatcaccatcagctattctcatgtgcagtctacgtcgtctccaactcatcttgcgatggaggactttggaaaatacctggagcagcagtccaacggctgggttaccttagaaatcttcccggctggacaactgtataatgacgccactgagatcgatgcagtggtgggcggaaatattgatatggtatctacctatatgagcaaactgaccagtgtggatactgacacacagtattgtttggctccttatctgttcaatgatgtgtatgagatggaatcgttctatacttctgagtatgcacagcccctctatgaaaaaatcaatgcattgggactgaaagtagtcgatgtgatgttcggaggggaacagtactttatgagcaatggggattccatccgaaatattgatggattccaggggaaaaaggtgcgggaaggcggtggagcgatgacacaggcgctctatgatgcgctgggtgcctcggtgactacggtctcctttaatgagctttacacggctatgcagacaaaattggtggatattgcagtgacctctattgactccgctgtaaatatccagctacaggaagtgctcgagagcgtttctgcttacaagatccaatacgctccgtacctcattatgttcaatcaagctgtctgggactcctatcctgaggcgttgcagaatgtaatcgaggaaggactggaaatggcaagggagaagcagctggaatacacagacgagacctgtgctgccgccattgaactggttaagagcagctgtgatttttacgaagcgtctgatgaggagatcgcagaactgaaggcattgtggcagccgatcgtggaagagtatgtctccagcaaatggattgatgccattgccgaatttagggaagcaaaccaataaaatggattggatatctgccgggagaatgtgggcctcccggcagatatctccaaaaaatacggagggcgtgaagttatgtggaagagatttcttgctgtctacgaaaaaatagaggatatcattgccgggattggacttgtctgtggtgtagggattatgtttgtcggcgttgtggctcgctatatcttccatcatcccctgacatttgtggatgaaataggcccgatttttatcgtttggagtaccctgatcggatattccatcgcattacggaaagatgagcacataaagatggatatcctgtatgccgcgattcggaatgaaacatggaaacgcgggatagagttttttggttatctctgtggggctgttttctctttctttatgatgcgatacggatatcttgccatgatgatgcagtatgagatgggccgtgtgacgcagattttggaattccccgtttggatttcctatctgattattccattcagcggcgcggtcctaatcgtacggtatatcggattgatgattgctctgttcagaaacaaagcaactgacgatgttgtggaacagagaggcgaaagttcgggggaataaaagatggaaaatgtatggattcttctggcgatatttgtagtactcatgatgatgcatgttcccattgctgttgccatgggtttgtccagtctgatcggatttatgatgatcggctacaatcttacaacagttggttcacttctatatactgcggtagccagtacctctatgatcaccataccagggtatatttttgcgggggcgattatggcgaaaggcgggatttcgagacatctgctgaatgctctgaatgcttggattggacatgttccggggggcgtggccattgcgaccgttcttgcctgtgccatgtttgcagcgatcacaggctctgcttccgcaaccatcgcagcggtcggcgggctgatgatccctgcaatgatagactccaattatcagaagtcgttttctatggggctggtagccagtgcgggatctttgggaatcctgatccccccaagcatcccaatgattctctatacgacgatagcaggagtatcggtatcaaaattgttcgctgctggcatgcttcccgggctgatcgtggtaggtgtgttctcaatctatattgttatctttagtattattcataagcagagaggcggagaaacagagcataccgaccgctggaaaaagacgctgaaagctttgccggcgatccttctaccggttgccattttaggttccatttattccggaattatgacggctacagaggcatctgcgtttgcttgtgtctatgcggttttggtatccacgctgatttaccgggaatatacatggggacagttcattgagacgatcaaggaggctacgaaatcgaccgctacaattttgtggatcgttactgcgtgttcgatgttctccatgtttttgactgccacaagagtgccgcatcagatactggagattgtagcggcctccaacttctcggcgatccaaatggtagtcatatgcgccctaatcttgatttttcttggctgctttatggatggcgtctccattatgctgattgcagctccgctgatggttccggttgtgggcgggctcgggtatgatttgatccagttcggaattgttatgaccataggaatccaggtcggacagttgacgcctcccgtagggatcaatctgtttcaggtggcaggaatgcagaaggaatctgttgcgtccgtgatccggggagctgtcccgttccttctgctgctgatggcggtatgggtgctggtcattttctgtcctgggctcacggcagtagctacgactctattcacataagaggagaaaggagtatcactttgatcacggtatatgctccgctggggatgttagggtatggatttccgatgcgttctttaaaagcggcgctggaacatggattcgatgtcattgcgctggatgcggggtcggtagacccggggccttattatctggggacggggaaaagctttacatcgcggacgatggtcaaacgggatctgaaactgatcgtcgaggcaggacaaacggcacatgttccgattttgattgggacggcgtgcggttcgggagccacacctcatctggattgggccatgcggatactggatgaaatcgtagaggagctggatatccaccctaaggtagcgcggatcgacgcagagctggacaagcaggaagtcattcaggcgtttcgcaacgggaaaatagaaaatttcgaaacaagagatcgactttcggaacaagatattgacgactgcattcatatcgtagcccagatggggatacaaccttatatgaaagcgctggaagggggagcggacattattgtaggcggacgagcctatgacgcagctgtaattgcggcctatcccatttggaagggcgaggaccccggcctgagctaccatatggggaagatcatcgagtgcggcacagcggtggcactgcctcgggaatcagatggtatgctgggggtcatcgatggagattcgtttatcgtgacgcctgctgatcccgaaaagatttgcaagcccgatacggtagcagcccatacactttatgaaagaagcacgcccattaccaccgagtttccagggggaggcctggatatgagccaaagcagctttataggtgaaaatggagggcgaagtgttcggataagagggacaaaatttgtggaacccgctcggctcacgctgaagctggaaggtgtgcggcggactggatatcgaacaatctgccttgcggggattcgggacccttttgtgatcgagcatctttctgaggtggaggaaaaggtacgggccaaaataaaacgggacctgccgcaatttgaggcggaaaaagcgtacaagattctgttccggcattatggggcaggggagattatgaaggaacgcgacccagagacttggacgccgaaggagatcggattggtgattgaggtgctctctcaggaacaggaaactgccgacactgtctgcgcacttgcccgatcagccattctgcatatgggatttgtgggccgccgagcaaacagcggaaacctggcatttttgtacacaccggccgaatttcccgctccgccatgttacgagttcgccctctaccatttgatggtggtagaggatctggtaaaaccatttccgatcacttggattcagaaataggtgaggagatatcatgaagctattcaatgccgatgcaattgtccgcagcaaggatgcgggccctttccgatttacattggatgtcattttcaatgatcggaatcaatttgaggcaatgaaagattccggaatatggaatagagagtatctttgtaaactgtgccgtatcccagactcagaggtcgatgagtgcctgtgctacgaaccggccatggccttcaaatttacctatcagcggcctgtgtcttcgggcgcttttggagataatgatatctacggatctcaacagcatgttcccctgtatgagatcgaattttaagcagggaggagtgcttgtcatgtatatgaaggagcctgaaaaatgttacagatataatgatgcggaagatgctgatttcacaaaaattgttgacccaaaacatactgcgctgctgatgatagacatgcaaaatgatttttgttccccaaaaggaaaatttgcacaggcggggcgggctgcagacagcatcattgaaattgttccagcttgcaggaagcttctggaagccgccagacaggccaatgtattcgtcgttcacattcagcaaagtacgctgccgggggagcagagtgataacggaggctggatagcatttaagacgagagatgggaaagcgcccacctatgcaacggtaaatacatggggatggcagcatattgaggaactggcgccctattgtgacggagaaaatggcagctgctatgaaccaattatcacaaaatatcggccagatgcatttttgaatacaagtctcgatttgattttgcgggccaatcatataaagagcgtagtgtgttgcggctgtaccacagagggctgcgttttggccaccgtcatgggggctgcgttccataactactatacctgcgtcgcggaggatgcggtagccacatctgtggatggggctcatgagcgggcaatttggttgatgaaaaaacgctatctggttcggaccgttgaaaaaatcttgagctgctggcaggcgtgacagaagaccagctggatgccccaggaagtaagagcatttcttgaaaaatgcttgttgaaaattgaagcggtgcagcttttgctgcgccgcttcggcttatgtggatcacttagcacaaaaggggctaagtatagcgtttggaggaacagagagaaatgcccaagttatccagctataccttcacaaaagcgcatcaggatcacgggcatctggacgctggtggtggaactggcaggcgtcaagaaagtgatgctggtgccattgatcagagctttggcatcggtccattgcgaagaggggagggcgtggtgcaactggatagatccgtgctggacgagtatcataccccttgttatgggggcagcgcaaggccagctgcgcacaaatgagcgggctgtagggagccaaatgggcattatccactcagagaccacgccatttgccgccgcacagtttactgcggaggcaaaccaatctgctggagctgcatccgcaaatttaacagaagaggataaagtaggacagccctccaaagcgtaagtgctttgaactgcctgagcccaggtgaagaccgcgtccggagcaagcaagtcagaggaaacaccggtcattagactattttctgctgtctagatcacagtgtcatagtaccaagctgtccgggctgcatcggcagaaacgggccaaatggttccagcactggctcgtgagtactcagttggatgtctccttcctggctgaagatggcgttggggaacagcggtactcgggcgaagcggccactgatctgcggtctgatcccttccgcgtccaaagttctcagctcagtgtgtgataggacgcttctataattttcactgcgttttcaattcccggttttccgctgtcgatgcagaggtaataattttctgcgactccaaatgcctgaccggtatcatgcttcaggtaaggggcgcagtttttatctgcggaatccagcagcttttccgcctgtgccgcagggacaccgtagccctcctccacccgcttcagtcggatgttcggggctgtgcaaatgaagagattcagcagatcttcgtatccctccaaaacacggttcgcgccccggcccacgatggtgtacgagccctccagctcttggatcgtccagacctgagccggatagatttggtcatccaatggcataacccagctcccggcgcttgtttgatacagagtggagagaagccaatccttccggttctccgcccgttcaaagagatccggggggatgccgaaaaaggaatgttgagcctatccactgattccgcaccgatttgtcggacaccgctcccaaattgacggctgattgtgatgatagaggggctcacagctcgtccgctcctttcggcgtgccgcgcatacttgccgatgagatccgtttcatagatccgatcgaaagcatacagactaagatagtcaaaatgtcggctgctggttgggaaaagtagatccctgtgaccccaaacaattttggcagggtcaaaataaagggcacatagaatagtccctgacgaatcgtagacaggaacaggccatatccggaggctccgatggtctgataagtaatggtcatcatgtagcacagtccaaaagcgggatagagcgccacttgggagaccagcagccatctgccgtagtccacgatgaccgggttttgattgaacagcagaatcagcggccgggacagcaggatatagaccaccgccaccagcacggttagcagcaaagaggcttttagggcgaaacgaaccgactgatgaaaccgatcctcgtctctggcgccaaaagcaaaggaggccactggctgatagccttgcatgaagcccatgaccacatagcagccgatgaggaccagccgttggaccacaccgtaggcggcaatgatgttgtccgcgtccggcagagggactgcggcgatgttggtgagggaggaggccaccgacaggcagatttggatgacagctgtggggatgccgatgacggtgacggtcttgatgagtttccaactggggtggaaggagcgcaggcgcagcttgatgacggagcgcccactgagatagaaccaggccaggataaagaaggtgacgaactgagagatggtggtggccagggaggccccctccacccccatgcccaggccccagtcaaacatgaatacagggtccagcaccacattcaaaagggccccggtgatgacggcgatggaagagatcttcacggaggactctgcccgtgccgcgcagttcatgctctgggcaggcagattggccagggccgccacaaacatccagaaggcgtagtccttggccagagggagggaggcgtcagaggcgccgaacacccgcatcagcggctcgataaatgcaatgccgcccacgcacagcaccacgccgatgacgatggacaggccgatgatggtggtgacagtgcggctggcaccctcctcgtccttagcccccagatgccgccccgccagtacagcggctccggcggcgaagatgttttcgatggacaccataatgagaagcagcggcacggtgacgcccaccgctgtcaaagcaatatcagaatccagcatcccgatgtaggcagtgtccacgatgttgtagactgccttcgccagcaaggccagtgtagcgggaagggcgagcttgatgatggctttcgggggatttatatctcccaaaatagaagttgaattttgtttagtagccatatctatcccccctttcggtgacgccgtagagcaggacagtcaacagccggcggcactgggcatcccgaagagcaaagcacttcctggcaggcatggaagatgcttgcgcctgcgcattgataaagtcctgaaactgccggaataggtccaccacttcctccatggtaatgtccgtacgcagcggaagctggcgcagtaggtgcttcaaagtggatatggtcaaggcgtcaaacgccttccgacgtgcttggatctgttcgaacagccgggcgggaggagagatgactgcttcgcagaagatgggttgatagaccggattctcctgaaaaaaggtcatgcgggcagtaaaataccgccccagctggtcctccacagagccgtcgtcctcctccggcagagcagcgctgagatgggcggtgaggcgctgaaagcactcctccacacaggccagatataattcgtccttgttctcaaaatagtggtagatgatccctttggaaattccttgggcggcacagatggtgtttaccgaactgccgccgtgacccttttccgcaaattccgccagtgcgctgtccataatcctacgctgggtctgttgatttttttcttcccgtttcataggtttgcctccgaaataattgaccacaaggtctatttttgaattatagcataaatagaccttgtggtcaatattgtgcatgtaaacttttgtgtgagactggtagatgaaccgacgtaaagatagcttgcgttttgaaagaagaaacatgaaaaggaccctgcatccacagttacggatgtaggggaagggaatatctatgccgcattggccggtggcattcagttttctgatcagtaaatttttgcattgatgcagatgatgctttagctgccgcgattttctttgatgatagacttcgatatttttctttccttataacagagtccctctgatacaggaaagcaccctgcatcagagggatattttgttacgatctaggtttactggaccggttcggtggatacggatagtcctttcaaatcaaagattgtacagcaattatgcatttgcgttagatatgctgcgccggatctgaagtaacaagagaaccaagcttactcccagaaggatgtgtccgatgccagccataccggagatagcagcgtccatgccggaagaaagagcggttcctagtacctgagtcactccacgcaccatgagcatcacagcggtcaaattcagacctgcatgataaaccaccaggatccgatctgtcttcggactggtgaaagaaaaattcttttccagaagaaggagcagcaagagaacgatcataccgagtatgaaataatgcgtatgtaccacctccagagtggttttcttaacaaatccatggatcttggtaaattcccgataaaataccccgccgaccagtgagaggacggcatatagcagagcctcattcaaatagcgtttcatttgtattcctcctgatttgaattttcagttttattttgaactgcagcagaaaaaacggtgcccttacaaagttctggccgaacaataacccagcaagaagcagggacgcccctagtccggaataaaaagactgcgatgaaacgctctgatgccagaccgcttgcctgtaggccaatgccgccggtcatcatcacagcttcgagttctctgcggtttgtttgatttgaagcgatgaaaatttggtgactccctgccggtaaggataaagtcaaaactgcatctagattaatatcttgaaacagactcaaaagaagggccgtctctttgctcgaaccaggaaaattacttcatttatatatgaactgtaacatatttgtgaattgattgtaaaaatgcttggacaccaattgacagaacattgttttcgcaatatgctactacacagatagtttaataataaactgtctgcaataaaaatgaggagactatttcactatggaagcgtatgatcgatcctcgcaagatgtatgcagtgaattgaaaacggaaccacgatcggggttgacctccacccatgctgaggagatattgacccaagtaggggagaaccgcttgaaggcaaagagaaagcaaaccgttgttgaacgattcttcagccagttcaaagatgccatgattctcatcctgctggctgcagcggctatctccttctatgtagcattgcagggcagcgatccaacggagttttttgagccggctctgatcctgctcattgtcattttgaatgccatcatgggtacggttcaggagagcaaggcagaaagatcactggaagcacttcaaaatatgtctgctccccatgcgcgagtgcgtcgtgatggacaggaatccatcattgatgccagcaaactggtgcccggggatatcgttttgatcgaagcgggcgattacattcccgcagatgggcgcctgatctcggctttcaatctgaaggtggaggagtctgctcttactggtgaatccgttccggttgagaaggacgctcaggctgtggtggcctccagtgcgcctctgggagaccggctgaacatggtctactccggatgcagcgtgacctacggccatggtgaagcagttgtgacagctactggcatgaacaccgagatgggccatattgccgggatcctgaacaacgagaaacagactcagacacctctgcagaaaaagctggcccagcttgggcggatgctgggtgttctggcgatcatcatctgcgcagtgatttttgcgatcggtctggccagtggcatggagctgatggagatcttcatggtatcgatctctctggcggtttctgccatcccagagggccttcccgctatcgttaccatcgtgctgtccatcggtgttacccggctggccaagcgcaatgccatcattcgaaaactccccgctgtagagacactgggcggtgcttcggtgatctgctcagataaaacaggtactctgacccaaaaccgtatgaccctcattcagggctactgtgtccaaggtgatctcagagaagatatctcttccgccaacacgcctgagatccagactctgctcaaacttgggaccctgtgttgtgacggcatagtcaccattcaagatgggaaagaagtggatatcggcgacccaacggaaacctgtatcgttgctgccgctctgaaaaatggcttttgtaaagacgacttgaacaaggcgtgcccccgtgtagctgaggtccccttcgattccgaccgtaagctcatgagtgtggtctgtcggattagtggcaaattagttgtcattaccaagggcggtttcgacaccctagcctcacgctgcactgacggcttgacggagaaggccgccaacgtggtagaggagatgagtcggcaggctctacgtgtgttggcggtggcctgtaaggtcattgatgaggtgccggaagaagtcacttcggaaactttggagcacgatctgacactgatcggactggtcggcatgatcgatccgcctcgtgaagaggccaagcaggcggtggctgtttgccgtcaggcaggtatcaagccgataatgatcactggagatcatgtgctcactgcgtccgctattgcccagcagctcggcatcatggagcctggtgaccgggctgtgactggaagtgagctggccaagctgagcgaggaagagctggatcagcagattgaagatatcgcagtttatgcccgtgtgtctccagaggataaaataaggatcgtcaagggctggcaacgcagagacgcgatcgtagccatgacgggtgacggtgtcaatgatgcccccgctttgaaggcagcagatattggctgcgcgatggggatcactggtactgatgttgccaagggcgcctctgatatgacgctgatggacgataactttgccactatcgtttctgctgttcgagagggtcgaggtatttatgacaatattaaaaaggcggtcgcgttccttctgggtaccaatattggcgaggtgctggtcacttttattgccatgctgctttggaatcaggcccccttcctgtccatgcagctgctgtggatcaatctagtcactgactctctgcctgctattgccctgggaatggaggccatcgaccccaatgtgatggaccgtcagccaaagcccaaaaaggaagggattttcgccaacgggcttggaattcaagttgttttgcagggtgtcatgtttgcgatcctgtcactgatcggattccgtgttggcagtcaggtcaccggtgccattgaaggtggccgaaccatggctttccttgtgctggcctttgcgcagatcctgcatgcgtacaatatgcgctcccataaatcgctgtttaagaccggactatttactaacaaatatctgaatctagccagccttgtttccactgctttgatgtgcttggtgctttttgttcctccgatcgcctccgtgtttggcctcatccgtcttcctatgaagctgtatatgctgggctttgggctggcggtcgttcccgtggtcgtactggagatcgtcaaggcgtttgggctggtgaaacatcataagtgagttgatattcgatgaagaacgtcgtaggaacattccataaaatacagaaggcgtattatcaatactgctatcaggcggtagaaccagacgggatcaaaatgagtgagatggcttgtatattgtctctctacaacagtgcgcctaaagatactgcacgggatatcattgagtactcctgcctctctcccggcatggtaagcaggagcttagagtcacttcgtaagtctggtttggttgaaggatatcgtgaccaagaggatagccgatatatccatctgcgtctgctgccgagagcggccccgattttggacaagctcacacaggctcaaaccaaattcattacttgtattgcggaaggcatttcaaaagaggattttgcgcaggtctgccaaattgcagagaagatggctgaaaatctggatgcgaatccgaaactcaaagagcccctcacttaaaaacaagaggagtgcatggagagtaactccttgcactcctcttatatgtataaaacaaaaccaaaagcagatatcttggcatctaaatatcgggcgacagaggaggtttcacaatgcaagtgtggttcagcaaatttattagagggcgtgtgttctctgtcctcttttgtatattaggttttgggctgacgatttatctgtccagccgattgggcatactgattgagggatttgccggccttgacctccaactggcaatttttttgatactgacagtgttttgcacctatatgctcatctatgtgaatatccacagagagaacaagaaaacacagaagttattcaacctatgtggaatcatattttctttttttccaagcacagtgatctgttttttcttgttcgacctgataagatccctttgcggagcctacgatgggcggctatacctcattccactgctgttggctgctgttgtgtctgcctatggatttgtccatgccagaaagatctttgtgaaaaagtattcgatacccattgctgccagcagcaagcaccaaagatctgaggtaaaggcagtactgctcagcgatatccataccgggagctatgtggatcggaaacaactccacaaaatagttgatgcagtcaatcggttgcagccagaccttgtcatcatggccggtgacacctttgatcaagatgccttcgggcattgtgatatggatggtgtcaaagcagaactacagaggctccagccagagggaaacgtctacgctgtgctggggaatcatgatccggattcgagccataaagaggtcaaggaatatttcgaggaggctggaatacatctgctgattgatgaatgtgcagaaacagaggacttcttgatcgtcggtcgggatgatatcttgggaaatcctgcccgcaagggcatttctgaactgttcgccggtgtggatacggagaagccgaagatcgtaattgaccacaaccctttaggcatcgaagatgccgtcaaagcgggggccgctttgatcctttgtgggcatacccataaaggacagtttttccccgccacactgtttaccaagtgggcatacggcagacgcggattctatgggcactttcagactggagagacccatagcgttgtttcatctgggaccggttattttcagctgccagtccgtttggggacgaacagcgaagtcgttgttttacatattaaacttcaagcatgatgaagggggcgggatagggggcggcgcgggtcacctttcataggtatccaccggggcttgaacatctgttccctgggccggtcacagcagcggcgcagcggcttttgcaataaagcccagcagccggcgcttgagtggctctgctgggagcagatccagcgtgacttccctgcatttaccctgtgtcttttcaaaatcgtcttggatctgggggatacagtccgttccccacagataggtcgcgcattcaaagtgatgatagaggctgcggtagtccagattaatggtgccgacaacagcctcccggtcgtcacaaacaaagaccttggcatgtacgaagccgggggtgtattcgtagatcttcaccccggattccagcagggatctgtaatgggtcagcgcaagggcaaaggggatgtacttatctggaacaccaggcaggatgatccgcacatcaacaccgcgctcggcggcatacttgagcgcattttccagctcaccgtccaaaatcagatatggcgtcatgatatggacatacttctgggcccggttcagcatatccatgtagacctgctcgcccaccttgtccttgtccaaggggcagtctccgtaaggcatgacaaaaccgtttgcagcctgctgctttgccggtacattcagaaatgtgtcaaaatccggtgccttttcatccaagtaccacatgtgcaggaacatcctggtgaagctgcgggctgcttcgccctttaccatcacggcggtgtccttccagtgaccgtacttttcataggcgttgatgtattcatccgccagattgatgccgccgttgaaggcggtctccccgtcgatcaccaggatcttccggtgatcgcggtagttataatgggtggagacaaagggcttgatgggggcaaacattttgctttgaatgccaagagatcgaagccgcctggggtagtcatggggcagggtagacagctcacaggtgccgtcgtagagcatacggacctccacgccctctttggccttccgcgccaggatctccaggatcttgccccacatttccccctcatccacgatgaagtactccaggaagatgaaccgctttgcctgctccagctggatcagcatctcccggaacttgtcctcgcctagtgggaaataggtgacggcagtatggtcatagaccggatagcatccactgcgctgaacatagcgggcaagcgccgcggctccggggtcggactgccccagggcctgagctgtctccggggactggacaagggtttccgcagtttccgtattcaattccgcatagcgctttttcagagcccggtggccaatgtttttctgggtgtaaagaaacagcagggcgccgaacaccggcaggagcatgaccaccaccagccacgtgatcttggcggtggggtccatagcgctgttgagcagatacagtaccataaaaaacgtgaagattacaacgccgccgtaaatgtggggcaggaaggcctcgaaccagtgaaagatgctgaacaggaacagcacctgcatggccagcaggacgaggatcaatccagagcggctgaagatcacccggaaaatcccccgcttgcccttttccaaaaggtgtatccctgcttttttggaattctctttcataataagccctctcttttggaaattacaaaaatttccgcaaaccttatgcaacagcagttcttgacttttattatatcattgaaatctcctatttgaaatggaagtcaccaaaagttaacaaatgcgcttgcggggtgtacaaaattttatattggataggtgggaaaaatacgctttagtaaacggggacaaagataagaaaacgattttgtttcagaagtttaaacatgtctgtcggttcattttggaggccggtcattctgggctttatttcataggggaaattattgaaacctacattgtataggtgtttttgaagaaggggtggctctttgctttgtgttacgagctataataaaggagcaccaatttggataggcaagtgtacagaatgaaggccagttctggatattctaacttcggcagtccaaaagtgaaaaagataccgccggctatcagcaagacagccagcggtatcttttatcagatctctgtgctggccttcatggccttgaagccgatcaggaccgtccagacataggcgcaggtcttggggatcatcagcataccaatcatagggacgacgtctgcccagaggaccacgggaatgtagaaaccgaaactgagcacaatggtcagccacatattacggaacgcgcggtcctttgcttgccgggcgctcctgtagaacaagacgatgatcagcaggcccaaaagcgcaaagggaatgttccggtaaatgccccaggaaagcggcgcattggcgctcagccatgcattctgagggaagaagcagagggcgatccgcagggcagacagcagatacacggcggcggtaatgccgttttgaccattgaccttgtaccggacccgccacacatagtagaggatgatgtaaaagatcgtcatggtaatggaggtgatgaatttgcctatgcccagggggacgataaagttttccagaccagtggtgcagagagccagagcccgggggaccagatggaaggcgtcgccggcgccaaggacgacggccatgatgccgaacagccagtactctttgtttcccctgctctttacgatcatggtgacgccaatggcgatcacggaagtcagatagactgcatcaaacagtgtttcaacaatagcttgcatgaagaggcctcgctttcctacttgatatgaactttgttcattttgctggataaagaattcccgcatgaacgggaattctttaacggtaaaggatccgttccaccatcctgacaatgccggcacagtcatagtcgtgccgcagcaaagaggagatgatcagagagaagatgatctcaacaaatttttgaggagtaaagacgtcgtcaaaaaccgccggatctacatttttatcccgcatcaggaccatgtggaagccctcctgaatgtgtttccacgattttgccatcagctcctgcccactggacttatcttcaccgacaaagctcatggagtgcatggagaagaaaccgggatatatttcattcccacgccgcatacgttcataggcccattcaatgcagtctggaaaccgtttgaaggaggtctggccatcagggatgtggaagatatcgcaccagacgcgttccaccgttgcggcgatcaggtcagatttgctgtcaaaataattatagacggagccgacggagatattgcaggcctgcgccacgctgcggatgttgacggccgcccagccgttctcctggatcagcttacggctggtctccaagatggcctctttggaagtgatgaccgtgttcacgttttcacgccccattctgaacgatgttcactatagcatcccacccttgatttgtcaagacttttttgtgtcaggtctctaccctgtcaatggtcgaaatggacggcaaaagcagccgttgacgggggccgcaggctgtgctttgtctgttatcaaggtgggacagccgcaggctggctgtcccaccgctgagatattagtttgattttttatcagcccgataagctgggattacaggtccattaacatttgcgcaaaatgttcaatatgttcagagagatcctgttctccatagtaatcggcaaacaggacggtatctccgcgacgcagcacgaggatgccgccgggcagaaaaacacgcggttccccggttatctcattgacatgagttcgcccttcgcgtttggcgtacaagcattcatcgagaacatcaaactgctgatagtcaccggagttgttaaatttctgcctgctccattcctctgcccgcatttcggcgagtatatccaatgggtaacgagtgatgatgacctccagatgaggtacgtcatttgggctgtcatcctcgttgaatgcaccatactgatgaaaataccaagattccgggtcgagtagcgttccaccatgagagatatagtccatgctgtaaaacacatcccgggagagcggcagatcttctccctcaatgtccgtcagagtgatgaagccggaacctgctagatcataggggcggtaatctgttcccgcaaacaactgtatggtattgataaagaccggaagcaaaaacgcgaatcctatcgccaacaaccagccgactctttcgtgtctctttggaactgtcccgcttttaatcgcctttcggtagcacagtaaatggaaaagccccaacaagtacgataagtcaatcagcaacaacccaaacgctgtcagtaggaacgggagcacaggtcggttggaaaaggtctcaacgggataatatctgagccatgtccaatcaatttcccatggggagccgttttgataaaggctgagcaaaagcacatttccgaaggcaagcagtacacctccaatcactttctctttgaaaaagcgctttaacgcataatcctgtgtttccgagtctgtatgtgcctgcgccgtcaagtcgtcagaggcaaagacatagaaacttccgcggaagatcccccagtagtgccagcctgcatcttcgtaaagcgcatttagctctggatcatcatttactgctccgcgaatcggctctaaatggatttgtaccgtttgttgcgctgtcttttcaaaaatggtgaggggaccagtggtcatggaaaagcgcagtcctttcccagccataacagcgaaccagttttctaaccctggaatatcaaaaccgccaactggtgttatacggatcacagtcttgctcataaaaattcctcctctccatcaaggacacaggcttttaggcgtgccagctcgtccttaaatactgctctgcctctctcagtcagccgatagctgcgtttgcggccatcggtttgtgtttcttcgatcaggtgctcatcttgaaatttgcctaacaatgtataaagcgtaccgggaccaagacgcacccgtccattggtcttctgttctacaaattctgtgatctcaataccacacatttcacggtgcaggaaagacatcagcacatagaacattgactctgtcagtacccctctatctttcatatcgatcatggcacctctttctgcaatatcgtctcacgatattgccttttcctattctaacatcgcggcgcgatattgtcaagcagctcctcttgtatatgtggatatggagttgtgaaatttaatgtctttaagatttagcagaacaaaagaaaaagccgacacctacaaaactgtaagtgtcggctttggttcaccctgttatgcgcttttatttttgcgtttgtggagtaagcttggcataagggctgcactcctgtgttgcaaaagttcagcgttttcaagaggtcgaggcatgtcttagtacatgccgcccatgtcgggagcggcgggggctgcaggtgcgggaggctgaggcttatcggccaccagggattcggtggtcaggagagtagaggcaatagaggcggcgttctccagagcggagcgggtcaccttggtggggtcaacaatgccagtggggatcatgtcgcagtagacctcgttgtaggcgtcgaaaccgtagcccaccttgccggactcgcggatcttctccagcaccacagagccatcaatgccggcgttggcagcgatctgcttcacgggggcggtcagtgcgcgggccacgatctgcagaccggtcttttcgtcgccctcagtctcagcgtaaagcttctccacggcggggatggcgttcagataggcggtgccgccgccggccacgatgccttcctccacagcagcgcgggtagcgttcagggcgtcctcgatgcgcagcttcttctccttcatctccacctcggtggcagcgcccaccttgataacggctacgccgccagccagcttggccagacgctcctggagcttctccttgtcgtagtcggaggtggtgacttcgatctggctcttgatctggccgatgcgggccttgatctcttcggaactgccggcgccgttgacgatggtggtgttctccttggtgaccttcacctggcgggcctgacccaactgatccagagtggcctccttcagctccaggcccacgtcggaggagatcacagtgccgccggtgaggatggcgatatcctggagcatctccttgcggcggtcgccgaagccgggggccttgacgcacaccacgttcagggtgccgcgcaggcggttgacgatcagggtggacagggcgtcgccctccacatcctcagcgatgatcagcagcttcttgccggactggaccacctgctccagaacgggcagcaactcctggatattggagatcttcttgtcggtgatgaggatgagggcgtcgtccaggttggcctccatcttctcagtgtcggtgaccatgtagggggtgacatagccgcggtcgaactgcatgccctccactacctcggagtaggtctcggcggttttggactcctcgatggtgatgacgccgtcgtggcccaccttctccatggcctcggcaatcaactggccgatggcctcgtcgccggaggagacagcgcccacgcgggcgatgtcagcggagccgttgaccttctggctgttgaccttcatggcctcgatggcggcggcagtggccttggcgatgcccttcttcatgaccatggggttggcgccggcggccaggttcttcaggccctccttcacgatagcctgggccagcagggtagcagtggtggtgccgtcaccggccacgtcattggtcttggtggagacctccttcaccagctgggcgcccatgttctcaaaggggtcctccagctcgatctccttggcgatggtcacgccgtcgttggtgatgaggggggcgccgaacttcttgtccagcaccacgttgcggcctttggggcccagagtgatcttgacggtgtcagccagctggtccacgcccttttccagagccttgcgggcttcctcgccgtagcaaatgattttagccataacacattacctccaatttagagaagacttagtttgaatcagaaattaggagttagaacttaggaattgcggcggtccggctttaccgtagccattgggatcgactgccgcctcaggcaattcatcgatccgacgtttctcattcctagttgccgtcgctgaatttcactctacaatggccaggatatcgttctgacggacgatggtcacctcttcgccgtcgatctttacctgggtgccggaatacttgctggtgatgaccttgtctcccaccttcacggtcatagtgacctccttgccgtccaccatgccgccggggcccacagccaggacctcggccacctcgggcttctccttggcggcgccggtgaggatgatgccgcccttggtggtctcctcggcctccaccatcttcagaatgacgcggtcagctaagggcttgagtttcataacaggttcctccttatatgatattggtattaaacgagttggggagagtgcgccgacactgtgaccgacaggactctcggaatgttagcactcaataaaactgagtgccaaccacgagtatgataataaacgttttaaaacaaaaaatcaacccccaatttcaaaaaattgcgggcaatttcgtaaaagtttaccgtccgttcacaaagtggagaaaagagtgctaaaattcgggggaataatcggcacccgcagggaagaaaaagttgattttcaagggggagaggcggacggtgaagcgggtcccgcgcatgacctcgccgtccaccaccacggtgatctcccggggggaggaaaaggagagggactggccgtgccagtcggtgataagttgggggtactgccggtagagcccctgggcgtacttgcccaccaggcggaagaaagtgaggcggctgatctcccccacggccaggacatccagcacaccgtcgtccggcatggcgtccggcacgggcatgaagccgccgccgtagtgcctgccgttgcagatgcacaggatggcggtctgccgctcctgccagtccaggccttcggcacggatggtcaggggacggcagaggccccggaagatgacctgctccgtcagggatagaagataggcgccgataccggagacaaagcgcaggtccttatatcggtgcacccccgcggcgatgcgggcgtccacgccggcacacaccacgtccaggcccagcttgccgttgcagtccatcaggtcaaaggcacgctgggggccggcggccagggcctccaggtcgtagaacagctcccggaagcgggggccgaacagcttgagaaagtcgttgcccgtccccttgggcacgcaggtgaccgcggcgttgtcaaagcccgccgccccgttgaccacctcgttgagggtgccgtccccgccgcaggcgtagatgcgcaccggcccccccgtccggaccgccgtcgccgccagccgttgggcgtccccggcctcccgggtataggccacctcgtggggaaaggacagccgggacagcagggtctccagccgggcggtgctctccggcctgcccgccgccgggttgatgatgaacaggtgcctcataaatacctccgatgggtcagggcagctccccatagccccagatcagcgtcctctccacatagcccgcccagtggaactcctccagcacgcaccgctccgggagcgtggaggacagccccagctccgtcagcagagagcggtccttttggagggtccaaagcccgtccgccgggtcagtgcgcagccagaaggtctcaaaccgctcccggtcatagatgaggacgatctccgcctggcccaggtctcccccaggcataaagaggaatattttgcagaagggcaggtccgccggcttggcggcgatgagggcctccgtcttgcgcagcagggcggaaaacagggccttccggccctttccacgggggtggaaaaaccggtgagagtacaggtccagctccagaaattcttcccgaccatccgcctcgtccgggcgccagtcgggctggtagtcctctaccacccggatcagcttcctgagcatccgccgatagccccggaattttttgacacgatatgccatgatgcacctcctatttgacgccgtagaggaacaggtcacatttcagcattccgttatataacttccgcttcctgtccgccgtcttcccaaaggtgcgctcaaactccgtatgggaggagagcagatacagcttccaggtctccgggaacttggtccatgcctttccgaaggcgcggtacagctcctctgcctcccggcgctccataatgcgctcgccgtagggaggattggtgacgatccggccgtacatcccgccccagtggaaggtgcgggcgtccgccgcttcaaaccttacaatgtcgtccacctcggccagctgggcgttgtgccgggccagctccacggcggcagggtcgatatcgccgccccagatctcatagtccccgtggaactcccggtcctgggcctcatcggcggcatccatccaggcctgagcggggagccagctccacttctgggcggagaaggagcggttcaggcccggagcccggtttttggcgatgagggcggcctcgatggggatggtgcccgaaccgcagaaggggtcgcacagcgggtcccggccccggtagcgggagaggagcaccatggcggcggccagggtctcccgaaggggggcgtccaccccgtgggcccggtagccccgcttgtaaagccctggtcccgaggtgtccagcatcaggacggcggtgtctttcatgatggagaactggatctggaagagcgctccggtctcagggagggtattcaggccgtaggcatcccccagacgggcggcggccgcctttttcacaatggattggcaggcaggcacggaatggagggcggaattaaggcagtgccccttgacagggaaccggccctcccgggggatgaactgctcccaggcgagggcacgggtcccctcaaacagggcgtcgaaatctccggcagggaaggtgcccagcaccagcagcacccgctccccggtgcgcagatttagatccatccgcgggatgtcgccgggccggccggagcagaggacgcggccattttccgcccgcacctggtccagccccaggcggcgcagctcatccgcagccagggcctccaggccgaagagggtggggatcgcaaagttcagagtttccatggcagttctccttattcctggggggcgggcgccccgagatcagtgtagatgcccgagatgccctggcggaccagggcggcctgatccgccgggtcattgaccgtgtggacgaagagggggacctgggcctccaggagcgcctccacatagcctggggtgtccgccagctccaccgggaaggtgatcccctccagggggtgttcagcagcaaagcggaccagggcggcggtgtcctgcttttcggaccaggacatctgatacacggtgaggatgatgtgctcaaagcccagatctgccacctggtcatattcttccgggtggtagatctgaatgatgaagcggctgcgcagatccggacagcgctgggcgatcagggcggcgcccgccgcgcagtcctccttgatgtcggtgacgatggagacgccggggtgttccctcagccaggcgatcagatgatccagggtcagggaagtgaagccgtaggtgctgtcccggacggcctcgaactgggccagggtgggggagtccgtgtccaggatgcggccatagaaagcgttccagtcgtggacgcagaccagctccccgtcgcaggtccaggagaagtccagctccagcagccggaagccgttttcgtaggaatgttccagcgcctccagactgttgctgcccgtcactccctccggggtgacgccgccggcgtggaggatcatcaggggggtgtggagctgctgcgcctgagcggtgatggcaggaagggagacggccaggcccggcggagcagagaggggagctccggcggacagggaggcagtgagcatgagggagaggataagttctgaaacgatgggcatgggcgggattctcctttaagcgtcgagagagattggtaaaaaacagtatatcggatttttcgccattaggcaaatactttatagagcggaaaggcggcgctcccccgatcctgaaattatttacagaaaaaagagagaaaaccatagcaattttttgtaagatatgatatcctgtcatccaaggaaagaagttttctttccagccccccgggatgggaacagaaaggagtgtgctatgatacccataccgtttactgtgctctggctgatcgccctgatcgtgttcgcggtgggggaggctatcactgtgggcctgacctccgtttggttcgcggtgggtgctctgggtgcgctgatcgcggcaggctttggcgcggcgctgtggctccaggtggtggtctttctggctctgtccggggtgaccctgctgctggtccgccccttggcaaagaagttcctgacgccccgctaccaggccaccaacgcggaccgggtcatcggcgccacagcactggtcacagaggagatcgacaacctgaaggggagcggcctggtgaatatctcgggacaggtctggaccgctcgctccgcccatgacgttgtcatacagcctgggcgggaggtcaaggtgctccgcatcgagggagtcaaggtttttgtagagctgttataaggaggagagatcatggatagttttctttcgtttttagtgcccattatcctggtggtgctggtgttgctggtgctggccgccaacgtccgggtggtcccgcagtcccgcgcattcgtcattgaacgcctgggcgcctttcagggcgtgtggggcgtgggcctgcacttcaagatcccgttcattgagcgggttgcaaagaatgtttccctgaaggagcaggtggtggattttcccccccagcccgtcatcaccaaggacaatgttaccatgcagatcgatacggtgatctatttccagatcaccgaccctaagctgtacacctatggggtggagaatcccatgtccgccattgagaacctcactgccaccaccctgcgcaacatcatcggtgacttggagctggaccagtccctcaccagccgagaccacatcaacggtcagatgcgggccattctggacgaggccaccgacaactggggcatcaaggtcaaccgggtggagctgaagaacatcatgccgcccagagacattcaggagtccatggagaagcagatgcgggccgagcgcgagcgccgtgagtccatcctccaggccgagggacagaagcagtcccagatcctggtggctgagggcgagaagcagtccgccatcctgcgggctgacgcggccaagcaggccgccatccttcaggctgagggcgccaagcaggctaagatcctggaagccgaggcccaggcccaggccatcatgaaggtgcagcaggccaccgctgacgccattaagctcatcaacgaggccaaccccggcgacggcgtgctgaagatcaaggccctggaggcgttcaccgccgccgccaacggcaaggccaccaagatcatcgtacccagcgagatccagggcctggcgggcctggccgccgcggcgaaaacggtgttcgacaccgaggaccctaagccggccgcccccaagaccaccctgcccaagcagtaagacacagacacgatccaggcgccgccccatggggcggcgcctgtttttatggccggcggtgcggtccggctgacagaaaaaaggaacgctccggccgccggaagggcggccggagcgtttgctcagggttgtgagagatagatatggaactggaccccctcctcgccggagaagacgatccagccgttttccggaagaacaacggtggtgtctccatagagccaggagctggcctggagacccagagcggcgtcatacacatagaaaccgccgttttccgggacctccaccgtcatctgactgccggcggcctcgcctgtccggtaccagcgggctgtctgccccgggcggatgatgcaccaggactccggcccggagaagatgggggagacggagcttgcgtcctgatagagggagccgttgagctccagggtctcgcagccgtctacatccagcacacggatcacggcactgtcccggcttccggtgccggggatctgaaggactggggcggcggtgtcaggggcggtgagctgattggtgagcagatagccctccgggctgccctgaagggtgacggcggcaaagacgccgcttaaggcgtagtaggcggaggaccagcgctcgttggtttgaacgtacatcttgccctctctggcctcccaggcggcctgagtggcctcgtccggctggtagctgggcaggcgctccatggcgtaggaggccacacagagggtggtcaggccgggaatggaggcgtagctcttctgatagaggtaggtctccccgttgtcctcctggaccagcttgagcaggacggaatcgctctcgtcccggaaactgccgtcctcccggtaggtgaaggtcccctccatcccggtaagggtgagcacgccctcgtcggtgatctggagctgggcggcggcggtggaggtgccgtaccagccgctgagctgggtcagctcggcgggcatctgggcgggctgggcgggggtgagggcggcctcctcctccacctcgacgccctgctcagccagggcatccagaaggatacgggcggcggccagctgattgtaggtgctgatcccgccggaagtgagcaccgcggcggccatgtcatactcgggcaggatgaccagtccggcatgatagacgatggtgtcgccccccttgaccagggcctggatgccgttctgactgaaggggaacatatggacgctgtcccagcccaggctataggcgacggcgtcgccgtcactgtcctcgggccacatgcccagcagatactggtcgctggccatctcatccaaagacgcctggctcagcagaccttccccgcacagggcgccgccgaaggcggccagatcgctggctgtggagtagatgcctcccgtgcccacgatggtcaggttctcggcgggcagggcccgggtgtcagtccccagataggtcttgaccagctggctggtatcgaactcctccataggggtcagggtgttctccagtcccagaggctccagcaggtactggtttagaaaggcggtgtactccatgccgctgacccgctcgatgaccagctgggccaaggtgaagctgtcgttggagtagacgctgtaagcgccgggctcggcctgaagggtctgcccggccagccgctccagcaggcgggagggagcgtcatcgttcccctggtccccgaacaggaaggcgtcattggtggtgccgcccatcaggccggaggagtggttgaggagcatgcgcaccgtgatctgggtgtagcgggggtctgccatggtgaaatcagggagataggcggtgaccggctcatccaggtctactttcccctgctccaccagcttcatcatggcggcggcggtataggtcttgctgatggagccgatgccgtacaggtcatcatcggtgagcgcgcggttctccgtcttggagtagacgccgtcgtgcccctggagggtgacctctccgttctcccaaagggcgtactggacactgacggcgccgccatactgcatggcgtactgggcggcctcatgggcggcctgggcccggtcctcctgtgcggcggaggcgggcagggccagagagagggaaaggaccagcgccaggaacagggcggtccatctgctgcgaaggtgtatcataggatcttcctttctgatatggaggttggtttcattatagcggaagcaagggccctgtcaagggaatggaaagcggaaaattgtgcatatttcagcacaattttgtcctctgaccacagtcagaggacaatttttctgaaaacagaaaaaatatgaacagcggttaatttttttgaaggaaaggtgaatacccttcggttgcggagaaaaggcctcctctgatacaatgggcacaccaaggaaaagggggacggaacatgaaatttcacgagatcctgcggcagcggcgcctggcactggggctgacccaggaacagctggcccagcggctgggggtgtcagcgccagctgtcaacaagtgggagcggaacaactcctatccggatatcaccctgctgcccccgctggcccgtctgcttgaggtggacctgaacaccctgctctcctttcaggaggaactgacagaggaggagatcggagcatttgccaatgtgctgggggagagagcccagcaggagggctgtgaggccgccttccgtctggcccgggacaagctgcgggagtacccaaacagcgacctgctggcctatacggcggcccagatactggacggggcactggtgctctggaagaggggggagaacgacccggaacgggagcaggcgtggaagggggagatcctggccctctaccgccggtgcgcggacagtggagacaggcgggtgcgggagcgggcggagcggatgctcatctcccagtacatggcccagggagagctggagcaggcagaggaacagctggcccgcctgccccaggaggaccgggaacggcccatgctggaggccatgctccgcaggaaacagaagcggtcggaagaggcgtggcccattctggagcgggagctgttccggcaggcatcagatctccagtctaccctcatggctttgatggacctggcgctggaggcgggggacaagacgtgcgcgcggcaatacagtgagacggcggagcaggcgggacgggtgttccagctcaccgcctacgcagtggcgtctgccccgctccagctggcgctggcggagcaggacggccccgaggcgctggcggtgctggaacggctcctgcgcagcctggaggagccctgggacctgagtgcgtcccctctctaccgccacttgcccacaaaggaggctgcgagggaagtccagcagatcatgctccaatatctgctggaggaactggagcgggacccggaatccgctttcctccgggagacccccggataccaggagatgctggagcgggtccaccgggcagaaatatagataaaatcaattattttataagaaagatcgatttgaaaaatggattggggaggagtatgatggggacaagatgagacaggttcacggcagcgcgccgggcgggacagggatacctcccccctgcttcccccggggcggccgaagcgtggtggagccgtgtccgtctgcgacagaacagagcacagcgccagcccggtggtccagggaccaccgggctggcgcgctgtatggggccggaccggggaactgcccgcaaaaggcacccgctccctgcggggaacgggtgcctgggatgatttattcttccgccagggccttggcttcctcaatggccttctgctgggccgcgggagggcagtccggcccgccatggagttccatggcggggacccttggagagaagacacggggcggagtggatccgccccgtgaaaattctccgctgcgttgcgaatttgcggcgcaaaagcgccgggcgggcgcagcccgcctgactcggactgcccgcaaaaggcacccgctccctgcggggaacgggtgcccgggatgatttattcttccgccagggccttggcttcctcaatggccttctgctgggccgcgggagggcagtcctcatagcggacaaagtggaaggtgaaggagccgcgggactgggtcatggcccgcaggtcgatggcgtaggtagacatctcggccatggggacctcggcctccaccacctgctcgccgtccttagtgggattcatgcccatgatgcggccgcggcgcttgttcaggtcaccgatgacgtcgcccatgtagctgtctggaatggtgaccttcagctcgccgatgggctccatgagcacggggttggcctcaggcatggcggccttgtaggccagctgggccgcggtcttgaaagcgatctcggaggagtccacggggtggtagcttccatcatagaggacagccttcaggttgaccacggggtagcccgccagaggtccgtgaacgcaggcttcacgcaggcccttctccacagcggggaaatagttcttgggcacggagccgccgaaaacctcctcggcaaagaccatctggtcgctctccggattgggctcaaagcggacccagacatcgccgaactggccggcaccgccggtctgctttttgtggcggccctgtttggagactgtcttgcggatcttctcacgataggccacccggggagccttcagctccgcctccacattgaagcggctcttcagcttggacaccagcacatccatctgcatgtcgccggtgccgctgaggaccatctggtgggtctcgccgttgttcaccaaggtgaaggtcgggtcctcctcgttcaggcgggccaagccctgggcgatcttgtcctcctgcccccgggtcttgggcacgatggccacggagtagcagggctcggggaaggggatggggggcatgaagaagaccttgcgggcgtcacacagggtatcaccggtcttgaccttctccagcttgccgatggcgccgatatcgccgcaggagagctccttgacctccacggccttcttgccccgcatggtgtacagccggcccagcttctcgggggagccggtgcgggcgttgaccagggccaggtcggaggtgatggtgccggagatgaccttgatgaaggagtacttgccgtactggtcggagaccgttttgaacacgaaggcgctgggtacgccgccgggggagacggcgtattcctccttgtcgccgctggggagcatgcccttgcgcatgttgccctccaccgggttgggcagaagctccacgatattgtccatcagcatcagggagcccatggtggacacggcggagccgcacagcacgggaaagagggacagctcccgcacgccctggcgcaggccctggatcatctccacataggtgaagtcctcgccggagaagaatttgtccataaactcctcgctggtctcggccacggattccttcagagcgtcgttgaactgggtgaccacgtcctctttgccctcgggcagctcgatctccacccgtttgccgttctgcatctcgtaggcgcgcttgttgagcacgtcgatgatgccggtgaccttcttgttgtcgtcccagatggggaccacgatgggggcgatcttgttgccgaagcgctcacgcagggcgtcgaaggtggcgttatagtcggagttttcctcatctgtcttggaaatatagataaagcggggcatgtcgcgctcctcgcagtagcgccaggctttttccagccccacagagatgccgtctttggcggagcagacgatgatggcggcgtcagagacctggagggcctccagcacctcacctgagaagtcgaagctgcccggggtgtccagaatgttgatcttgcagcccttatattccaggggagccacggaagtggagatggagatctggcggcgggtctcctccgcatcatagtcgcagacggtgttgccgtcggcgggcttgcccatgcggtcgatagcgccggtcatgtaaagcaggctctccgccagggaggtctttccgctcccaccgtgtcccagcagacagacattgcggatgttttgtacagaatagctcattgttaccactccttatgtttggactgactcatacagactccccaggcggaagccgccgtggcgaggtgatctgctattggctattatatcgtaaaaatgcacatctgacaacctcttttttgtcgcagacgtaaaatgaaacaaaaatgaagaaaaagcggctctcccacgaaaaaaagcagaaaagagccctggaccgggcgcaaatcgcgcccggtccagggctgaagtaagattcagggatacaccagagccactgcggggccctccgccccgctctcccacagggcggcggcctgggcggtcagggcgtccagcagggagtggtccccctccgcttctagggcggtccagcgaaagccgtccgtctcctgccagtcccggtcctccagttcctctggaatggtggagaacaggagcagccggccgggactctggcccagctgtccggccaggtcttcggacagggcgggggcaagggcggagaagtcctccggtgcgcccgctccctgttcctgcagggagaagggagcgatggaggcgggggactccgcctccatcggggcggtgtcctcggcttccggacggcccgcattgctggagcggacctcggcagagggggaggactccccgccggcagcataggcaccggcagcgggagtggaggaagcggcctgggactccgaggcgctggcaggggcggcgccggtgctgttcccgccgccggaggagagacccgccatttggggaagcaggccgatgcacagggcggcgcaggccgccatgcccagtgctccccggaaggcagggcgtttccagagcgggacgaccttggcaggggcgctgtcggcgcgtacccgctccatcacgccggagacgagctggggcgggggatcgcactcacccagctggacgagggccccctccagctcctccagctcccgggcggcggcccggcaggcagggcattgttccaggtgggcgtccagctcccgctgctcttccggggacagggggccgtcaagacgcaggccgatcaggtccagcgcacgttcacagcctgacatgccgggtcactcctttctgtgtcgttctatctccatagacgccggagagtcaaaaaagttcccatcctccagcaaaatttttcgcagggagagacgagcccgggcgatacgggatttcacagtccccagatccaggtccaggacctgggcgatctcctggtaggagagtccggacaactcccgcatgatcagcacctggcggtggtgatccgggagggaggccagcccccgctccagggcccggcggcgctctgagcgctccaccgcctcctggggctggagctgctggtccgccacctggacgggcccgttttcctcgtcgtccagggagagggcgggccccatggactgggtccgcctcttctgagcccgcagatggtccaggcacaggttggtggccaggcggtagagccaggtggcaaagctgctctccccctgaaaggtggggagggctttccacgcctggaaaaaggcatcctgggccagatctagggcgtcctcacggctgcccgtcattcgcagcgcaagggtatagatccgtttttcgttgtcccggaccagctgttcgaaggcgtcctggtccccgtcccgggcgcgggccgccagctcctggtcagtcataccttcaccccttccaaatccaaaccctccggccccgcggccggggtcagcacaggtcccgcttgatcccctttgtcacccggtacacgtcctccagggtagtgatcttcacgatctgctccttataatatcccgcgtgggggacccccttcagataccatgcgtagtggcgccgggcctccagacaggcgatcttctcccccttgttggcggcggagagctggaactggcgcaccgccgtgtcgcaacgctccgccagcggcggcatgggagggatctcgcggccctccagagctgcccggcactgggcgaacagccaggggttgccgaataccccccggccgatcatggccatgtccgccccagtgtaggccaggatacggggggcgtcctccggcttgaacacgtcgccgttggcgatcacagggatcttcaccgcctccttcacggcgcggatgtggtcccagtccgcccggccggcgtacatctgggcccgggtccgcccgtggacggccacggcggccacgccggcctcctccatggcccgggcaaactccacgcagttgatggagcccttgtcccaacccagccggaacttcaccgtcaccggacagccggccccccggatgaccgcctcagccacccgaaccgccttgtccgggttacgcatcaggccggagccgtccccgctgttggccaccttgggcaccgggcagcccatgttgatgtcgatgaagtcggcgccggagacctggcgggcgatggcggccgcctcctccatgcagaccgggtcgctgccgaagatctgggcggcggcgggatgctcgccatcccccagctggagcagggggatggacttcttatcctgataacacaaggccttggcgctgaccatctctgtacaggtcagggcggcgccctgctcccggcagatggtgcggaaggccatatcagtgaccccggccatagggcccagggccagaggcgcttcgatggggatgcctccaatggacagcatatgggcaaggacagcggggcggggcccgagcaggccgccgtttcacgcgccgcgtcctctgtcttcctttcctgagtcagatttatttattgtatcatacccccacccggttgacaaggccgccctgtccgctttacaatgaaaaaagatcacctgcggaagcagggggaactgggagaaataagatggaatttgatgtactttgggcggccctctatggcgtatctgcctatgcggagctgctgaagacgccggtgatggagcagagccgggccctggtgggcagtctggcccaggggcgtggaacggaggccctggaggcctatacgcagctcttccacctgctgcggcgggagggataccagggactgggtgactggctctgggacggcctgcgctatgtggagagcccctatggaacgctggcggagcgaggggacagcgaccccgccctggagaacgcagcccggcgggaggtggagaccttcctccttctggcccggatggactgcgaccggtatgtgggggagctgtccaatctgctgcccccggtgtacgctccggtgctggctgggctgccccggtggcgggcgtctgccccttttgactttgacggccttacggcgttttaccaggagaatggctgcggcctgttcgcccgctaccgggcctttgtctgggacagcggggagctgatcccggtggccgacccggactgcccccggccggaggagctgatgggctacgagctgcagcggggacaggtggtggccaacacccaggccatgctggaggggcacctggtgaacaacgtgctcctctttggcgacggcggtactggcaagtcagccactgtaaagtctatgctgttccgccccggcttcggggatctgcggctgatcgaggtgcagaaggaggggctggcccagatgccccggctgatccgctccctggcgggacggcggcagaagttcatcctcttcatcgacgacctggctttcgaccaggatgacaatacctattccatcatgaagactatcctggagggcgggctggagcgccgcccggccaatgtggccatctacgccacctctaaccgccgccacctggtccgtcagtctttcagcgaccgggcaggggacgaggtggacgcctttgagacgatctcggagaagactgccctggcggagcggtttggactgcgtatcccctacctcaccatgagcaaggcggattatctggccctagtggaccatctggccgcccgggccggggtggccatgtccgctgagctgctccacgcccaggccatgacctgggagatccgccacgcggggcgcaccccgcgcaccgcccagcagttcatcgccagcctgtccctccaggagaagcagtaacaccgggaacggaaagagagctcccccgggcgcgccttagggcgtgtccgggggagctctttgcacgggcaggtgggccggaactttcgacagaggggaaggaccgggagaatagggacttgcgtggggggaatagagtagggcggaggtgttggcatatgttgtcgccatggatctatctaatgatgaacggtctgttttttactctgcggctctcgggtgggagcgggtccttcccacggccgctgaaggccgcggaggagcgggaatacctggagcgggccgcccagggggacctggaggcccgcaacctgctggtggagcataacctgcggctggtggcccatatcgtgaaaaagtactatgcccagactggagaccaggacgatctgatctccatcgggactatcgggctgatcaaggggatttctaccttcaaaagtgataaaaacgtccgtctggctacctacgccagccgctgcatcgaaaacgagatcctgatgcacttccgggcgcagaaaaagctggcaggggaggtgtcactggcggacagcctggatggcgatgacgacggcagctccctgtcgctgatggatgtgatcgccgtggacgacaacatgctggaggagctggacacccgggacgcctgccgcaaggtacggcactgcgtggccacctgcctgaccgatcgggagcggtccatcatcaccttgcgctacggcctggatgaccgccctcccagaacacagcgggagatcgcctcccgctgcggcatcagccggtcctatgtatagcgacgccgctaatgtaaacgaagcccggaaagccttgtggaataaggctttccgggcttcgtatgtagctgtggtagcatcgcgattattgtaagtggaaaaattttaggaagataagcggccattcatcaagaaactgtattcattctttcggcatcttgaataattgctttaattgtatctaatgtgggtcggaatccatcaaaagaaaacttatcaaaaccagggtcgttgtcaataatatgttgaacaaaatcgtcttttgtaagtgcataattcgactcgtcattagcagaaattttataaacttttttgtcatttgaaccatcaagaatttccaaaggattagaaccaattttgtgatggcaaacatactgctcatccgcagtaatcctcgtaatcttgctaaactcgccagccaaaaaaatgcgtcgaccgtttgcatcaacggtttttaattctgaatctgttagacaatgttcaaccgaaattaaatctgttttactacgatgttggggagtacataaattgaatttgtagacttgattatttcctctcaaaaaagtatcagagaatatatatgttggattgtctcgatcaaacatacatatttttatgttggtatcatttcctttttgcaagtaatcaaatattttcgctaattctccatctcctgtattttttgcatgctcaatatcataaaactcaatcctagaagaaatatctttatatccttgaagtttttgcaatgccagttttaagtatttgacatcggtttttccttctgtaaaaatgatgactttattatttagtgatttgattcgttgatattctgcccgtagtgactcaacttgctgtataaggctctctgtttctgaactaaagacttcatatgccattataatttcagaaaaagaatttaagtcatgaattaaagttccatcaggaagtgaaaggaaatctatattttcgccatattcttttttcaatcccgccaaaaggaagggcgaatgtgtacttagtatgaactgaattttcggaaataatttcataagctttggcaaagctctgtatgcaaaatcaatatgaagattgacatcggcctcatcaataagtacgcaccccgtaatttctgataattctatattatcattgccatggaatatgtcccattcttttataattgaggcagcaattgcgtataaattagtttcaccagcagacaattgggatatatctgtacaatgtatgctagggccatttaggccaagcattttatggttacgtgcgggatttgcaacatcatattggccatctcctttaattattgaaaggattgcttttagatgaccttgcagtttggtgtcttgtcgtacgggaacaactcggccacgaaccgcagcaggaaatttttcatcatctggaatctgcaaattcaatatctgtgattgtaaatatacggttcttagccaatcctttatattttctaaaatatcattttttattatatttgtagtcgaataacctacattatttggcgcagaaatgtttgttttgttatagttatcgggattgtaccacattggcttgtagtatcggtcaaatgggaaaaacaacttgatactggactcaaattccggtaatgcaaaattctgtagatctgtattcttataaaaaccagattctttaaattttttgttattaattatttgagaatcctctatttctctattggagattgattcagctggatttcgggacattacatctacatatttgatacattttaaatgtgttccgtattcaatttttaccgaagaagtatttgtgcctactttgatataactatgatttccaattttataatagttggtacctacaacttctaaaatgccattcggatagagtttgcgttttgcttcgaccatcatatcaatgattgccgaaaatagtaatgtttttccacagccgtttttcccaattaaaacgagggggataggcttccctgtttcatcaaacctaaatgtataagaaagatcgtcaattggaccgtagttttttattgaaatatttctcaaaaccatgtgaaccctccgtctatctattttagtacttttctttagttgatataatttgatacatatgcccaatgtccttgcttgtaatatttagataacttgctttctccaactaacccagcaagtatctgatttgctgttgctgccgacaccccgcacagttcccgcacatcggcgttcatgatatagttgtagggtttgagatgttcctcaattttcttccggcggagggcagccttgaccacctttccatcgatcatttcatcactcgcactgataacctgtgtgagcgatactttgatggatgagagcatgagctcgataaataccgtggactttcccgtatcgttggaggcgttgatggcgttatgatactcctgttggcggtcacagatgatagcctccactggaagccatggcacgcttcccgttcagcacggcagttacctgtagcagagagatgatgaacgaagggcttatatctctcatttcaattgatttggtttattataccatatattgcttatttcatcaattaaaatgccttatcgtgcctaatagcggatgttcgacatttgggggtgccattcatttggactcccaagcgattcgcatccccaatttaatgaaaagaatttagccgcctgtacggggcggcttttatcatgccacaatagtataattaaggaggtattcctatgaaatatgatccgagcaagcaaagtctgaccatggaaacggcggagcgcaaggtgaacatttctttttctgtgacgcccaaggagaccagcatctggcactatgtttgcactgcactgatccagcaacctgcggcgcctgttcaaatggaagcggccgatttaggatagaggcatcaaacagaaaggagcatcgctatgaaccgggtttattgcctctatcgtgtgtctgaccgaggacaggtggaaaagaatgatattcctatgcagagaattgcctgccagacctttgcttaggagtgcggctgggagattttgagggaattttctgaaaagggtgtctccggctataagctgactatgcagcagcgggatgcagtcatggagatccgtgaggatgccatagcggggaaatttgatatcctgtaggtctacatgtttgaccgcatcggacgtcgggacgatgagacgccctttgtggtggagtggttggtgcgcaacggtgtttctgtctggagcgtctgtgagggcgagcagcgattcgacaaccatgtagacaagctgaccaactatatccgctattggcaggcggccggagaaagcgagaaaatctcggaacgcacccgtacccgaatccggcaactgacagaagaaggctgttttaccgggggacagtgcccctatggataccgtttggtgcggggaaaacggttgaacaaaaagaaacaggcgctgtatgagcttcagatctgcgagaaagaggcccgggtggtgggaatcatttttgacaaggcagctcgggaaggactgggcagttatcgtattgccaaatacctaaatagtcaaaatatcacgacccgcaaaggaaagcggtggaatcagggctccatctcccatatattgtccaacagattatatctgggctatctgcagaaaggcggcacggagtccccgaggctgccacacctgcagatcgtggaggatgcgattttttcccaggtacaggaattgaaagaaagccggaaccgaaaggagaataatatgagtaccatttctgcccccaaacacggaaaagctttgctgagcggcctgacctattgcggccactgcggcgctcgcatgaacagcaccatccatcggaaggagtaccgccgtaagcgggatggttccctctatcgccgggatgtacggctttatcgctgcaatgccagtgtggaaggggaaccaacagcatgcgatggcccacgaacctaccacgcagagcgtatagaagcggcggtcaaaactgcaatttccgccttgctagagcagctggaggcactgcctgcagagaccattttggagtataaatatcaaatcgtacttcaggagcggcgggagacctatcaggcggcgcagcagcatttatccgagagggagtgggaccgggagaccctgcgtggggaggtagctcgggcgatccggggagagagttccttcggggtacctcttttgcaggaacttttacaaggaacagaagcagaaattgacaagaccagagagaggctgtatgagttggaggccaggctccaaaatggagaacaactgcgccgggagattgagatcaagcagcggaaatactgcggactgaaccagattttctgcagcggaacgctggaggagcaaaaaatgctgctggctatcgttgtgaagcggatcgaagtacggcgggattatgaactgaatattcaactgtcaccggatttcgaacggttcctggatggacttattgaaatgcggtgattttttgcggcaaattttgctctgaccctgtgggacaatagaaaagaggtgaattttatgcaggggaaacgtacagcagtttattgccgtgtggacaggggcggaaattctgaaatgcggcgggacgcgttggagatgcaaaagcggaaacttgaacattatgcggcggaaaagggactcccaatttcaggatattatgaggatgacggttttcccggacatgacttgaatcgtcccggattgacacgacttctgaaggattatcatgccggtgtatttgagcaagtcctggtaatgaaccgcagccggttatatcgcgggagtcgttggaacgaaccccaatggccctttcaggtctgctcagtcaaacagctggagcatgatctggtacgttaaaacggtgagggatgtcccctcaccgtttttcgttccaatactccgcgcactgcttttgcagagcggaaatatagcgtttgaaatagtctccaataaaatccgggtagaaatagcaaagcgtgttcagaaaatcatcaatatagtcactttggatatcctgaatacgggcgaacgggtctaagaaataaggcagactatctggacaaatcttcaggcagcttgccaaatgggcatcgcaccaagagaaattgagaacttgggacagatcactggagagcatcttctctttcataacttgctgcggattcagaccattgatgttttggtgaatgccggctgcgtcaagctggaaattgctgataggaaatgcatcggttgtgtctacacgatagattctatcgtcatccgcgagcaggatctcaacgccatctccctcgcctgtaaggctgtacaagccatagaaagcaaaatagtgtttccaatttttggcctgctcccgtattttttgataagtaggcgccggatcggtcacgttcaagtatcgttccccaataatatactccgttttgaaataaggccgcgtttcccccggagagagttggaataagaccgcgtccggcatagagtatcccatcacctgagccaatttggtatagatgaactcgttgcaggcacagtccgtataagcgtgtttcacaagataccgtttgttccgatccgctttttgtttggccagtaaaagccggccgctgtcaccctcttgatgtggaattcgagaaaacacaaaatcagccgtttgaaccacatcgggagaggtaataggcggcttgccctgattttccttctctttagattccatgcgcagctgcatcatatacttatttaatcccggatgcatttcaacacctcccaactcacctttattgtaagaggggaggaaaactttgtcaatcattgttgaaccatgtcgttatcctgacatggctttcctgtatgcagacaagcaagtgtgcatgaattgccgcatattctttactatttcagagaggggggatacccgtgaaaaaggatggacgggtgccgattgtccattgttttttcacagaagaaggagaaaagctgccggagctggtaagacggtccttaaggctttttatagagagaaatctccgaaatgcggcggaaatttgacgatatggccgcgaaatattataatatttatgatgaatggccgcttatctcaggaggtatagcatgtactttgagataagcaatcccctggaataccatgcggccttatacatcagattatcgaaggaggatgaaagcgagggaccatcccagagcgtccagaaccaggaatccctattgcgggagtttgtgcagcagcataggctgaacgtctatgatgcctacgtggacgatggctggagcggcacgaattttgaccgccccggtttccggcggatgaccgctgacattgaggcgaagaaggtcaatatggtcatcaccaaagacctctctcgtctggggcgtgattatatcatgaccggccactacatggagcggtacttccccgaacaccgggtgcggtacatttccctgctggacggcatcgacaccggcgtggactctaccgccaacgacatcaccccatttcgtgccatcatgaacgatatgtacgccaaggacatctccaagaagatcaagagcgtcaagcgggataagcagcggaagggacagtttatcggcggaaagccagtgtatggctataagatgcacccaacagagaaaaacaagattgtcattgatgaggaagtggcccctatcgtgcggcggatcttcgccttggccctctccggcatgagctgccggaacatcgccgccctcctcaaccaggagggggtgcccactcctgccacctatgccaatctgccggtggcaaaacccggcccctacaccggcctgtggagcagtgagcggatctccgatatgctgcaaaatgagacctacatcggcaatatggttcaggggcgcagtgtgaagattagctataaatccaagaggtgcctgaagcaagacccggccaactgggtggtggtggagggcacccatgaggctttggtggatgtggagacgttccgtaaggtgcggatgctggtgaacagccggaagcacacccggagtcgaacctatgattttttgctgaaagggctgatcttctgccacgagtgcggttacccgttggcggtcctcaaccggaaaaacgccaggggggaggatgtgctgtactttgtctgccgcacctatcagcgttttaccaaagcgggtgcctgcacctgccactccatcaaggagaaaaccgtgaccgatgcggtgatcgccaaggtgcgggaggtgtgccagacatatctgaatcctgatgaactgctgcccgtggcccgggaagccgtggagaacgccgggaagcagagcagcctggggaaggagctccaagccctccagtccaagatcgacagcctcaccgccaacctggaccggatgtacaccgaccggctcagcgggctgctgccggaggcggacttccagcgcatcttcagccggatcaagctggagcgggagcaactggagaaaaagcggcaggaactggagctgcgtcaaaaaagccctgtccgcagcgaggacagggccagggaactggtacagcggttcgtcgaaaccgccggggagagccgggagctgctggtcagcctcatcgagcgggtggaactcactgaggacaaggaagtcattatcaaattccgcttcgcccaattggacgaggcaagccagaattcgcaaggaattgcgccgtttgagacggcgtgattttccggagccaatcgcttacatttgccggggcgctatgtatcgcgcattgagaagcgggcgctggagaagctggaacaggctatgcgggagtaagggcgtcggaatgcagggggaaaatgttaaaaacggaatgatgcaaatactgcatcattatattgaaaagaaggaaaaatgaggaaatccgaaagaaaaaagagaaaaacagagaaaaaaactgcaaaaatgaaggaaattatgcaaaatgaccgaaaataaaaaaagcgacttgcaattataggcaaaatgtaatataataactctgcaaataggtcggccgcatccctcgggcggaaggccgagtaaagcttgaaatggaggaaagagaatatgaagaaaacacttgctctcatcctggcgctgtctctgtccctggcgctggccagctgcggcaatcccaatcagcccagcaattccggtaccacttctactcctgccgcttctaccggcactacttccaccaccacacctccggccggcggctccggcgagaccgtcaccctggcgaccggcggcacctccggcacctattacgcctacggcggcgtgatgcagaccaccctcaaccccctgctgaccaccggccagctgaatgtgacttccaccggtgcctcttccgccaacatcctggaggtggctgacggcaatgcccagatgtccatcctgcagtccgacgtgctctcctatgcccacagcggcaccgacctgttcaccgaggctgagaccagcagccagtgggtggccggcctgtacaacgagaccgtgcagatcatctccgcccccggcatcaaggacgtatccgagctgaagggcaagaccgtctgcgtgggcgatgtaggctccggcactgaggtcaacgcccgccaggtcctggaggcctacggcatgactaccgctgacatcaccgccaccaacggttccttcggcgacgccgccaacgacctgaaggacggtaagatcgacgccgctttcaccgtggccggcgcccccaccacctcgatcactgagctggatgccaccgctgaattcgatatgatcagcctgactcccgaggccgtggagtatctgaccaccaactaccccttcctggtccaggaggacctgcccgccggcacctaccccaacaacatcgactatgatgtgacctgcgtggccgtgaaggcagttctggtggcctctgaggacctgtccgaggacttcgtctatgaactgctgacccagatgttcgagaatcaggagagcatggccgctactcaggccaagttccagttcctgaccctggagaacgcggtggccggtgtgggtgatgtgcctatgcatcccggcgctgagaagttctataccgagaagggtgtcctgtgagggaggaccgacctcgccgcacggcccgccggtcaagttccggtgacgagtgacaccgggatctgatgaaaaaaagggtaatgggagccgccgcgataatcatcattattgcggcggctcttctagcaacagtcagcgtgcgggcgggctggtatctcaccctgcgcggcggggaaaacggtgagacctgcgtccgctaccgcctggacgagggagactggttctgcgtgggctttatccactcggtccataaaaatccgctgattgactgctatcagatccaggagcacaagatctatgtggagcagacctactattacagcttcggcgccggggtacagagccagctgaacgaaggggagtccatgacattgggcgaggacggctccattgtagtgagcaatatccacaaggattttgagacgatccccctgcaatatatcgtaggctcccgatcagatcacacgctgatcctgggcgacatccgggaggactatggccaggtccgtgatctggtcggggtgttcccggaagatgggatggaggaggtgactctggagagcgggattcgagtcatcagtttgagcgcactgtttggaagaagctcggtggtctccatcgggtacgagtatcggctgttctgaccgccttgtccgctaggggcggcgtcagaacgatgcgactaaggaggagaataatgggcgatttggaagatcgcagcgtcaacacggctcctgccggtgatcccagtgtagacgtgggaacggcggaggacgtggaagcggtcatgaagaagtacgaccgcgaatccaacacccggatctggaccggagtcccggagctggtcatccggatcatgctggctctcttttccctgttcatggtatggatgaacctgtttgccagctttgacaaccgcgtccggcactgcctgtttttgggctttatcattttgtttgtattcattctgtaccctgcgaaaaagggaacacagaaggtgaatcacatcccctggtatgacatcgtattggcagtggtgggcgcggcctgctactttaactatgtcatcaacctgaagagcatcgtggccatgatgacccggatcggcaccactgaggtggtgctgggtatcatcggcatcctgatcctggcggagtgctgccgccgggtggtgggcatccccatcctatgcgtggccacggccttcgttctttatgcttatctgcccatgtttgccggaaagacggtgcagagcattgtgtacaacctgttctacaccaccaacggcgtcattggcacccccatcagcgtgtgctgcacctacatcgtgctgttcatcatcttcggcgctttcctggaggctaccggcatcgccaacttctttattgaaggggcaaacgccatcgcaggctccgcctccggcggtcccgccaaggtagccgtcatctcttccgctctgtgcggcatggtgtccggttcctctgtgggcaacaccgtgaccaccggcgccgttaccatccccctgatgaagaagactggctatcccccggagttcgcgggtgccgttgaggccgccgcctccactggcggacagatcatgccccccatcatgggcgccgccgctttcctcatggccgagatggtcggcgtcccctactctgagatcgtgatccgggccatcctgcccgctttcctgtacttcgcgggcatcttccttatggtccacttcaaggccaagaagatggggctgcacggtctgcccaaggattccctgcccaaggccaaggatatccttcccaagatctacctgctggtgccgctgatcgtgctggtgtacatgatcatcgtgggcttcaccatgtcccgcagcgctgtgtatgccaccttcgccgctatcaccatgggtatggtggaccgggagaagggcggcaaaaagctgctcatggccctgcccctcatccccctggctgtcatcgtgatcctgggcaacaagtcctacgaatggattccggagaacctggataacatctgtatgggcctttgggtggtgctgttcgttctcttcacggtaatgagcaagcccaaccgtgaggcggccccctcctatgtggacgccttggccgccgggacccggaataccctgtctgtaggcgtagcctgcggcatcgcgggcatcatcgccggcgtggtgacgatgaccggtctggccaatgtgctcatcaccgccatcgtacaggtcgccaacggtcaactgatcatcgccctgttcctcactatgctgtgctgcatcgtgctgggcatgggcgtccccaccaccgccaactacgtcattatggccaccacttgtgcccctatcctggtgcagggcatgggcatggatctgatggctgccaacttcttcgtgttctacttcggcattgtggccgacatcaccccgcccgtggccctggccgcctatgccggctccgccatcgccaaagcgccgcctatgaggacggccttcaacgccacccgtctggccatcgcggccttcatcgtgccctacatctttgctttcaataacacgatgctgttcattggcgatttcggcccgctggacgtggtgcaggtggtccttacctcctcggtgggtatgttcctcatcgccgccggcatgatcggctacatgctccgggatctgaactggggcgtgcggatcgtgtgtatcgccgccggtctgatgctgatccatccgggcactctgaccgacatcatcggtatcggcgttctggtcgtggtgctggtgttccagatcattaccggaaagggcagtaaggctgtcaaggcggcctgattctgcagaaagagcagagcctggatctttaccagtcaaacacaggaccccctgcgtcttatggccgcagggggtcctggtgtatcttggggggatctaaaaggcagcattgcgcttgggcggtaaatgagatataataaatacgatattcatttctgacagggagcaccggccgccggactccgcagtcaaagatttcggaaagggaggtccccgtgacatgaacacacttttggagcttttggaacaggactgcacacagtctcccgcacagctggcagcacaggccggcatgaccgaggcagaggcaaaggatgagctgcgccggctggaagaggagggcgtgatcctgggataccaggctgtgatcgactgggaccgggtcaagcgggagaatgtcaccgccctgatcgaggtgaaggtgacgcctcagtccctggccggatttgaccgcatcgccgagcgcatctatcagtatgacgaggtggagagcatgtatctgatgagcggctccttcgacctgacagtcatcatctctggacgcagcctgcgggaggtagcccagtttgtgggcgagcgcctggccccactggagggggtcaccggcacggccacccatttcattttgaaaaaatataaggagaagcacctgattttccggcctcaggagccccaggaaagggagtatatctttgtatgaattatgagacgatcttgaatcagaagatccagggcatccagccctctggcattcggaagttttttgatattctggaggagatgaaggacgccatttccctgggcatcggggaacccgactttgtgacaccctggcacatccgggatgcgggtatctattccctggagcgggggtacaccaaatatacctccaacgcgggcatggcggagctgcggcgggagatcgccagctatctggaccgccggttcggcctgaaatacgactacgccagccagatcttggtcacagtagggggcagcgaggcgctggatctctccctgcgggtgctgctgaacccgggggacgaggttatcatccccgtcccatcctttgtctgctacggaccgctcaccgagatggcggggggggtcccggtctatgtggagctgaaggcagagaaccagttccgcctgacgcctgagcagctgaaggccgccattacccccaggaccaaggcgctggtgctgcccttcccctccaaccccaccggcggcattatggagcggcaggacctggaggctctggcccaggtgctgagggacacggagatcatggtggtctccgatgagatctatgccgagctgacctacggccagcgccatgtgtccatggccaatctggaggagatgtatgaccgcaccatcgtggtcaacggtttctccaagagccacgccatgactggctggcggatgggctatgtctgcgcccccaagcctatcatccagtgcctgaccaagctgcaccagttcggtatcatgtccgcccccaccgtcagccagtatgccgccatcgaggccatgcgcaacggggaccgggacatcgagcacatgcgggaggagtacgacagccgccgccgctatctggtggagaatctgcgccgcatcggtctgagctgctttgagcccaagggcgctttctacgtcttcccggatatccgttccaccggcctgacctccaacgagttctgtgagcgcttcctgcgggaggagcgggtagcggtgatccccggttccgccttcggccccgggggcgagggcttcgtccgggcctgctatgccgcctcgatgaaggatatctccgaggccatcacccggatggacaacttcctgaccaacctgcgccgcagccagggcaggggttgaaaatgaactcaaataggatattattcgaaaaaaattacaaatcgtattgaaaagcgcccggctttggtctgcctctgggacgagccccatgtaatccctgcaccctgtgggtcggggaccacacaagagaagggactcggtcggggacatcaggccgggaaacagagaggagaatcgaccatgaatatcgtatgcctggatatggagggggtcctggtcccggagatttggatcgcctttgcggaggagagcggtatcccggagctgaagcgcaccacccgggacgagccggactatgacaagctgatgaagtggcgcttggagatcctgaaggagcacggcctgggcctgaaggagatccaggccaccatcgccaagatcgaccccctgccgggggccaaggagttcctggacgagctgcgcaccctcacccaggtggtcatcctcagcgacaccttcgagcagtttgccaagcccctgatggccaagctgaactggcccaccatcttctgcaacaccctggaggtggcccccgacggagccatcacgggctatcggatgcgctgcccccagtccaagctgaccacggtgaaggccctccagtccatgggctatgagacgatcgccagcggggacagcttcaacgacctggggatgatccaggccagcaaggcgggcttcctgttcaagagcacccaggccatcagggccgaccacccggagctgcccgcctttgaggagttcggcgagttgttggaagccatcaagggggccataggctgatagctctctgtctaaagaacggagaagacgaaatcagaccgcacttcaaatcacattgaggagtgcccccaacagagcagaagcaaagataggtgttgcgaaaggagtgggccctatgaagaccgtggcggtcatttttggacttattttcctcgtctacctggcggcctggctgggcagccttgacatggcggcccgcatcgcggccctgctcctgattgctgtgaaggctgtggggctgggagcgctggtggtcctttgctggaaggtcaagaaacagtgggaccggatggaagaaaagctggatgccataatctcccagctggaggagtggcagcgtctcaaaaagtaacctttcccacagcgtgccgtccaagtgtgccgctcctgcaaaaaggggcctcttcggtgataccgtagaggccggtcccagaccggcatgccaggattcgcaccgggagtgtcggcttagcaaagccaggcgcagttgtggaattgcatgcgccctgaatttctgcagaccagggcccagtggcccggtgggaatttagaccagccactcagattttgcgagccggaaataacgtatgaccaaacaggagcgtgtccccgtaatggaggacccggggtaaggcggatatgagcgtgaagcgatcatcctgagctgcccccggcgatcctttggtgactttcccggcgctgggaaagtcacttgccgcccgcaggcggcgacccacctgcgaaaactacccaagacggcgcgccgagtcatcgcgccctgcggaaagaaccaaaactgccaaggccggcaaaatccccctgcatcaagagaacgattaaagtgagtgaccattgatgaatgatttatttgaaaccctcccctttcgtccggcggatatcctgctcccccaaaactgcgacctgggcctgtggagcgtggtggcctgtgaccagtacacctcacagccggaatactggcagcgggtagaagagagggtggggcgggccccctcatccctgcggctcatcctgccggaaagctgtctggacggtcccagcgtggagaccgacatcatggagatcaacaacaccatgtcccgctatctgcgggaggagaggtttgcccttctgccccagaccatgatctatgtagagcgcaccctgcacaacggaaagctccgcagaggactggtgggcatggtggacctggagcagtacgactatgagccgggctccccggcccaggtgcgggccaccgagggcaccgtcctctcccgtatcccgccccgagtggcggtgcggaagaacgcccccattgagctgcctcacgtcatgctcctcactgacgatccggagcgcaccgtcatcgagcccctggcccgggagaagacgggcatggagcaggtctatgacttcgatttgatggagcggggcggccacctggccggttggaagctggggagggagcagctctccgccgtggccggcgccctccaggctctggctgatcccgccgccttcaacgcccgctacgggacccaggaccagcctgtcctcctgttcgctgtgggagacgggaaccactccctggccaccgccaaggagtgctatgagcggcagaagcgcatcacgccccaggatcagtgggagaccctgccctcccggtacgccctggcggagctggtcaacctccacgacgagtccttggagttcgagcccatccaccgggtggtcttcggcgcggagccggcccaggtgctctccgccctgcgcatggcttaccccgatgcccgggagggggagggggacggacatgtgatccgctacctctacgggaacgcccggggggctctcaccgtccctgaccccgccgcccagctggcggtgggaacccttcagtccttcctggaccggtggatggaggggcggtccggcgtcagcctggactatatccacggggccgaggtagtggaagagctgacccggcggcccaaggccatcggcttcctcctgccgcccatgaaaaaggaggagctgttccccaccgtgatccacgacggagtgctgccccgaaagaccttctccatgggggaggcccacgacaagcgcttttacttagaggcccggaagatccggctgtgaaccggtggaggtgcggacgatggaacgatttgcccccgccaagctgaacctgacgctggatgtgctggggaagcggcctgacggctaccacgacctgaagatggtgatgcagtccatcaccctgggggataccctcaccctggagccgggcggggagggcgtgcgggtgcagaccgacctgcatttcctgcccacggggcccaagaacctggccgccgccgccgcgctccgcttctatgagacgctgggacgaccggtgccgggactggagatctccatccgcaagcgcatcccggtgtgcgccgggatggccggcggcagcaccgatgccgccgctgtgctgcgggccctgaacgagaaggaggggaatcccttctccatggaggagctggcacgggtgggggaaggagtgggctccgacgtcccttactgcgtactgggcggcaccgccttggccgaggggcggggggagatgctgaccccgctgaccccgctaccccggtgctgggtggctgtgtgcaagccggatttccccgtctccacaccagagctgtttgcacgcatcgacgggatgcgggtccgctgccggcccgacaccgccggactgctggcagcgctggcggcgggggacctgcctggtgtggcccggcgcatgtacaacgtgtttgaggaagtgctgccggagcggcaggaggtaagggtggcagagatcaagcacacactgatccagtgcggagccctgggcgccaccatgagcgggacgggccccaccgcctttggcctgttccaacggaaggagctggcagaggaggcctgtgcccttctgtcagagcagaaccgggatacatttttggcggaaacggtttaagaaggaaagacactgtccatactcttcgtagaattccactcggaaaatacgaaaggtatggatggtgttgtatatggaccgaaaaatgaagcgctgggagttggcgctgatgtgcggcgtgctgtgcgcactggcactggggggatggctggaccgggagcaggagcggctggcggaccaggtgatccgcctccatgtcatcgccaattcagacagcccggaggaccaggcactgaaactggaggttcgggaccaggtcctggcccacgcggaggagctgtacccggcgggggcagaccgcacggcggcggcggcggccatccaggagcatctgcctgagctggcagcggcaggacagcgggtgctggaggagcggggctgcgactacgcggtccgggcggagctgacagagacctggtttcccaccaaggagtatgaggactttgcccttccggcaggagaatacacggccctgcgggtggtcatcggcgagggagcggggcagaactggtggtgcgtggccttcccgcccctgtgcttgggtgcggccagcgagacggtggaggaggcggcccaggcgggacgcttcaccgatgaccaggccgccctgatgactggcgagacccagggatatgtgctgaagttcaaggccatcgagctctgggaggggctgaaaagactgaccgggggttgaaagggaacgggcgggggaggccggagggcctcccccgcctgtcatttgcaaaagattcaatgaatcttttgcatggtactatctataatttaacactagaaaaaatgtattgaacaggatataatgaaagacatcagtccaagcagcaaaaattatggaaaacaacgaaaaatgggaggcggtaaagcggaggaacaagatatctattttgcagagcgtgaacaaatttagggaggaagcaaacaagatgaaaagaaagatgcagagatttgtgactgtgtccactgcggcggcgctgtctctggccatggcggtgcctggaagcgcggcgtatcagccggagcagaagttccaggacgtgagccggagcgcaccctactacgaggatgtgatggacgccaactactacggcctgatggccggcgtgagcgggaagaccttcgatacggagagcaccatcacccgggccatgtgggtgacgatgctgtacaagatggcgggacagccagcggtgcagagcaaggacaccttcaccgacgtgaagacgggtgactggtttgcccaggcggccacctgggcggtggagcaggggatcacggcgggctacgaggacggaagcttcggtgtgaaccagaccatcacccgccaggagatggcggtgatggcgtccaagtttgcggcgcagtataaggacgcggcggtcagcgcctctgccaacctggccggctatgccgatgccggggaactggacagctgggccagcgaggccatgtcctgggcactgtccagcggtgtgatgcaggcggtagacggcaagctgtcccccaagagcacggtgagccgggccaacacggcgggtgtggcggtgcggctgtatgagctgggcggcgtggatctggacaccatcacggcgctggagaaggactggacccaggcggcccagctgccgctgaccggctggttcacgaagaacatcgatgtggagggtgaccgccaggtgacggtgtacatctccgaggaggcgtccatccgctcctacttcaccgtgatcgcggtgcccaatggtgtggatacccagcagttcctggaggacgaggggtggatcgacctgatggaccagaagggcgaggctctgttcgtactggagcccggcgcggagggctggggcagcgcggcggaggagaaggcctacatggacgccgccattgccttcctgaagagcggcagaaatgaggctggcatcaacgtgttctccacctttggagagttttatctggcgggctacggcgagggtgccgctcccctggaggcctgggccgctgagaatcccatctttgtcatcagccaggcatttgtaaatgccgcttctgccgggaaagctgttctggaagaggctggttctgtgctctatgacggctctaataccagcggctatgatgctggcttcaagaccgacgcagagttccaggcggtgctgaaagagtgcggaatggagcagatcgcccgtaaggatgtgcctgtacccacctggtttgccggaacctcctctgctgacagcgtagactattggaaagaagccaatgactgcgtgtccaatgcagacggggagggcgtatatcgtcaggataaggactcggatgcgatccagactgcttttgccaatgcgcagctccccgccagtgagcggtacggcatttctcaggtgaaggtgagctctgagacccccagcgccgctgagatctatgctttcctgtctgtctacacccgctacgacaacaccttcgcgtatagcaacgcgctgacctaccgcctggactatacctctgcccgagtggctgcccagcaagcggctaaggccggacaggtgcagaagaccctcagcgacgggacccagatcctggcccaggaggatgtggccattgacggccacggcaccgtccaggtgggcgtgatcgccttcagcgacaacagcggcgacgggctgtgggacccccgggaatatattgcctatgtgcccgatggctttgagggtaaggaactgcctgtgctcgtgctctaccctggcaacagccagactgactccatttttatggattccaccctctggtggcaggtggcggacaaagaggggatcgtgctggctttcgtctgcgagacttatagtgccagccccagcagtgtgtctcacgctgactccgacaagttctataactccctgatggccgtgctggaagagactattgacggcacttatgcaaatctggacttcacccggatctacggctccggacagtctgcaggctccatggctacacagggctttgtccgcactaaccccgaattctatgcggctgctgcctccacctctggactggccgtgcctgatggtacttctcagctgcctgagggggctggcggggctatgcccgactttgtcatcactggccagagcgacttggataacctgatgcctgacctgtggggctctgagatggccaatgagtggattacctacctctttgatgtgaacaacatgcctgacgcgcagattggtactgccgatgatgagcatgagtttatcaacgaccgcaccaaggtctatacttgggagaatagcgacggggtgcccatggtcaagtatggatataccctgctgcgtgcccataactgcagtccctatgagatgcccatcctgtgggatttcatggagcacttcagctttgagaaggccgaggacggcacgatcacccgctattacagcgcctccgcgtttgagagagacgacgcggtgatcctgaaataagaatcaactgtagcagaacgaccgggagccccatggggctcccggtcgttctgcttgcggaaaaagccttgcggagttggcgcccgcaggcgtggaccaaattctgatctggtttccccggcgacatgtgcgtcggagaaaacacttctgcgagatatttccgcctggatagacgcttcacagctccagggagccggtggcgatgcaggcgccgctcttccggtggaagagcatgatgttgtccccggagacggtcacaggcaccttctccccgatggtgaacagggagctgccgaagatgacgccggtgagcaggaagtcgtccacccgcaccttgatggtggactccatgccggtgggcatggcgccatagatctccccctccaggggactctggtccgcaatatccagaaactccgggcggatacccagcaccaggtcctggtcggtgagcactggatcgtcctgaagggagtcgtcgtcctccaccaccttggcgatgtggtagcggaaagcctcgtccttattgcccttctccacataggacttctctgccgcgcgcttccgatgggcctcctcccaggccgccgcctgggcggcccggtcccggaaccactggggaaggtccagcggggtgctggggcggaagagtgctttccggccctggaacacggtgagctccaccgcgccgtcggcccgctgcgcccccttggcctccacgaagttgatggaggggttgcctacgaagtcggccacaaacaggttgttgggctggtggtacacagtgaggggggcgtcgtactgctggagcacgccgttttcaatgaggcagatctgggtggccagggtcatggcctccatctggtcgtgggtgacatagacgaaggtagaaccggtctccacgtggaggcgctggagctcatagcgcatctccaggcgcagcttggcgtccaaattggacaggggctcatccatgaacagcaccgagggctcgggggccagggtgcgggcgatggccacccgctgctgctggccgccggagagctctgcggggtagcggtccataaacatgccgatcttcacgatgcgggccacccggcggacggtgaggtcgatctcctcccgggtgagcttgcgggtctcggtgatcacctggcccccttttaccaggcggaactccccgtccagctcgccgcccgccgcagcggcggactgcctggcggcctccaccctgccccggagggaggcgatctctccagacaggtcgggggactgctccaggcggtaggagaggagctgcttggcggcgtagatggagatggtgaatgtgtccaccagcttcagctgggccttcttctggtccagcctgccgtccttgtcccggcactcctccagcacccggaccacctcggcgggctgctccaggatctccgctaaacgggcggcgttcttggcttcgaagtcgaccttgggcaggggctccttgatgtttttcaggccgaaggagatgttctcatagacagtcatattgggccacagggcgtagttttggaagagaaagcccaccttgcgcttgttggccgggatgttgatgcccagggcgctgtcaaagaccacctggtcaccgatggtgatgcggccgctggtgggggtctccagaccggcgatcatccgcagggtggtggtcttgccgcagccggaggggcccagcagagtgacgaaggcattgtcctggatgaccagatccaggtcatccacggcgtagaacttgccccagcgcttggtcacatgttctaatttgatctcaggcatggtttaacctcctattccctcgtccagactggctccggtgaccttgttgaccacggtgttgaacaccaggatggtgatgatcaggatcaggttgatgccgctggagaaggcgtatagacccatctcgtcgaagtagtccagggtggtggacaggatgaagccctgggtgcacagcagcatgaacagggacagctcccgcaggcaggtcatgaaggggagcatatagccgctgatgatggaggacttctggatggggatgatgatgcgggtcatccgcttgacccagggcacatcctggatgatagcggcctcctcgatctcgccggacagctggagcatggagttgagggagctgcggctggcgaaggggatgtacttgattgtgcctacaatgatgagcagagtataggtattgaagaggttgacgtgctcattggaaaacaggacgaagaaggccgcccccacggcgatggagggcatgaggtaggggaggaaggccatggagttcacatagctggccgccttacttcgccggttcttggacacggcgtagccgatgagggtgccgatggtgcccgccagcagggcacaggccacgctgaccagcagggtgcccttgaatgcgttccagatagtgtcgttgtggaggatgcctttctgtccgtacatgccgttttcggtgatgttctcatcggtgacccaccacttggtggtcaggttgtccgggtccccggtgtataggaaggagtagtcccccggattggggaggaaggtctcgaaggcgaaggagacgatggggaagatactggtgaagaaggtgaccaccaccaggaccagggcgatgatgtatttgcccgcccggcccagattgatcttggagatctgtcccgacttgccggtgacggtggtgtagtttttccggctgtggagggacatctggttgaggagcatgatggccacgccaaagatcatcatgatgatggccaggatgctggcctcgccggtgtacttggagttcatggacacgtacttggtggacagagtggtcaggcccaggtagtggggcacggggtaggagcccatggagctgccgaagaccagcaggatggtggacagaatggccggcttcaccataggcagggtgatcttgcacatggtcttccacttgggggtgtccagaatggtggctgcctcctccaggttggcgtccatgttgcggaagatgcccccgatgaggatataggcgaagggggcgtagtgcaggcccagcaccaccaggctgggaaagaggcccttgcaccaccacaggggcatctggatgcccgcggtagcggccagcaggccgttggaggtgccggtgacggcgttggagttgaacaggttctgccacaccacagccagggtccattggggcatgatgtaggggaagatgaagatggagctgaggtatttccgccaggccaggttggtgcgggtgaccaggaaggcgaacactccgccgaagaggatggacaccaagcaggtgcccacggccagatagatggtgttcagcaggggggtccacaggttggtcttggccaaggtgctggtgaacaggtcgatgtagttcaccagggtatagccggcggtctggccggtgagatgggcatcgatggtgccggggtggatcttgaaggtgtcctccacaatggccacgatgggggcgatggtggtgatggtcaccacgatgcccatcagcagcaggatcacgttgtgaggcttggacaggaaggtcctgagcctgttccagaggatggcggaccgtgcggcgccgggggtcgtggtttggttcatatgcggcactcctctcatgcgggaatggaggggcgcccttggaggcaactcggctccaagggcgccctgctctgcgtttcgtcaaaaccggcgctcagcgcccagaggtccggtgacgccggggatggggctcagccggcgctgtacttgtccagcatctcgatccagctgcccacggtgaaggagacggaggcgcagtactcggggtcctccaggaccagcttgccctcgttggtccaccagtcgtagccgtggtcgttcagggcggcgtactccacggtggtgccgtcctcggccatgccgccggtctcgtggtgatagatggcctcgttttccgcagccacctcgggattagaggagtagccgccgatgtccttgccccaggcggagaagccgtcggcggtgcaggtcatgtaggcgatgaaggcgcaggcagtccagggcagagggctgttgtcggtgacgaacagatagtggcagtagccgaaaccgcccataccggtgtagccgtcgttataggccgccacggtgatgttgttcttggagacggaggcggactcctccacgctgcgcagcttggagtagacgatcaggccgaactggtcagtagcggactggtccaccaaggtgttgcagatggggccgtcgtcagtctgggcattgtagctgcccacccacagcttgatccaggccagggcgtatttgccgttctcccccaggcccaggctctcggcctcggaggccatctcgttgatggtgggctggaagtaggcctgttcctcggcggacagggcatcgaaggcctccttcagcatggcggcgtagtcatcccgggtgagcatatacaggaagttcttacccacgatctcagagtcgatgtccataaacaggccgtgctcgccctcggccacgaaatcccagcagttgtcataggatttggaaccggtgttgttgtacatgaagatcttgttcagagtctgaaggggcagatagccctggtactcctcgggggtggtgccgttggcctccgcccagtccttggggatgaaggtgtccagaatgccggtctggaccatcttggactcgatctggttgccgtcctggatcagggtcatggcaaaggtgccggtgtccttcagggagtcggcggtgagctgatcgaagatcttgttgttcttgggctgctgccactcgaactccatggtgtagcttgggtcgatggactgcagatactcgatgaacaggggcagggcactcttgccgcggctggagttgcccacgcccaggaaggtcttgccgttggactcctcgatggccttctgggccagttcctccagggtcatcccctgggcctcctggatgatctgctgggtgggtgtcagatcggcggagggctggggctggggttcgctgccggcaggggcggagctgccggcgctggtccccgcagagctgccgccgccctgggtcccgccgccaccgccgcaggctgccagggagaagctgagggcacaggccaggagcaatgaaatggtacgtttcattttggttcctccttcatcatttttcataaaattgaacctgatatcccaggtcctgtgtgcaattttattgtatcgcctccgtgatggaaaaaacaggggacaaatctgcgcttttttgttatcttctgcaatttctgtggaaattagatgaaaagaggagggggggtgtgatataattatgcaaaacaccaaactgagcacaaaacaggcgaggggggagcggaatgagaggacggctggcagcgctggccctgatattggggctgctcctgaccgggtgcgcggccggggagagggcctctgcatcagagttcgccccggaggagggggagcggctggtggtgtacacctcccacaaggaggaggtctactggcccatcatccaggagttcgaggcgcgcaccggcatctgggtggaggtggaggcggggggcaccagcgagctgctggcccgcctgcgccgggaggcggacgccccggcagcggatgtgatgttcggcggcggcgtggacagcctggaggcatatcaggactgcttctccccctacgtctgtgccggttgggaggggctggacccggccatgcgctcggaggagggactgtggactcccttctccgccctgccggtggtgatcatctacaacactaaactggtggtcccggggcagatcaccggctggcgggatctgttctctccggcatggcaggggcgcatcgccttctgcgatcccagtgtgtccggctcctccttcaccgggctgatcaccctgctccgggcggtggacggggatacggacgagaccctgatgcgctttgctgtcagcctggacggccggcagctggacagctccggtgcggtgctggactcggtggccggggggacggacctggtggggatcaccctggaagagaccgccctgaagcgggcggcggcgggagaggacatcgctctgatctaccccgatgatggcaccagctgcatcccggatggaggcgccctggtgcagggagcgccccacccggagaacgcccggaagttcctggacttcattgcaggaaacgatgtgcagagccggctggagacggagttttccagacgccccgtacgggaaggagtggagagcggcggcgtgctgcggccgctggaggagctcgtcctggtggactacgacctggcctggaccgtggagcaccacgacagcatcctcatgtcctgggctttctatctggggggaggggaggagccgtgaaaaaacgccattccttccgcagaaggctgttcgcggggttcctgctggcctccctgctgccgctgctgctgtgctcggccatgctgctccagatcttccgcctgcggctggacagccagttggaggaggagtcccgggagcagctggaccacgtgataagctccctggacggcctgtaccggggctttcagcagacagccctggcccttcaggcaagcccctatgtggcccctgcactctcccggggacagcgggacagcactaccgtctatagcgagctgtacagcgccaccgagggcagccgtctcagcgcccagttcgacctgtatgaccgggacggggtctggatgtactccaccggcagcggcccggtggagccggtgatgcccacccagtggggcgttctctacgccgcccggcagagcgtcgggctggtcttcacacaggtggacggcggggaggggaacagcgcgcccctgtttcggggggcggcccggatcgccggtgaggcgggggaggacgcgggctatctggtcatcaccctgacccgggcggacttccagcgactgctggaggggacctacggcggacagagcgacctgctgctcctcgaccggtactggcggcccgtctacgccagccagaccgccctggccggccgcctggctgtccagctgcgggagcagctgctggcgggggaggagctgggccaggagggggaggagtacgcctatcgggcggcctttcaggaggagatggggctgtacgccgtcctccagcggccccaggcactgaaccgggatacccggggcctgctcaccacggtgacggtgggcagcgccctggtgtgcgtgggcctctccgtgcttatgagcctgcggctgagcaggcagatgttctatcccatcgagcggctccacagcgccatcggcgaggtggtccacaacaacctggacgtctacgtcccaccctatcaggatgacgagctgggggagctggcccagcggttcaacggaatggtggtggccctgaagcgcaaccaggagcagctggtggagaaccagcgggagttgaatgaggcccagatccggatgctccaggcccagctcaacccccacttcctgtgcaacacgctggacaccatgaagtggatcagcaagatcaaccaggtgccccaggtggccctcatgtccaccgacctggcggacatcctgcgcttctgcatctccccggacgagttcgtccccctgcggcgggaggtggagatcctccgccggtacatggagatccagtccatccgcctgtcgggcaagtgccgcctggaggtggacatgcccccggagctggaggagtgccgggtgcccaagatgatcctccagcccctggcggaaaacgccatcctccacggtctggacggggtggaggacggggtgatctgggtccgggtgcgcagtcagggaacccaaaccctgaccatctcggtggaggacaacggccggggactgcccccggaactcatgggaccctataccggccccccggagacctccgggcggggccatctgggactgtataatgtggataccattctgaaaaagcactacggggaggcgtatggcctccgcctcggctcccggcccggcggaccgggagcggcggtgaccgcctcgctgcccctgtggaaggaggaagagatatgctgaaggtactggtggtggaggatgaggagatgatacggaaggggatcgtcctggctgtggactgggccgcgctggactgtgtggtggtgggggaggctgctgacggcctccaggccctgaaggctgtggagcggtacgacccctccctcatcatcactgacctgaagatgcccaatatggacggcattcagatgatggaagccctgcgggcccggggcagccgggcctatgtgatcattctcaccgcctacgacagcttcacctatgcccggagcgccctgcgcctgggagcggtggacttcctgctgaagcccttccacgacggggagctggaggcggcggtgatcaagctgcgccgccgtatggaggcggaagggagcgggaccgcccccgccctgccggagcggaagaagggggacaagagcaagtatgtcctccaggcgatggattacatcggccagcactacggggaccagaacatctctgtgggggagatcgcccagcacctggggctgagcgagagccatttgagccacctgttccgcaaggagaccgactacaccctgctcaactacctcacccgctaccgcatccacaaggctatggagctgctgcgggactgccgcaccaaggtgtatgaggtggccgagcgggtgggctatcgggacatcacttacttctccgccacatttaaaaaagtgacgggcatgagcccgtcggaatttcaggatacctgccgctaggaggctgtgagacatggtgagaggcttggtctttgatttggacggggtgctggtccataccgatgagctccactaccgggcttggaaagccctggccggccggctcggcctccccttcactcgggaacagggggaccgctgccggggtgtctctcggatggggagcctggagattttgctggagggcagcaatcggtcctatacggagcgggagaagctgcggatggcggaggaaaagaatgactgctaccgggcccagctccaggagctgacccctggcgatgtgccggagaggacggtggagaccctgagggagctgcgccgccggggctatcggctgggcctcgcctccagcagcaaaaacgccggggtgatcctgacacgcaccggcttggacgccctcctggaccgggtggtggacgggaaccagatcacccgctctaagccggacccggaggtattcctgcgggccgcccagctgctggagctcccgcccgaggactgcgcaggggtggacgacgccctggcgggggtggagtcggcacggaccgccggcatgaccgcagctgccataggtcccgccgccctggcaggggcgggggactggaatctggaatgcctctcccggctgctggacctgtgcccgcctctggaagggggacgggacctgtgatccggctcatcgcctgcgacatcgatgggaccctgctccgggggacacagcgggagatcagccctgctgtattccgggaggtggtccgtctggggaaacagggggtccgcttctgcccggccagcgggcggcagtaccacagcctgcgggggctgttcgcccccatagcttcccggctgtactatgtgtgcgagaacggggcggtggtgttcggaccgggcgacccgggaccgatattggccaaggagaccatggagagggaacaggccctggagctgtgccgggagatcctggatatggatgggtgcgaggtgttgatctccggggccggcatcagttatctgtgccccaaggaaggggacatcgtggaccatgtgcgctattttgtgggcaaccgcaccgccctggtggaccgcccggaggagatcacggaggatatcgtgaaggtgtccgcctactgccgccggggggccgcggaggcggagccagttctggcaccccggtggcggaggatttggcgggtggcggtggcgggagagaagtggctggactttaccgcggcggacaagggaaagggggtgcgggccctgtgcagggctctggggatcgggccggagcaggtgctggcagtgggggacaattacaacgacgtgcccatgctggagctggcgggagagccctggatcatggagggggcggacccggagcttctgcgccgcttcccccggcactgtgcccgggtggagggtgtgctggagcagatcgggcagcggctggagagctgagcgggaggttcctgctccatatggaaaatcaagagccccctgcgcccgtctgaatattccagacgggcgcagggggctcccccgtgcggtcaatcggagatctttttcaagtcgtagggagtggtttggtagacatagtaattgagccaattggtatagaagagctgggcggcggaacgccagcggacgacaggggggcgggaggggtcgtcctgagcgaagtagttttccggtacggcgatatccagccccttgttgacatcccggaaatattcgttggccagggtgtccgggtcatactccgggtgtccggtgataaagaagcgccgattgtctgaactcttgacggcaaagactccggcctgctctgagatggccagcagctccagctcagggacccgctggatatcctccaagcggttctcggtataacgggagtgggggatgtagaagatatcgtcaaatccccggaacagcggtgactgggtgcgcaccaccctatgggggaagacgccgaagagctttttgcccagatcatatttggggatctggtagtggtaatacagcccggcctgggccccccagcagatgtggagcgtggagtggacatgagttttggtccattccatgatctggcagagctcatcccagtagtccacgtcggtgaaatccaaattctccaccggtgctccggtgatgatcatgccgtcatacttcttatccttgatctgatggaaggtcgtataaaaggaagacaggtgctcggcgtcagtattttgggaaatgtggctcagggtgtggagcagttctacctggacctggagcggagagttggagagcttgcgcagtagctgggtctcggtgacgatcttagtgggcatcagattcaggataagcaggttcagcgggcggatgtcctgatggatggcgcggtattcagtcatgacaaagatgttctcgccctccagaatggcccgggcgggcagagagtcggggattcggatcggcacagaaaggcccccttttattatagtagcagagataaaataagggtatcacaaggagtgtcgttgtgcaagaaggaattagagagatagatgtccactgaaggcggacacattcttttatagagaacaaaactggactgctcgacagagaaaagcaaaaaaagtcgaaaaaaagaaaattaagtgttgacaactgaggaagtgtttggtatagtaatcaagcacttcacgagagcgcctttgagaaaaaggcgggcggatttgaagtgcggttatcacaagggaagcgaagctgaggactttgagatcgactgagaagttcgaaaaaagttcttgacaaagcgagaaagatgtggtaacatatcaaagttgccgaaaggcggcgggcgcacagcgctgcggatgagagaacaaaagagcttgaaaaaactcgaaaaaagttcttgacaaagtgaatgagatgtgctaaaatttaaaaccgccgctgaaaagcgagcgggccgcgcaaaaacaagttaaaaagaatttgaaaaaagttcttgacaaacgagtttgagtgtggtaaaattaaaacccgccgatgaacggcgtgcaccttgtaaattaaacaacgtaacgaaaacacgaagcaccagatttggatttggttgttcaaacaagcttgagcttgaaggacgaccgttaaatttctttgaagctggaatgagcttcaataaagtgatttgaagagcctcggctctttagataccattttattgagagtttgatcctggctcaggatgaacgctggcggcgtgcttaacacatgcaagtcgaacggagtgccttagaaagaggattcgtccaattgataaggttacttagtggcggacgggtgagtaacgcgtgaggaacctgccttggagtggggaataacagaccgaaaggcctgctaataccgcatgatgcagttggaccgcatggtcctgactgccaaagatttatcgctctgagatggcctcgcgtctgattagcttgttggcggggtaatggcccaccaaggcgacgatcagtagccggactgagaggttggccggccacattgggactgagacacggcccagactcctacgggaggcagcagtggggaatattgggcaatgggcgcaagcctgacccagcaacgccgcgtgaaggaagaaggctttcgggttgtaaacttcttttctcagggacgaacaaatgacggtacctgaggaataagccacggctaactacgtgccagcagccgcggtaatacgtaggtggcaagcgttatccggatttactgggtgtaaagggcgtgtaggcgggaaggcaagtcagatgtgaaaactatgggctcaacccatagcctgcatttgaaactgtttttcttgagtgctggagaggcaatcggaattccgtgtgtagcggtgaaatgcgtagatatacggaggaacaccagtggcgaaggcggattgctggacagtaactgacgctgaggcgcgaaagcgtggggagcaaacaggattagataccctggtagtccacgctgtaaacgatggatactaggtgtggggggtctgaccccctccgtgccgcagttaacacaataagtatcccacctggggagtacgatcgcaaggttgaaactcaaaggaattgacgggggcccgcacaagcggtggagtatgtggtttaattcgaagcaacgcgaagaaccttaccagggcttgacatcctactaacgaagcagagatgcattaggtgcccttcggggaaagtagagacaggtggtgcatggttgtcgtcagctcgtgtcgtgagatgttgggttaagtcccgcaacgagcgcaacccttattgttagttgctacgcaagagcactctagcgagactgccgttgacaaaacggaggaaggcggggacgacgtcaaatcatcatgccccttatgtcctgggctacacacgtactacaatggtggtaaacagagggaagcaagaccgcgaggtggagcaaatccctaaaagccatcccagttcggattgcaggctgaaacccgcctgtatgaagttggaatcgctagtaatcgcggatcagcatgccgcggtgaatacgttcccgggccttgtacacaccgcccgtcacaccatgagagtcgggaacacccgaagtccgtagtctaaccgcaagggggacgcggccgaaggtgggttcgataattggggtgaagtcgtaacaaggtagccgtatcggaaggtgcggctggatcacctcctttctaaggagaactcagcagacgatagtttgctgcagtgtcctaggtcagtaatggtggagcgtaaagtcgttacgttgtttaatttagagggcgcacgctggagggcggcgaaccttacgggcccatagctcagctggctagagcgcacgactgataatcgtgaggtcggtggttcgagtccacttgggcccaccactaaaaagctctgaggtatgggggtatagctcagctgggagagcgcctgccttgcaagcaggaggccagcggttcgatcccgcttatctccaccaagatcggattgaagtgtttgggcaatggtccgagcatttcaatctgaccttgaaaaaggttggaagcctgcaccttgaaaactgaacagtgaagcaagcaagaaattgcgagcaagcaacagagaggtaacaaagtaaaatttgtggacttttaaataaagggtaacacaaactacaatgaaccaaatctgaagcctgcataattctaaaatgacgatagagaacagctgaaaggttgttctacgaaggtcaagctagaaagagcgcaaggggaatgccttggcatcaggagccgatgaaggacgtgacaagctgcgataagtctgggggagctgcacataagcattgatcccggaatttccgaatggggaaacccggcggagcaatactccgtcaacctgcgttgaacaaaataggcgtaggtagggaaccgcctgaactgaaacatctaagtagggcgaggaagagaaatcaacagagattccgctagtagtggcgagcgaacgcggaagagggcaaaccggtggatttattcaccggggttgtggaccggcgcacggcagaataagttagctgaacggtatgggaaggccgaccatagcgggtgatagtcccgtaagcgaaaactgagttctgtcagctgggatccagagtaccgcaggacacgtgaaaccctgtgggaaaccggggggaccaccctccaaccctaaatactacctgatgaccgatagaggagcagtaccgtgagggaaaggtgaaaaggaccccgggaggggagtgaaatagaacctgaaaccttgtgcttacaagcactcaaagcacgttaaggtgtgatgaggtactttttgtagaacggtccggcgagttattgtatgcagcaagcttaaggtgttcagcaccggaggcgaagcgagagcgagtctgaatagggcgtatgaagttgtatgcaatagacccgaaaccaggtgacctatccatgggcaggttgaagtgggggtaaaaccccatggaggaccgaaccgacccccgttgcaatggtggcggatgacctgtggatagcggagaaattctaatcgaacttggagatagctggttctccccgaaatagctttagggctagcgttgatttagattaccggaggtaaagcactgaatgggctaggggctgataaagttactgaaccctatcaaactctgaatgccggataattgatgatcagcagtcagtctacgtgagataagtctcgtggacaaaagggaaacagcccagacccacagctaaggtcccaaagatacgctaagtggaaaacgatgtggaattgcgaaaacaaccaggatgttggcttagaagcagccactcattaaaagagtgcgtaatagctcactggtcgagtgattctgcgcggaaaatgtaacggggctaagcgtaacaccgaagcttgggatgcagcaatgcatggtaggggagcgtcgaatacggggtgaagtcgcagcgggagcagcggtggactgtattcgagtgagaatgccggaatgagtagcgagaattatgtgggaatcataatggccgaaaatctaaggtttcttggggaaggttcgtccgcccaaggtaagccgggagctaaggcgaggccgagaggcgtagtcgatgcacatacggttgaaattccgtagccaccgaaacttaagctagaaggacacttggagctatccagacccgggcgttggttgacccgggcgaaagggaccgaaaataagtagggaagctggagaatgacgaggcgagaaaagttctagtgtatgctaaggtgcccgtaccgcaaaccgacacaggtagatgaggagagaatcctaaggccaacgggagaagggttgttaaggaactcggcaaaattaccccgtaacttcgggataaggggagctccctaaggggagccgcagagaataggcccaagcgactgtttaccaaaaacacaggtctatgctaaatcgaaagatgacgtatatgggctgacgcctgcccggtgctggaaggttaagaggagggcttagcgcaagcgaaggtctgaattgaagccccagtaaacggcggccgtaactataacggtcctaaggtagcgaaattccttgtcaggtaagttctgacccgcacgaatggcgtaacgatttgggcgctgtctcaacagcccacccggcgaaattgtagtaccggtgaagatgccggttacccgcaactagacggaaagaccccatggagctttactgtagcttaatactgaggattggtaaatcatgtacaggataggtgggagacatggaagcctgggcgtcagctcaggtggagtcacccttgggataccacccttgatttactggttttctaacctgcggccgtgaatccggccgggggacactgttaggtgggcagtttgactggggcggtcgcctcctaaaaggtaacggaggcgctcaaaggttcgttcagcacggacagaaatcgtgcagtgagtgtaaacgcataaacgagcctaactgcgagaccgacgggtcgagcagtaacgaaagttggagttagtgatccggcggtatgtgagtggaaatgccgtcgctcaacggataaaagctaccctggggataacaggctgatctcccccaagcgtccacagcgacggggaggtttggcacctcgatgtcggctcgtcacatcctggggctgaattcggtcccaagggttcggctgttcgccgattaaagtggcacgcgagctgggttcagaacgtcgtgagacagttcggtccctatctgttgcgggcgtaagagatttgaagggagctgtccttagtacgagaggaccgggatggacagacctctggtgcaccagttgtcctgccaagggcacagctgggtagctacgtctggacgagataaacgctgaaagcatctaagcgtgaaactctccctaagattagatctctcatcctttatggagtaaggctcgacgtagactatgtcgttgataggtcggaggtggaagtgctgcgaggcatgtagctgaccgatactaataagccgagggcttgaccttaaggtcaaggaagaagaatgcaggcgcttgtgagcgaaggaaaagcgagtttcactgttcggttttgaaggcgcaggagatgcacctttagctcagttggtagagcaactgactcttaatcagtgggtccccggttcgaatccgtgaaggtgcaccaagtggtcctgtccaggacgctgggtgcgtcctgggcggggactgctgaaagaggagcgacgatggcccgttggtcaagcggttaagacggcggcctctcacgccgcaaacatgggttcgattcccgtacgggtcaccaaatttctcttgacaaatcaaaaatagcggatataatacttactgttgggaagacggtaaggagagaaaaggcgcaagaacttttctttgcttactttcttttcggagaaagtaaagtaggtgctgattagagcgagggtccacccgttcccattccgaacacggaagttaagctcgcttctgccgaagatacttgcctggagacgggctgggaaaataggtagtgcctacacagacgaggagcagttttatctgctcctcgtttttatttttaactgtgttttttccttgacaaaggggcaaaatatgatatactgaaggcaataacaggaatgattcctattaaatgagtgatgagtgcggagggaatattatgaatcgaaaggcgtttaaccggatcaattatggactattcatcgtggcggctgccgccgatgggaagcgcaatgggtgcatcgtcaactccctgcatcaggtgacctcttccagcccctacaaattctcgttgacggtcaataagagcaatgagaccttcaagaccatcgaggccgcgggcagctttgccgccactgtcttggccaaagatactcccaaggatctggtggacctgtttggctacaagtccggccgggtggtggacaaatttgagggctttgatgtccagaccgatgaggcgggcaacccctatgtgaaggaccacgccctggcccggatcagctgcaagatcgtggaaaagctggatctggggacctatatgctttatatcggagaggctaccgaggcggagaccttgggcgaaggccctgccctgacggtggatgacttcaagaacggcgggggctccacgcctccggccgctaccgtgtaccgcaccctggagggcaatgagggctggaagtgtaccatctgcggctatgtggctgagaaggagaccctgcccgaggggtatcaatgtcccatctgccgggccaatcgggacaaattcgtcaagctgtaagcgggccggagaagagagcataaaagaagggcggctcccataggagccgcccttgctcgcgtaaggtggacagacaaagtgacgggccggttcagggacggcggttcaggatcaggatcgccccgaagatggcggccatacccagcagcttatagggggtgactgcctcatgaaacgcgaaaataccgatgagggcggccacaaagggctccacagtggccagaatagcggccttgccgggctctgcccagcgcaggccctccgtatagagcagatagggcaggatgcagcacaagacgcctatgccaagaccgcccaggatggccctggggtctaaaaggagggaggcgtcctcccataaacgagacaggggcagggagcccagagcggagaacagaaaagtatagaaggtgatggtggagggggagtaccgtttcagggccagtttactgaaaatgctgtacagggcatagccgaagccggaacccaggccgaaaagcaccgcggcggcagagatgctccccaccccggcgggaaacaggccggccaccagcacacagccgcagaaggtgagcaggagggcgccgatcttgcggggggtgataggttcctggaagcagagcgcagagagcagcatcacaaagacgggagaggtgtacagcaggacggcggccacggacagggcactgagtgagatggcattgaagtagcaccagttgaaaaagagcacgctgaagatgccggtccccacaaagcaccagagatcttgcaggcgtacccggacggcggcccggtcagtgaagagcagccagaaaaagtaaaggatggcagccaccgtgctgcgtactgccaccgactccatggagtccaggcccgcggcggtgagcagacggagaaatacaccgatgcagccccagagggcggcggcggaaataatagagaggtaagctttcttctgcatcgggagactccatttcctcgttgtgacgggcggcgggatgccggtggtccgtccctatcataccatgataaagacaggagcggcaagatgaaatatgaaaagatacggcccgggaccttcctggaccggccaaaccggttcgtggcgcatgtggagctgggcggtacggcggctgtgtgccacgtgaaaaatacaggcaggtgccgtgaactgctggtccctggcgcgaaggtctatctggaggagagcgggaacccggcccgaaagacccaatatgacctgatcgcagtggagaaggggacaagactcatcaatatggacgctcaggcccccaaccgggtgttcgaggagtgggcccggggcggaggattccttccggagctgtctctgctgcgtccggagactacatataggaattctagattcgatttctactgggagtcttcagcagagcggggatttgtggaggtgaaaggggtcacattggaggaggacggggtggtccgcttccccgatgcccccacgctgcggggggtaaagcaccttcaggagctggaggaggcccgccgggcgggataccggacggcggtgtgctttgtcattcagatggagaacgtctcatggttcgagcctaacgaccggacccaccccgcctttggggcggccctgcgccacgcggcggaggccggcgtggaggtgctggccatggagtgccgggtgacgccggaggagctgctgcccggccggccggtgccggtgcggctgtgagcctgggcggaaacaacggcatcaagacagctcccgccacggtctgcccgcggcgggagctgtcttgatgggagggtcacatgcccagggcctcggtcagatcctccacggcctcattgacatgcttggccaccttgtgggcggtctttttcatctcccggcgggagggtgccacgctcatgcccacgacggcgccggccaccagtccagtggtcatgccccaccaaaattgtccgctgctcatatccattcctccttttttccaaaacgcaccgtggacgggcgtttcggtcatacgctattcttccccaaaagcgggaaaaatccgttgctaaatcctgctggtttcgctataataaagccggtatcgagatgcggcaggctccggtctgaggcagtggagctgagaaggaggacctgggccggaccgcaggggcatacaacacagagaaaagctgacagtggtgcccgggcattccccccgcggtccccggaggagtttgacatgaaattactgattcagaacggaagggtcctggacccggtgagcaagaccgtgacgctgaccgacctgctggcggaaaacggccgggtggccctgctggagcgggggctggagacggaggcggaccggatcatcgacgcctcggggctggtggtgagcccgggcctggtggacatgcacgtacacctgcgggacccggggtacacctataaagaggacatccgcaccggcacggctgcggcggcccggggaggggtcacctccctggcctgtatggccaacacggacccggtgctggactgcccggagcagctgcactatgtgcgggagcgggccaaggaggggagcggcgtccacgtctaccccatcgcggcggtgtccgtggggctgagaggggaggagcccaccgacgcagaggcgctgaaaaaggcgggggcggtggccctctccgatgacggctgcaacgtggacaacgccaacctgatgcgggacgccatgataagggccaagcggcaggagctgcctgtcctctgccactgtgaggacacctccatggtggagggccgggcggtgaacgagggcagcgtatcccgccagctctggctggagggacggcccgccatcgctgaggagctggaggtgatgcgcgcggccatgctggcggaggagaccggcgcccgggtccacatctgccatatctcgacggcaaaggcggtggacatcgtgcgccggatgaaggagcacggggtgcccgttacctgcgagacctgcccccagtattttaccctcacagaggacgagatcctgacgcaggggtccctggccaggatcaatccccccctgcggacacagcaggatgtgaaggggatcatcgccggcctgcgggacggcaccatcgacgccatcgccaccgaccacgccccccactccgccgaggagaaggccaggcccctcacccgggcgcccagcggcatggtcgggctggagacctccctggcagtcaccctgaccgccctgtatcacaccggaaagatggagctgacggagattgtccgccggatgacggtgaaccccgcctctatcctggggctgtcgaagggacggctggctctgggaaatgacgcggacatcgtcatcttcgacccgaacgaagagtggacggtggacccggagcagtttgcatccaaggggcgcaacacccccttcgccggatggaaggtaaaggggcgggtgaagtacaccatcgtgggcggaacggtcatctacgaggccccctgagagccggcctgcggcggagggggagcagaagggtgggatcggcatgaagacgcggaggagcgtgcccagctgggtgccgacgctgttttttgtgatggggaatctcctgatcataggggcatcggcccagctgatccggctgggatatatccctctcccaggactgatcgcggccttcttttggggagagacctgggtcttctgggggatcacagacctgctgggatggccctggcggctgaaacggtcggtgcgggaggccccgtggaggaaagagtatcagcggcggatcgggcccattcagatcatcacaggggggctcatcatgccagcctccctgctggagctcatgccggcctttctgctgtccctgttggtgactgtggcggggggcctggccgcatataatatccgctgtcagtatccgggaagctggtgagaccggccggaagagggggcggcccccaaaatgtgaaaacaaatagtagaaataaaaatgaaaataacgaaaaggaatgatatttgatgtcttttgacgttctccaggacaagatccgggccatgaagaaccctacagtggccgggctggacgcccggatcgactatgtgcccgagcacatccgccaggccgccttcgcggagcacggcaccgggctggagggagcctgtgaggccatctatcagttcaacgtggggctgatcgacgccctgtgcgacatcgtccccgcagtgaagccacagtccgcctactatgaaaatctgggctggcgggggatggagatgctggagcgcaccatccgctatgccaaaagcaaggggctgttcgtcatcgccgacatcaaacggggagacatcggttccaccgcctctgcctacgcggaaggctggctgtccggggtgaagatcggggaggagaccttcaagacctttgacgccgactgcgtcaccctcaacggttatatgggctctgactctatcaaccccttcctgaaggcagctcagggggaggacaagtgtgtcttcgtgctggtcaagacctccaatcccggctccggagagctccaggatatggtggctggggaccggctggtctatcaggtgatgggcgacctgaatcagcggatcgctaaggggaccgagggcaagtacggctataccatggctggggccgtcaccggggccacctacccctccgacatccgggccctgcgcaagcgcctggagcacaccttcttcctggtgcccggctacggcgcccagggggggactgcggaggacgtgcagtatgcctttgacaagtacggccacggggccatcgtcaactcctcccggggcatcatgtgtgcgtggcagaagaccggcggggacggccgggattttgcccaggcggcccgggatgcggccatcgccatgcgggacgacatcaggcgcttcgtcaccatcgtgtaacagctcccgcaaaagggcggggctgggggaaggaggaaggactatggcaaagcgggcctgtgtgctctgcggagagatggcgggaagctggtccctgtgctacatcaccctgtgcggcaccagtcagaccctgtgcgagaagtgcatgcggcgataccgggatgcggcgggggaggagaagatcgccctcagggagtatatggcccggtcccctcacctgagagagggggaggaggtgcgggagcgcctcccccaggcccggggccagtggcagcgggagctggagcaggcgcgggagcgccggcagcaggaggagcagcgccaggcccaggtgaaaaagaccgcccgctgctgcggccaggacatgaccaagctgggggtatccacctttcagctgggggagcacacctttttgggcggtgacctggaccatctgctgtcaggcagcatgaaaatggcggtgttccgctgcgaggtctgcggccggctgaaattttttgacccggaatgggtccaataagggccgccccaggtgtgcccgcgagacactaaactttccacagagggtgtgacgccattatgaaagtagaacagaaatgcggcatcatcagcaggacgatgctcaatgacgccgccatcagcctcactctggaggcgggggacatggtccggaccgccttccgggccccggggcagttcgtccacatcaagtgcggacattcccggctgctccgccggcccatctccgtctgctcctgtcaggcgggggaaggggacgcccccgaccggctgaccgtagtctttgaggtccggggagaggggaccgcctggctggccggccgccgtgagggacagagcctggacgtgatgggcctgctgggcaacggcttccccatgaagcgggagggccgctatctgctggtggggggcggcatcggcgtgccccccatgctgggttgcgcccagtatgcccccgggcggtgcaccgccatcctggggttccgctccggggacagggtgatgctggaggagcagttccgctccgtgtgctcccaggtgcaggtggccacagatgacggctcctacggcttccacggctatgtggatgcgctggtgcggcgggagctggagggagaccggggctatgacgcggtgctggcctgcggcccccggcccatgctgagaaacgtggcccgggcggcggaggacttcggcgtgcgctgcctggtgtctatggaggagcggatgggctgcggcgtaggcgcctgcctggtctgtgcctgcgacatggcggacggcagccggaaacatgtgtgcaaggacggacccgtctttgacgccagggaggtggattgggatgcctgatgtggatatgagggtggagctggctggggtgactctgaaaaacccggtgtgcgtggcctctgggaccttcggcttcggccgggagtacggggcgttctatgacctgggcgaactgggcgccatctgcgccaagggcctgaccctccaccgccgggagggcaacccgggcccccgaatcgcagagactcccatgggcattctcaactcggtgggcctccagaacccgggggtggacgcctttgtggagacggagctccccttcctgcggcagtatgacgtgaaggtgatcgccaacatctctgggaacacccccgaggaatacggcatcatgtgtgaaaagctggcccaggccggggtggacctgatcgaggtgaacatctcctgccccaatgtgaaggcggggggactggcctacggcaccaggccggaactggccgccgaagtcacccaggtggccaaggctcacgccggctcggtcccagtgatggtgaagctctcacccaatgtgacggacatcacggagatcgcccgggcggtggccggggcgggggcggacgctctctcgctcatcaacaccctgcgggggatgcgcatcgacgtgaacacccggcgccctgtgctgaagatgaacaccggcggcctgtccggccccgccgtcctgcctgtggcggtgcggatggtctgggaggtggcccaggcggtggacctgcccatcctggggatgggcggggtgtccaagggggaggacgcggcccagatgatgctggccggggcctccgccgtggcggtgggcaccgccctctttgctgacccctacgccccgatccgggtgcgggacgagctggccgccctggcggccggccaaggcctggagcgggcggcggagctcatcggcggagtgaagccctggtaaggatacgcggcaggcggagccccggtggggcgtgccgcgaaactcaaaagaaggaataccgaatatgacgaccatctatctgatccgccacgctgaggcggagggaaacctgtaccgccgcatccacggctggtacgacgccctggtgaccgagaacggtctcaggcagatccaggccctggagcagcgcttccagggggagcacttcgacgcggtgtggtccagcgacctgtaccgcacctgcaccacggcccgggctgtctatgagcccaggggcctggaactgcgtaccgacccggagctgcgggagctgaacatgggggactgggaggaccagacctggggccaggtgcgccgcacccagcccggggagctggaccgcttcaaccgcagcgaccccacttggacggccccccgtggagaggggctgggggaactgggggagcgggtggagcgggccctgcgccgcatcgccgccgcccacccggaccagacggtggcggtgttcagccacggcaccgccatccggcaggctctggcgcggatcaagggcatcccgccggaggagtggcacggcctgcgccacagcgacaacaccgccgtctcctgcctgaagtgggacggagcggcgttccagctggccttcgagggggacaactcccacctggaccccgctatctccacactggcccgccagtcctggtggcggagggacgggaagcgggcggaggacgtgaacctgtggttccggcccctggacttggagcgggagagccagacctattacgaggcccggcgggaggcatggatcaccgtccacggggaggacaccccctttgatggggagagctttcttcaggatgcccgccttcactgcggccgcaccccatggggggtgacctgcgccatggcgggggaccggatggcggggctgatccagctggacccagagcggtatgccaaggacggggccggctatatcccattctgctacattgtgccccagctgcgggcccaggggctgggggtgcagctcatcgggcaggcggtgtccttctaccgccccctggggcggcagtatctgcgcctgcgctgtgccagctacaacacccccgcccagcacttttatcagcggtacggcttctataagatcggcgaggagcaggggagccgggtgccgctggatatcctggagaagtacatcggctatgaccgctgagctgcggccgttcaaaaggagggacatgggatggaccatattgcccagatcgcaggaaaactggcggaccatcagctggacgccatgctgctcgccagtcaggccggggagcggtacgccgtgggcttccacggggagggcctggtgctggtgacccgggagggggcccactattccaccgacagccgctacatcgaggcggcccggcaggaggtgcagggggctcaggtggagctggtgacccgggagcggggccatctggccctggccgccggctatctccaggagcacggcctgaagcgggtgggctttgagagcggggccgtgagtgtggacgccctggcccggtatgagagggccctgccctgcaccctggtcccggctcaggacctgccggacggcctgcgggcgtccaaggacggagaggagctggccgccatggagaaggcccagcgcatcaccgacgaggcatttcaggcgattttgaattttatccgcccggggcagacggagcgggaggtggccgcccggctggtgtatgagctgctgcgccggggcggggagcgggtctccttcgaccctatcgtggccgccggcgccaatggctccaaaccccatgccgtccccggagacacggtgatccagcctgggatgttcgtcaccgtggatttcggctgtgtgtggaggggctactgctccgacatgacccgcaccgtggcggtgggaaagcccgcaccggagatggagcgggtatatcaggtggtgctggaggcccagcaggctggcatcgccgccgcccgggccgggctggccgggcgggagatcgatgccgcaggccggacggtgatccaggcggcggggtatggggaggcattttcccacagcttcggccactccctgggactggagatccacgagtcccccaatgccgcgccgggggaggaacggatcatgcccgtgggggcagtggtctccgccgagccgggcatctatctgcccgggcgttttggcgtgcgcatcgaggacgtgatcgtcctgtcggaaacgggatgccgtgacctgacaaagtcgccaaaagagctgatcgtcctgtgattttacagaaaacctcttgtcaaatccagaaaaaaagggtaaaatatatcagttcataaaaacatttggaggatgattcctatggcaatgatttccgccagtgatttccgcaacggcgtgacctttgagatggacggcaaggtcatgcaggtcgtcgagttccagcacgtcaagcccggcaagggcgccgcctttgtccgcaccaagatgaagaacatcatcaccggcggtgtgaccgagacctccttcaaccccaccgccaagtttgagcaggctttcgtggagcgcaaggacatggagtacagctacaacgacggcgatctgtactatttcatggacatggagacctacgacatgctgcccatcagcaaggatatgctgggcgacgccttcaagttcgtgaaggagaacatgagctgcaaggtcatgtcctacaagggcagcgtcttcggtgtggagccccccaacttcgtggagctggaggtcaccgagaccgatcccggcttcaagggcgacaccgccaccaacgtgaccaagcccgccaccctggagaccggcgccgagatcaaggtgcccctgttcatcaaccctggtgacaagatcaagatcgacacccgcaccggagagtacctggagcgctgcaagggctgatggcagagacagatgtccggccccgcagagagcggggatgggtatcgataagattctgcagaggctgaaaagaacaaaatcaggtcgggagagacactggggcagagggtacgacacagaattgaaggaggcttagcctcagaaagggaaactgctatgactatttccgagaaagttgcttatctgaaggggctggctgagggcctgaacctggatgtggagaagtccaaggagggcaagctcatctccgtgatgatcggcatcctggaggaagtggggctgtccattgaggacctagaggagaacgctctggccctcggggaggagatcgacaccatttccgacgacctggcggatgtggagtccgtggtctacggcgaggacgaggatgaggacgactactttgaggttgagtgccccaattgcgaggaacccatcgtcatcgacgacaaggcgctggcggagggggaggtagagtgccccaactgccagaccaagttctctctggacctgtcggatgacacggtggagggagacgaggagtaactccccgcccgaaagcacacaacagcggcgtgacgatttcgtcacgccgctgtttttctctccgccccgccggacaggtgttcagggcaggggagcactgcccatggccgcttccagaatcttatccgctccccgccggtagccgccggcggcgcggaacccttcagagatgtgctgggcgctgtgctgaaaggcaggatcagccaggacgagggagagggcctgatggatggcggcgggggtgggagcgggcagcgggacgcccgcccccaactcctggacccggcgggccaccatgccctgctcctcctgctgggggaagaggaccagggggacccccaggtagaggctctcactgacgctgttcatgccgcagtgggagagaaaggcgtcggactgagacaggacggccagctggtctacctggggaaggacctggacattgggcggaacatctcccagctcttccggcctgcacccaccgcctagagagagaacggcccgtaccccctcccagctccgcagggcctccaggcaggcgcgataaaaggagcggctgcggttgttgacagtccccagggagatgtagatctgcctgtccccgccggagcgtggggcgtgggtcagctcgggcaccgagggcccaataaaggcataccggctggaaaaggtgtcagccaggggctggaattcccgggaagtgtagacgatggtgtcggtgtgtccgtcgttctcaatgagggagagcagtcccttcaccggatagcccgcctggcacagctgggccatgcagcggcggatgcggccccgacccgcaagcagccgcaggaactgccccggcgtctgcttcatcagcttggcggtatggcggttgaaggcgaaggtggtggtggagcagacataggggcaggccagcttggcggcccacagctttccccagaagcacaaggagtcggataccacgcagtggggctggaattgggccagatcccggcccacggggccatccatggccaggagggtttgggtgatcatctccaccagggcggcgaagtcgcggcccacccttcgctccagatccggaggcgccggaggcagataggagtcgcaggggacgaattgggcgccggcggcctggatcttctcccgaaagggggcgaaggagtaatagcggacctggtgcccacggcaggtcagctcccgtaccaccggaagagtgggattggtgtgcccgtgagcatagatggagaaaaaggcgattcggtacatgaagtcccctcctttccctggcagagcttaccgttcctcaggctcttcctgtgtgctcagctgccggatggcctgggcaaaagccctggactccgactcgctgtggtcaggatagatatcccggccccgcccctggaagatggactcggcgatctgctcaaagacctggtagcgctccagggcgatgccccgttgtgcgtcggccaggatcaacagggtgtccccggggctgatctggaacatgtcccggatctccttaggaatgacgatttggcctttcggtcccaccttgacggagctcatatacttctcattgtcagacatcttgatccccaaatctccttaaagtaatacttgtataactaatcttacctgcgaaaggcggaaatgtcaagaaaaatctgtcccctctcccgcgcgggggtggacggccgcctggcgctctgctataatgcacctgttgatccaaaagagcggcccccggcggggctggccgattcagaagaaggagcgggtgagaactgatgaagacaaagaccgtactgctgcgcggggtggagatcggtgcaggcagaccgaagatcatcgtccccattgttgggaagacggagcaggagatcctggacaaagccgccgagctggtccaggccaagcccgatgtggtggaatggcgggtggactacttccagggcgtgggcgatgtccagcgggtggtggatactgccagagagctgaacgaggcactgggggagatccccatcctcttcaccttccgcaccaagcgggagggcggcgaaaaggagatcggtatggaggactacaccgctttgaaccgggccgtcgcccagtcgagctatgtggacgcggtggatgtggagattttttccggtgacgaggtggtgcgcaagaacatcgccgccatccatgatgccggcgcggcggtggtggggtccagccatgaattccaccggacaccggagcacgccgagctcatctaccggctgcggaagatgcaggatatgggggccgacatcctgaaggtggctgtgatgccccagaacaaggcggacgtgctgaccctgctctccgccaccgaggagatgtatcggctgtacgcccagcggccgctgctgaccatgtccatggcgtcggacggcgtcatcagccgcctgtgcggcgaggtgttcggctccgccgccaccttcggcatggtgggccaaggctccgcccccggccagatcccggcggatcagctggaacaggtgctggagatcctccacagagcgctgtgaggtttgaccggcccgcctggagacaggcgggccggtgattttgccagggaaaatggactcaccagcataacggacgagctgcgctgccccataatgctgctgatctgtgcaaaaaaattgtaaaacacagccatgtctgccccgatttaccggcagtaaagggcaacgctgtgggcacaataaagctcggatggaacttccgtatgagaaaagtgtgggatcaggtcccgtctggaacgtgtgccaggcgggacctgacagccccggccggaccggccgggctggaacggaaaacgggaggatttggaatgaaaaaagagctgatcgccctgggggcggctctggccctggtggggaccctgaccgcgtgcagcagcacgccggcggaccagaataaggggagcgccggcagcggcgctaccggcagtactaccggtagcgccgccgggactgcctatccccggtctacccgctacgggatgaacgggaccgccggcggccatggctacacctatgacggccgctataccgccttccccgacggcagagtggcaccgggccggggcaatgcggcccgggacatggagcgagtgggaaaaggcgtggctgacgggacccgggacttggtgaacggcgtgggcgacgtggtgcgcgacgccgggaacggtctgcgggatgccggccaggcagtgaaaaacgcagctgaccgggacatgtgacccataaaacgctgagaaaagaccgcgcggagatcactctccgcgcggtcttttactttggaggccgcttgccccgctggtgcgccggctttgcccggcggccggtatgggaggcgcggccaccggctgccggggccgggcggcccttccgtggggcctgcctgccttgccggttctccttcgggccggagctgccccgggcctgcttggcgggggcatccccccggcgtccctgacggctccccgccccggaggcgggggcatccggacggatcaggcaccgcttcccataaccgatcagatcctcacggcccgtgcggtggagagcctccaacaccagcttccggttttggggcttgcgccactgcatcagtgcccgctggagggccttgtcgtggggcgtgcgggggacgaagaccggctgcatggtgcgggggtccaggccggtgtaccacatgcaggtagacagggtgccgggggtgggatagaagtcctgcacctgctccggcatgtgtccctgccggttgagccactccgccagctggaccgcatcctccagggtgcagccggggtgggaggagatgaggtaggggaccaggtactggtccttgccgtagcggcggttgagcttgaagtacttctcccggaacttttcatagacctggatgtgtggcttacccatatagtccagggtgtgggcggagcagtgctcgggcgccaccttcagctggccggagatgtggtgctggatcaggtcggtgaagaactcgccgctggggtccttcatcagaaaatcgaaccggatgccggaacggatgaagaccttttttaccttggggagctgccgcagcttgcgcaggagcatcatatagtcagtgtggtcggcgttcaggttggggcagggctctggcgccagacaggcccggttcctgcacataccgtgcttgagctgtttctggcaggagggacggcggaaggtggcagaggggccgcccacgtcgtggatatagcccttgaagccggggtggcgggtgagggcctctgcctcccggagaacagactggtggctgcgggcggagatggtgcgcccctggtgaaaggccagggagcagaagctgcacgccccaaagcacccccggttgtgggtgatggagaagcgtacctcctcaatggcggggacgccccccatggagtcgtacatgggatggggctcccgtacatagggaagctcggccaccgcatccagctccgccgtggtcaggggataggcggggggattgaccagcaggaactggtgcccgtgcttctgaaggatggcctttcccacgaaggggtcgtgctcgtcatattccaccatgttggcccgggcgtaggcctccttggaggcggacacctcctcaaaggaggggacttccacgaaggggtaggcacatgcgccggggtgggggacggcggcgcatgtgccgcgaacatcggtgatctcccccaccggtgtgccggaggccagccgggcggcgatctcccgggaggcggtctcccccatgccgtaggtgagaaggtccgcctgggcatcgaagaggatggagcggcgcaccttgtcttcccagtagtcgtagtgggcgaagcggcgcaggctggcctccagcccaccgatgacgatggggatgtcgccgaacacctcccgcacccggttggagtagacgatagtggcccggtcggggcgcaggcccgccttccggccgggagagtaggcgtcatcgtggcggcgctttttcgccgccgtatagtgggccaccatggagtccaggttcccgccggagatcagcacccccagccgggggcgtcccagggcggagaaggcctccggccgccgccagtcgggctgggagagaacggccacccggtagccctccgcctccagtacccggccgatgatggcggggccgaaggaggggtgatccacataggcatccccggtgatgaggagaaagtcgtaaaagtcccagccccggcgggccatgtcctcccgggagaccgggagaaaaagatcgcggtcaagttccatggtgaacctcgtttctcagtgtgatcaggcatgggtccctcagaaccagagggccctttcctcccggaacatgggcggatctccgttccggtaggggtcataggtgtccaggttgcagccaaactcctggagacggcggatggtgccctcctgggtccactccaccagagagaggccgtcaaaggtctggaccgcgccgtcgttcatcacacagcggaagcgccactccacaatggtggcgtcctcccggtggaagaagcggccgctgtcccagacctccacccggccccgggtgttccactcctggaaccagtgacggatggcggcggcgccgtggtactcggggccccagctttcaagataaacggcatcaggagcaaagagctccagaatacccaggtcttcccgccgcagccacatgtccagccagaggcggatcttttgttcccgttcctgcgtatggtgcatatgggtctctcctgaaaatataaagatttttgagatcggggtctcaggagcgtccttatccctgtgcagtcaggacctcctggtagatgcgcttcatggtaagggcatctttggcctgcgtgccggcgctctcgcagatgaaagtgggggaccagccccggcgggcgatcgcccgggccagcggagcccagtcagggccgtatccgtcgtcgtcgtcaaaggtgcggtggcacttttctcccccgccgggggtgaactggatgtgggagaaatggctgtgaaagacgctggccctggactgccctagaacggactccacccggtccagcatccgcccgaaggcctccgctccgtcatccgcccccagggagcgggcgtacaggtggccgaagtcgatgcaggggatcaagcgctcgtccagggtgcacagctccagcacctcctccagatcccccagttggttgatcttgcccatggtctcgggacacagggcgatgtggccgaagccctggccgtcgcaggtccggatcacctccctcagggagcggagggctgtgtccagcgcctcccgacgggtgcgcttcatcagggcgccggagtggatcacaacccgggaggcccccatctgactggccaccaggcaggcggaggtgatatagccgatggtcttttgcaggctgtccgggtccgggttggccagattgatgaaataaggggcatggagagagagggagatcccgtgcttccgggcgttctcccctaccctccgggcggtgtcctcccccacatggacccccttgccgcattgatattcgtagcagtccagcccctgctccgcgatccactggggggcggccagggaggacttgtggacggcggagaaagcgtcgctgttgccggcgggcccgaatttggcgctcataggaagggcctccttttgcccagcaggcggaagggggtctccgccgcgtagcggagatagcgccccgggttgcccgccagctggatgggttccaccagcaaaggggtaactccggcgttgttggcccccagagtgtcggtgaagatctggtcgcccaccatcaccgtctgagcgggggtgcagcccatgcgctccatggcctgaagatacccccggcggcggggcttgcctgagcggccctgaaagggcacacccagggcctgggcgaagttctgggcccggcccggcttgcggctgttggagaggatgaacagggcgatgccctgggcggccagggcgtcccgccaggcggtcagctggggggagggctgggcgacccggtaggggaccagagtgttgtccaggtcagccagcaccagccggatgcccctggcggccagggcctctgggtccagggcggaaaaaccggggtagaccccccggggaatgggtgagaatcgcaatgaaggtcgtcctcctgtcggtgttctaggatggagcgggacggcatagagtgggggtgtgaggcggcggggccgggcggaagcccgggccggaccgctccgttgaggttgagatcatatcattatatcatttccaaagaaaatggacaagggggagctagatatgagcatggaaccgctgatcgtcaccgtcccgccggcccggatcggggagctgagggggctgcgggccgtgccggcccaccagggctaccggatcggccgggggccccacctcttccgggcggcggcggggccggtccctcagggcggactgatggccctggactgcgtgggctttgacggcagaggggaggccgctcccctgtgtgatgaggtggtgcgggagtgcgccgccaggggcttccggggcgcggtgtgcgactttgagcagggcggggtgccgctgctggatcaggtggtgcggcggctgggggagggcttcgcccgccggggctggacgttgtatgtgacggagccctatggacacagttctccccgggcccgggtgatgatcccgtcggccctgtccggaggctcgctgtcccggcgtctggaggaggcggcggagcgcttcggccgggagcgggtgaccctggcggtgcagcgggtggcggaggacttttttctgccctcccccacagggagcggggtgcccctgagccggcgggagctggaggagaagctggagcagctgcacccctcggtgttcttctcccatgagctgtgcgcccgctacttcacctacatgagccgggagagcggggcccacttcgtcctctttgacgacagggacaccctgcgcaagaagctggaggtggcccaagagctgggcatcacttcggcggtggcggcgctgcctgaggtgctggacgcggcgggggagctgggaattcggaattgacggcaggggggccagggagtaaaattggggtacaacaactgtgaggaggcggccccaatggtacgtcatatcgtgtcctggaatttcaagcccgagctgagtgaggaggagcgcagggcggcggcggagaccctggtggcccggatgaccgcactgcgggatctggtgccctgcgtggagaggctggaggtgtttcagccccccatcggtctgagcaactgcgacctgtgcatgtacacggagatcgacaaggaggaaaatctggtggtctaccgggaccacccggagcaccagaaggtggtcaagctgatccatcagtggtgctgtgaccggcggtgcaccgacatgcccatgtgatgggaaaaagagaggcaggcggagggcgtgagccctccgcctgctggcagttttgaggggatggatatgatggggagcggggccgggtctctgtactacatggggaacggtgccctgccccgtctgggtgtgcggcccgatgggtgatggggccctgtatggtgcacagttctccctcagtcctttgcaggggcggggcctgcccccgcccgcagttcctggatttgcggcgtagcgtaggggcgagtcccagacccgccccttccgccgatgccggcggaaggacacccctcatccgtcacggcttcgccgtgccaccttccccccggaggggggaaggctttggggggcggctctgggggccgcccctgcggggtatctccgccctttgcgtgatccttgaggtgcagggtccgatgggggcatcgggccctgcatggcgggcatttctcctggttttggtgtagggcggattcgggggcattgaaacgctcaggcagggtcctgggcgttttcagcatttcggctgtccatcatctcctgcaggtggcggaaaaattcctctggaggcatgatggatttaaagcggcggtagaaggccacgccgaaccccatggacaggaaaagactgacctctttgttctcctcggtattcgggagcatcttgacggcggacaggatggtggagcccaaaatgtccacgatctcccccgcctcctccattgtggcgggtcgtttcagatatgtttggaattcttccaatgtcataacactcacctcaactcctaacataccaaaaacaattagaaaaaacaagttgtaattttgattatattaaacatcaaaagaacaaaatataatttcctcatagaatagtgaggagaaagtgcaatggcctttacgataaaaccaacaaagaggaaaaaggaatccgtaaaccgttctatttatttgagcaaagaagtccatgacaaggtgttgaaaattgcggcagagaacgacaccagcttcagcaacgtggtggtcagcatgatcgaatactgcctgaaggagcaggagtcagagcaggaaagagagacataaaacagcgggcgccgggatctccggcgcccgcttcaatttgccaaaattcgcgcccgcaggcgcggatcaagttgagaagtgttttccccggcggcatgtgcgtcagggaaaacacttctcaggctacaggtgtggggtttgtccgcctgcggcggacaaaccctgcgcgcggcagactgcatctttctcgaaaaagcggcaaagccgctttttcgacagtttccggcgcccactccagcttttggaaaaacctcgcagagtccgcgcccgccggcggggcgttctcaataggtgtgggtgcacagctcctggatcttggcctggagctttttcaggtcctcaaaggtctcgggcctgcgccgggggtcccggaggatggcggcggggtggaacagggccatcatctggacgccggacttctcgaaccactggccgtgttccttggtgatcttgaaatcctccttgatgatgcgcatggcggcgatgcggcccagacatacgatgatcttggggcggatcagggccgcctgattgcggagatagccgatgcaggcatcctgctccgtattcagggggtcccggttctgaggcggacggcacttgacgatattggcaatgtagacgttcttatgccggtccaggtcgatgagctccagcatgtcgtccagcagcttgcccccccggcccacaaagggctcgccctgaaggtcctcgttctcgccggggccctcaccgatgaacatgacctcggcgtcccgggggcctacgccgaacaccacattggtgcgcttatccgccagggcgcacttctgacaggagaggcactgggcctccagctcgttccaattcagcatcatgaaaaacctcactccaaatgatccgggtccgggggcgcggccccctcctttgtgccagtctagcataaaatttcctcgtgtgcaaccaaaaatcggacacggattctgtataaaatgaccattgacagggaaaagtgaagaagcgtataatccgaccataaaaaatccatatggcaaaagcgctgatgaagaccgcgctccaaggcgtccaacagagagaccgggtcaccgactgaaagcctggttgggaaagacggagctgcgcaacacttctgagctggcggttcgaaccggagagatccggctgagggccgcacgtattccccacgttagaggggctcgaaagaggttccttgttggaggagcaacgcgggtggcaccgcggaatgatttgaaattccgtcccgggtcgtatcatttttagatacggcccgggatttttgcgttcctccggaaagatcgatcaggaaaggatgagatcagcatgaagtatgtcacggaaacaaagcacgtccccctggggttcggggaaatcgcgggaggagcgctggacgggcaggccgtcaccctgaagggggcggtccacagcctgcgggccatgggcgggatcaccttccttgccctgcgggtgcgggacggggcggtccagtgcgtgtgccggccggaggagctgccggaggggctgtgtgaggagtgtgccgcggtggtcaccgggacggtgcggcgggaggaacgggcccccgggggccgggagctggcggcggaggaggtgcgggtgctgtcccggcccgccgcgcccatgccggtggccgtctccaagcggcggctgaggctgaacctggacacggagctgtccctgaggccccttgtgctgcgcagcctgcgcacccgctccgtcttcaaggtgcaggagggaatcagccgggccttccgggagtacctcaccgcccagggcttcaccgagatccacacccccaagatcgtccacgccggggccgaggggggcagcaacatcttccggctggactacttcgggcgcaaggcatttctcgcccagtccccccagttctataagcagactatggtgggctccttccagcgggtctttgagatcggccccgtcttccgggcggagaagcactccaccccccggcacctgaatgagtacaccggcctggacctggagatgggcttcatcgactccttctacgatgtgatggaggtggaggccgggtttttgaaatactgcatggagctgctggcgcgggagtacagcgaggacctgaagcggctggaggcggagctgccccgggtggaccgtatcccctgcgtgcggttcgatgaggccaagcggctggccgcggagaagtatggccgccctatccgggacccctttgacctggagccggaggaggaggccaacatcggacgctatttccaggaggagtatggagcggactttgtctttgtcacccactaccccagcaagaagcgccccttctacgccatggacgacccggaggacccccgctgcaccctgtccttcgacctgctgttccgggggatggaggtgaccaccggcggccagcgggtccacgactaccaggcccaggtggccaagatggaggcccgggggatgcacccggaggagttccgggacttcctcaccatccaccagcacggcatgccgccccacggcggcctgggcatcggcctggagcggctgaccatgaagctgtgcggcctggagaacgtgcgggaggccagcctgttcccccgggaccagagccgcctggagccgtgagtttgaaaacatgcagagaggtgaaacagaatgaagatcacaacggaaatggcggcccatatcgccgccctctcccggctgaagctgtcggaggaggaggccgggcggatggcgggggagctggaacagatcctctcctatatggatgtgctggacggcctggacaccagcggggcggagcccatgagccacatcgtccccctgaagaacgtgctgcgggaggatgagacagccccctccatggaccggggggagctgctgaagaacgcgccggccaccgacggagggactttcctggtccccaaggccgtggaataggagggaaggacgatgcaggagatcatgaaactcaccgcgctccagctgggggcggccatcaggcggggcgaggtcagccccacggaggcggtgaaggcggcgctggagcgcattgaggagacggcgggggacaacgcctttactgaaattacggcggagcgggccctggagcgggccgcctgggcggaaaaggagctggcggcggggcggctggcgggccccctggcgggggtccccatggccctcaaggacaacatctgcaccagaggggtgtccaccacctgcgcctcccggatcctggccgggttccgccccccttatgatgccaccctggtagagcggctggagggggcgggggccgtctccctgggcaagctgaacatggacgagttcgccatggggtccaccagcgagacctctttcctggggccggtgcgcaacccctgggaccgggagcgggttcccggcggctcctccggcggtgccgcggcggcggtggccgcccgctccagctggtacgccatcgggtcggacaccggcggctccatccgccagccagccgcattctgcggcgtcaccgggatcaagcccacctacgggaccgtgtcccggtacgggctgatcgcctacgcctcctccctggaccagatgggtcccctggcccgggacgcagccgactgcgccgccgtgctggacctggtgatgggccgcgacccgagggacggcacctctctggatgtgcctgctggggggctgctggccgccctgaccggagacgtgaggggcctgcggatcgggctgccccgggagtgcttcggggaggggctggacagtgcggtgcgagcctgcgtcctggcggcggcggacgtgctgcgggaccggggggcagagctggtgcctctgtccttccccatgatggagtatgtcatcccgacctattatatcattgcctgcgcggaggcgtcctcaaacctgtcacggttcgacggggtgaagtatggctggcgggcggaggggtacggggacctgcgggagctgtatcagcagacccgcaccgagggcttcggccccgaggtccggcggcggatcctgctgggcaccttcgtgctctcctccggctactacgacgcctactacctgaaggctctgcgagcaaaggggatgatcaagagggccttcgacgaggcattctgtcagtgtgatgtgatgctcactcccaccgctcctgccgcggccccccggctgggggagagcctgtccgaccccttgcggatgtacctgagcgacatcgacaccgtgccggtgaacctggcggggctgccggggctgtctatgccctgcggctttgacgagacggggctgccagtgggcgcccagctcatcggccctccgctgggggagaagaacgtgctgaacgccgcccacgccttccagctggagacagactggcatacgcgggctccggcggaaaaggaggttggatgacatgacctgggaaactgtgatcgggctggagacccacgcggagctggccacccgcaccaagatattctgctcctgcaccacccggttcgggggagagcccaacacccactgctgccccatctgcactggaatgccggggaccctgcccatggtgaaccgaaaggtggtggagtacgcctgccgtgccgggctggcgctgaactgcgagatcacccggcgcagccggttcgaccggaaaaactacttctatcccgacctgcccaaggcgtaccaagtgtcccagctctacctccccattgcccggaacgggcgtgtgagcatcgccacggcggcgggggaaaaggtggtccgcatccacgagctgcacatggaggaggacgcgggcaagctggtccacgacccctggctggaccagacccgggcggactataaccgctgcggcgtgccgctggtcgagatcgttaccgagcccgacttccgctccgctgaggaggtgatcgcctatctggagaagctgaagtccatcctggagtatctggggatctcggactgcaagatgcaggagggctccctgcgctgtgacgtgaacctctccgtccggccggcgggctcccgggagcttgggacccggacggagatgaagaacctgaactccttcaaggccattgcccgggccatcgcctacgaggcccgccgccaggcggagctgctggaggagggcaggcgtgtggtccaggagacccggcgctgggatgacaacaaggacgccaccttctccatgcgctccaaggaggacgcccaggactaccgctacttcccagaaccggacatcccgcctctggagctgtcggaggagtacctggaggggctgcgggcggagcagcccgagatggcggaggagcggaagcggcggtatcagacccagctgggcctgccggagtacgacgccggcatcatcaccgggcagaaggccctggtggacttcttcgaggaggtgacggccctgggggtgccggccaaggaggcggccaactggatgctgggggacatgatgcgccgcctgaaggaggaggagctggagccaaaggacatgaggctgacccccgccaccctggtcaagctgatcgggatggtccaagcgggacggatcaaccgaaacaccgcatccaaggtgttccggggcattttcgcggaggacctggacccggaggagtgggtgacggtccacggcctggagcagatccgggacgaaagggtcattgccggcgcggtggcccgggtcctggaggagcatccccagtctgcggcggattatcgggcgggcaaggagaaggcccttggttttctcatgggccgggtgatgaaggagctgaagggcaaggcggacccgggggcggtaaacgctctgctgaagagccgcctggagacaggaggatcggaggggggataaaagagtgccccggaaaggaaagaaagcccggtgtatcctgaacggaggggcggtgccacatattgtgcgctgaaaaccggtctatacaacgccttgcatgggtcaaaagatgtaaaccaaaatcgggcggcggaaacacagtttccgtgccgaaaaaccgctgattttctgaaaaatcagcggtttttttctgtgccgaattgaaaaaaagtcttgcattttatgtaaagtgcttttatactaaaaggcagagtggggcaaagtggagtaaaatcccgctgagatccatcaaagtggggagggagagcgatgaccggcacctatgaacacagcatcgatgccaagggccgtctctttatccctgccaagctccgtgaggagctgggcgtgaccttctacctggccatgggggtggacgagtgtctggccatctacccccaggagacctggaaccgctttacagaaaaatttgcttccctgcccatgagccagtcggccgccatgcgccccctgtttgccaacgcctcgaaatgcgagctggacagccagggccgcatcgtcatcccccagaagctgagaaaatacgcgggcttggagaaggacgccgtcatcatcggcgtcaacgaccgggccgagatctggagcgctgagacttggaatgcccgggaagaggaggagatgaccccggagaagatgaaggcctgtctggccgcactggggttctgacgaaatgagtgagacctttacccaccgcccggtgctgctgaatgagtgcatccaggcgctgaacatccgcccggagggtgtctatctggacgggaccctgggccgggcaggacacagccgggagatcgcccggcggctgaccaccggacggctgatctgcgtggaccgggaccaggccgccctggaggcggcggaggagcggctggcccaatggcgggaccgggtgaacctggtccacagcaatttcgaccagatcgataggatcttgaacgagctgtccctgtccggcgcggatgggatgctctttgacctgggggtgtcctcgccccagctggatgacagcacgagaggattctcctacatggcggacgcgcccctggacatgcggatggaccagagcggcgggatgaccgccgcagaggtggtcaaccagtggccgcaggaggagttgcggcgcatcctgtaccagtatggagaggagcggtatgccccccagatcgccgccgctatcgtccggcgtcggcaggacaggcccatccagaccaccatggagctggcgcagatcgtccgggaggccatgcctgcccgggcactgaaagagaagcagcacccggccaagcggtctttccaggccatccgcatcgcggtcaacgacgagctcgcctcggtggaccggatgctccaggcggctgtgccccggctgaatccggggggacggctggccgttatcaccttccactccctggaggatcggatcgtcaagaccggcctggcggagttcgcccggggctgtacctgcccgcccgattttccggtatgcgtatgcgggaaaaaaccccagatccggttggtgagccgtaagccgatcctgccctcggaggaggaggtccgggacaatccccgggcccgcagcgccaagctccgggcagcggaaaagctgtaaaaaacgactctgcggtcgtctgtgatatgtgtgttataaaggatactgaagagaaatggagtgaatgccatggccacccgccggcgcagtcagctaagctcataccgaacctatggcagtgtggcctacgcccccgcctatgacggcaccgctgtccgggcgccgaggcgggaggaggtgctccgtcccaagccccgggtccgccccagggagcgggtcctcacccgtacccaggtccaggtccgagaggcggggcaggcctcggtattcgcagtgatcggctttttagcagtgggggtgttcgccgccctgctgctgctgagctacacccagtacgccgtgctgactgaccaggtggtgaccctgcgcagtgaactgaccaccctccagacggagaacgctacgctcagcgcagagtatgagaaggtatttgacatggagcggatccaggcggctgtgggagataccatgatccggcccaccggtgaccaggtggagtatatcgatctgtccgagcctgacagcgtggtagtgtacgggcaggaggacgccaagaccggcatcccgggcctgctggcggggctggaggagatcatctccagtctgatcgaatatttccggtgacccgccgcatatagtgatccatgggtggacgaaagagatagaccgggcggaaggggctccccccgcgcccggagcaagggggcgcaagaaaagagagcttttcttgcgcctcagattatcaaggcagagcggaacgcacggcaaagcagggaaacggacccagaggaggagaccccaggatggacgatcgcagagaacgaaataccggccgcagtggacgggagagcggctccaagcgcaagatattccgtcgcacggtttttctgatgctggtgtgcggcgtgggtctgttcatcccgctgatcggccagctgtggaacatcgccatcgtccaccatgaggagtatcaggctgaggcggtggagcagcagacacgggatgtggaggtggctgctttccgggggagcatctacgacagcagcggagacgtgctggccatgtcagccaccgtctacaacctgatcctgtctcccagggacctggaggccagcgtggacgagtccaaatacaaggatgaggagggcaatgcggacctgacggcctatcaggcggccctccaggccaagaaggacctggtgctggacggcgtgctggccgtgctggacctggaccgggaggctctggcggaccgattggagcggacctactcccagtatgaggtcctgaagaccaacatcgagaaggagcaggcggaacagctgcgcgcctttatcacggaaaacaagctgtctcatttcctgtacctcacccccaccaccaagcggtattacccctacggcgacttggcggcccatgtgctgggcttctgcaacagcgagggaggcgcctacggtgtagaggccatctacaacgatgtgctggagggcacggtgggccgggtggtcaccacccgcaccggcaccggcgtggagatgtacgacagctactccgagtacgtggacgcagaggacggctgcgatctgaccctgaccatcgacaccaccatccagtcctatgccgagcgcatcctggaggagggaatcaaggcctatgacgtccagcggggcggctggtgcgtcgtgctggacccccagaccggggcagtgctggccatggccagctccccggactacgaccccaaccagtacgggaccatccgggatgagagcctgcgggcccaggtggaggctgatgtgcaggccgagctggagaagcggcagggcgaaaaggcggagggcaagaccgacgaggagatctaccaggaggcggtgaacgccgccacaggcacggcccagaacaagcagtggaggagccaggcggtgaacgacacctacgagccgggctccaccttcaaggccctggtgctggccgcagcactggaggaaggcgcggtgtcagagagcgataccttctactgccccggttattacatggtggagggctggccaaagcctatcagctgctccaaaaaggcgccgggccacggcacccagaccctggcggaggcggtgcagaactcctgcaacccggcctttatgcagatcggccagcggctgggcatcgagaagttttatgaatatttccaagccttcggtctgacagagcccaccaatatcgatctgaacggggagggcgtgagtacggtctggcccctgaacacgatgaccggcgtggacctggcggtaggctccttcggccagcgattcaccgtcacccccatccagatgatcacagctttcgccgctaccatcaacggcggcaagctgctccagccctatgtggtccaaacggtgacggccgccgacggcacggtggtggagaacacggagcccaccgtggtgcggcaggtggtcagccaggagaccagcgacaagtgccgggagatcctcaccagcgtggtgatggccgagaagggcaccggcaagaatgcccgccaggcgggctacaccatcggcggcaagacgggcacctcggagaccaccgtccccggcgaggtggtggtgtccttcatgggcttcgcccccgccgacgacccccagatcctggtcctgctggcctacaacaccccagcccggtccgcggaggggagcagcatcggcaccaccggcacctggatcagcggcggcaacatgggtgcccccatggcgggcaagctgatcggcgagatcctggactatctgggagtggagaaggagtacaccgccgacgaggcggccctggccgacctccagactcccaaggtcaccgggatgacccccgccgacgcggaggctgccctggaaaagaaggggctggactcccgcaccgtgggtgagggcgagacagtcaccgcccaggtgcccgcggccggctccgtcatccccggtgagagcactgtgatcctctatctgggcggcgcagagccggaggagacgggcaccgtgcccgacgtcaccgggatgagcttcgcagcggcccgctctaagctggagtccgccgggttcttcatgcgggcagcaggagcggccacctatctgggctcctccagcaaggctcagggccagagcgtggccggcggagagactgcggccatcggcaccatcgtagacgtcacgttcagcacacctcaggtggaagacggatacctctacgacggataagaagacacaggcggagaaagacctgattttttgcggcggtctttccttatttcgcacctcttaaagaaaatgaaacccacccttgaggggtgacaccatgaagctgcgagatctgctcgccggcgtccccctcacggggggcaacgccgacctgaatatggaaataaattccatatcgtatgacagccggaccctggagccgggcgccctgtttgtgacgctctcagggtccaagacagacggacaccggtatgtggcccaggcgctggaaaagggcgccgccgccatcctgtgccgggagccgccccggacagggagctggctctccactccagaccccagggccgccctggcccgggtgtccgccgcttggttcggatacccgggggaggagatgaccctgatcggggtcaccggcaccaacgggaagaccaccaccacctatcttatcaaggccatgctggaaggggcgctgaagacccgtgtgggcctgatcggcaccaaccgaaacctgatcggcgccctggagctgcccgcccaccgcactacaccggagccctatgagctccaggcgctgctgcggcgcatggcagacgcgggatgcacccatgtggtgatggaggtctcctcccacgccctggcccagagccgggtggagggactgaccttccaggcgggggtgttcaccaacctgacccaggaccatctggactaccacgggaccatggaggcctaccggcgggctaaggggaggctgttccgccagtcggagcgtgcggtgctcaacctggacgacgaggcgggccggtggtaccgggagcggatcgcctgcccctccctgacctactctgagaacaaggatacggcgggcctgaccgctaagaacatccgcctctttcccggccacgtggagttcgaggcggtggcccgggggcagatcacccgggtccatctgcccatccccggcggctttaccatctacaacgccctggcggcgctggcatgcgggctctgcctggacatcccgctggacaaggcggccgcccccctgcgtgcggtgcggggggtgaagggccgggtggaggtggtgcctgtccccacggcctacaccgtcatcatcgactatgcccacacgccggatgccctggagaacatccttaccaccgcccgggacttcactgcgggccggctgatctgtgtgttcggctgcggcggagaccgggaccggggcaagcgccccctcatgggggcagtggccgccgagctggctgacctggtggtggtcacctctgacaacccacgcaccgaggggccggaggatatcatcgaggatatcctgccgggcatggaggggatggacacccagtgccacgtggagcccgaccgtccggaggccatctgctgggccctgtcccaggcgcgcccgggggacgtggtcgtgctggctggaaaggggcatgagacctatcaggagatcaacggcgtccagtaccacctggacgagcgggaagtcgtggccggctatttccgcggccagcgggaaggcgcgggaaaaaagcagggacaggggacagaaaacggtggaaaagtccctgcgtatgtggtaaaataatacgccattgagcacagacctgtgtgtgatacccaagagaaagaatgcctggagggtggcagctatgtcatatattctcagctttatcgtggcctttggagtgacctttattgcgggacagatcttggtccccctgctgcgcaagtggaaagcggggcagagcatccgggaggacggacccacctggcacatgtccaagcagggaacgcccaccatgggcggactgatgtttatcctggggatcggggtggccattgtgaccgcgggctgggaagagatccagcgggggaactttatctatctcttcgtgtacctcttcgctctggtgtttggagccattggctttgtggatgactttcaaaagctgcgccatcacgccaacgaggggctgacggccctgcagaaatttctcctccagctggcggcggcggtggcgttcaccgtgctgctgcgcaactacggatatctgaccccgagtctgtacatccccttttttaatgtggagctggccatgccatgggtggtctatatgatcttcgccgccttcgtcatggtggctaccgtcaacgcagtgaacctgacggacggcatcgacgggctggccaccggggtcaccatccccgtcgccctcttctatgtggcggtgtctgcctggttcaaccgcagcgacctgacggtggtgtctgcggccctggcgggcggcctgtccgcctttctgatctataacttccatccagccaaggtgttcatgggggacaccggctccctgttcctggggggggcggtgtgcggtctggcctttgccctggacgtccccctggtcatccctctggtgggactgatctatgtgctggagactctctctgatatcatccaggtgatctacttcaaagcgacccacggcaaacgctttttccggatggcgccccttcatcaccacctggagctggggggctggagcgagaccaagctgttctgcgttttctccggcgccaccctggtcctctgcgtgctggccttcctgggcgtcatgaaccgatatcccatgtgacgggcggggcggagcgcttttctctccggcgggtcactgtcacagtatctcagaacagggggtggtcctcgtggcccgaaaaccaaagcgcgacctcacggtggaggaacagctggcccgggggccgctggatctgccctttctcatgctgaccatgcttctattgggcgtgggactcatcatgatgttctccgcctcctttgccacggcctattacaacgacggcgacccgctggtatatatcaaaaaccaggcggtctatgccgcggctggggtagtggtcatgttccttgtctccaagatcaactaccagactttccgactgctgtccgtacctggcatcgtggccgctatcctcctgctggtgctggccctcagtcccctgggagtggagctcaatgaggtgaagcgctgggtgcgcatcggccctatccagttccagccctcggaggtggccaaggtggcggtgatcctgttttttgccacccgcctgtccaagcgggacacagagaaaaagaagaagtggagccgccgcaccctcaccggccggacgctggagcggctggaccgcatcggctttctggagctggtgccctatggggccatcctgatggtgatcgccctgctgatgctgatggagccccacatgtcgggcaccatcctggtgctggcggggggggcctcggtcctcttcgccgccgggatcagcctgggctggttcgccgccggcgggaccctggtggcgggagccatgtggttcatcatcacccagaccccctatatgacggcccgcatcaatctgtggctggacccatgggcccagcggcagggggacggctttcagacggtgcagtccctgctggccatcggctccggcggcctgctgggcctggggctgggcaagagccgacagaaattcctctatgtccccgagccggaaaacgactttgtattccccatcgtggcggaagagctgggattcatcggggcggtggtggtgctgctcctgttctccctgctgatcatgcgggggtactggctggcactccacgcacgggacaaattcggagcactgaccatcgtgggcattatcaccctgctggcggtccaagttttcctgaacgtgggcgtggtcaccaatctgatccccaataccggaatctccctccccttcttcagctacggaggaacagcgctgatgatccagctggcggagatggggatcgtattgagcatatccagacagatcccggcacccaaaaatgactgatccggaggaagacaggcggcggggcagccccgtcggagcgcgcgccttcggcctaaacgagagagtggagtgataccatgaatatcctttttacctgcggcggcacggcgggacatgtcaatccggcggtggcgctggcccggatcttccaggagcggaacccggactgcaaggtcctgttcgtgggagcggatggcgggatggaaaaccacctggtccccaaagagggctatgagatccgctcggtgaccatcaccaattttcaccgctccttcgcgccggcggatatcgcccacaacctgggcacggtgcggaacatggtccgatccaagcagcaggcggcccgcatcctggacgaatttcagccggatctggtggtgggcaccgggggctacgcctcctaccccgtagtgaaggaggccgcccggcggcacatccccacagccatccacgagtccaacgccgtgcccggcctgaccaccaagggattgtccaaggtggtggaccgggtgatggtgggctttgaggagagccggagccactatgaccacccggagaaggtggtggtcaccggaaccccggtgcggggcgactttttccgctatacccggcaggaggccagggaaaagctggggttgaccgatgagcggcctcttctgctgtcctactggggttccctgggggcggaggtgatgaaccggaagatgagcgagttcattgcccgtgaatgctatgacggagcccccttccaccacatccacggggccgggcgggactatggctggatgcaggaggagatcggccgccggggcctggctctggagggcacgggcatcgaggttcgggagtacatctatgatatgcccctggtgatggccgccgccgatgtggtgctgtgtcgagcgggtgcctccaccatctcggagctcaccgccatcgccaagccctctattctggtcccctcccccaacgtcaccgccaaccaccaggagaagaacgcccgggtgctggccgaccagggggccgcggtgctgctgctggagcgggactgtgtggagaacaccctctatgacgcagcggaccatctgctgcgggaccgccgccgccgggatgacatggtccgggcactgacggctatggcggtgcccgacgcaggggagaagatctactggaccctccgggccctgatgaagtaaccaagatccgcttttttccatagaatgacctgaatccataaggattggaggccattccatgagctgttatcaaatcaatggcggaacccccctgcgggggcggctcgctgttcaaggggccaagaacagtgtgctgcccatcctggccgccgccctgctggcccccggagagagcgtgatccacaactgtccggacctgtccgacgtgaccgctaccctggacatcctgcgcctgctgggctgcggggtgagcagggagggggacaccgtcgcgctggacgcgagggagttggatgggacggtgatccccgcttccctgatgggggagctgcggtcctctgtgatcttcctgggggcgctgctgacccggatgggggaggtggagctgtcctaccctgggggttgcgaactgggcccgcggcccatcgacctccatctgggcgcgctgcgccagctgggggcggagatccgggaggaggggggcagcctcctgtgccggcggggaaaggagatgcgggggcgggagctgtgcctctccctgcccagcgtgggggccacagagaacatcctgctggccgcctgtggctgtcctggccggaccactctggtgggggccgcccaggagccggagatcgtagaccttcaggagttcctgagggccatgggtgcacaggtggagggggcggggacgccggtcatctccatagagggcggactgcccctccaccccgcggaacataccgtaatcggagaccgaattgccgctgcgacctatctgtgcgcagtaggagccgcggggggcgagatcgtgaccacgggagtggacccggaccacctgacagcggtgctctgcgcactccaggaggcgggctgccgggtggagaccggggcgggggagatccgtctgacctgctacagccccttgagggctatccgcccagtgcgcaccgccccccacccgggcttccccactgatgcccaggccatcctcatggccgccctggccggcgggactgggagcactatgtttgtggagaacatcttttccagccgttaccaccatgtagatgagctgtcccgtatgggggctgatatccaggtagccggccgggtggcagtggtcaacgggcgcaggctccacggggcacgcgtccggggctgtgacctgcggggcggcgctgcgctggtagtggccgccttgggggcggaggggacctcccgaatctcggggctgaagtacatccggcggggctatgacggactggataccgccctgcgcgccctgggggcggagatcaccacgattttgtaagagaaggccgggcacccgctgcggagggcccggaggaacggagagacccatgtcatccagaagcaaacgagggagaaggagaaaccggggccgcttcagcctgctgttcaagctgctggccggagcggcactggtggctgccctgaccttcggggccaccgtcttcttccaggtggagcacatcctgatcgctgggaacagccgctacaccgcccaggaggtggaagaggcgtccggcatccagctgggcgacaacctgttccggctgaacaaggggcagatctcagaggatatccggcgaaagctgccctatgtggaggagctgaccatcgtccggcacctgcccagcaccattgccatcgagatccgggagtgggacgcggtggccagcatcctgccctccagcgggacttcaacggcggaggcaccagcggcggaggaggcagaggacactgaattgcccgaagagaccgggacggcggccggggaagcttggctcatcagcgtgggcggccgtctgctggagcccgctccggaggacagcacagcgctgaccgtcactggcctgaccgtcctctccccccaggcagggacccagatggcggtgcctcaggcggaggagacacggcgccagggcctgatggccctgctcgctgccctggaggagcgggggaccctggagaaggtgtcctccatcgacctgtctgcggggacggagatcctcctgcgctacgacgaccggttcgatgtgaagctgcccatcagcggcgattttattcacaagctgcgggcactggaggcggtggtggagaagcgggagagctatgagaccgggacaatggacctgacccggcaggactatgatgtggtcttcagccccggatgaagagaattactggaaagtttgcgaaaaatccctgttttctcttgacctgtctgaaaaagagcgatacaatgtaacaaaatatagactgcgatagggcttcccccacaacatgtcagatcgtggggcccctagttttttacataggaggagcgatcaatggccttcggattggatatgggtcccgacagtgtggtaaatatcaaagtagtgggtgtcggcggcggcggaaacaacgtggtcaaccggatggtaaagacggggaccaagggcgtggatttcatcgcggtgaatacggacaagcaggcgctggccgtatccagcgcaacctataagatccagatcggcgaaaagctgaccaatggccagggggcgggctctgaccccgaagtgggccgcaagtccgcagaggagaaccgcacgcagatctccaaggccctggaggacgcggatatggtgttcatcaccgccggcatgggcggcggcaccggtacgggagcggctcccattgtagccgacatcgccaaggaactgggcgtgctcaccgtaggcgtggtcaccaagcccttccgcttcgagggtatgcgccgcatgaagcaggcggaggggggcattacggagctgcgcaacaaggtggactccctggtcatcatccccaatgagcggctgaagctggccaccgatcagaagatcaccatggtcaacgctttcgagatcgctgacgacgtgcttcagcaggccgtccagtccatctcggacctgatcaagaataccggattcatcaacctggactttgctgacgtgtccgctgtcatgaaggacgccggccgggcccacatgggcgtgggccgcgccgcgggcaagaacaaggcggaggaggccgcccgtatggccatctccagccccctgctggagacctccatcaacggcgccaagggcgtgctcatcaacgtcaccggttccatggatatcggcctggaggaggtggagaccgccgccaacctggtacaggaggccgcccaccccgaggccaacatcatcttcggcgccgccttcgacgacaccttggaggacgagctgcgggtcactgtcattgccaccggctttgacgaggtggagagctccatgcccagcaagcccttcacccaggcaggggccaaggtggaggagaagaaggcgggagagccggccgcccctgtggaggagcctgcccccgcccaggagaaggccgtggtcagcgacgacgactgggacatcctggagcgtattttcagcaaaaagcgctgatctcatcccgttttatgcacagccgcccggcggaactttccgccgggcggtttcttatagatagatcagcatttataaggagcgcatgcgctgcataacgacacgatcctctccctggtcaggctcgtccgtgctgtgcttctgcccctgttacattgtccacctcatcctctatatccctcaactgaaactttgcggtcagctctttcaggattctggactggttcgccatctcctggcttgctgcggcgctctgctctgctgtggcggaattcgtttggaccacactggatatctggtccacgccctgggtgatctgagccagagcctcagcctgctgatcggacgcctcggatatctgctggatcgtctctgtgatctcctgtgcgctctggactaccctctgcatatattccgccgtctcattcatactggttgtgccctgttggatcgctgacagagacctttggatcagctctgctgtgtcctgggatgcagcagaggacttctgcgccaaatttcgtacttcttctgccaccacggcaaatcccttcccggcagtgccggctctggcagcctccaccgctgcattcagggccaaaatgttagtctggaaggcaatgtcctcgatcgtcttgatgatatttccgatttcgccggagctgcgccggatctccgtcattgcggacagcgactcctgcatcttctggttgctgtccacgatttcacggcccaccgtcaccgccttttcgctgacattccgcgcatgctccgcattgctttgtacatgctccaaaatgtcagaggccgtggccgccagttcctgaatggcggatgcctgctccgtggcgccctgcgccatagactgagcgcctacagatgcctgctctgacccagaaaagacatgattggccgcgccatcgatctgcctcaatgtgtggctgagtgtccggttgatacgccgtatcgaatccaggatacgtccgtactccccgacatagcgcgcttcctcccgggtattgatgcagaaatttcccacgctcatttcatccagcatatagtcgatatcctgaatgatcgccctcaggttttctgtcatcgtctggaaggaaccggcgagcagtccgatctcatcatgacggctgacatccaactggatctccaagttaccgctggcgatctcatctgcggccctggccaccctctggacaggccgcagcatttgccggagaactacgatcacaacggccaggatcagcaaaaggctcgccagggagaggagcaggagcaggcgcgtcgtctggaccagggtgctctccgcgtcggcggtgtagaggccggtcatagaccaccaagtctcgtccccggcctgaagtgggttaaaaaagcaggaaatattttttccttcctcagcgggtatctccgcctgaaaagcagttccctgggccatcagggacctcagctcctccagccggtcagggtctggcaccatatcagacagattgagcccggtggactccgcgcttttactgttccagacaatgatcccatcctgattgaacagggtggcccacatggaatcataattcgtgcttgtggtttttacagaagaaaaggcgcccaggtccacactggtgatcaccacacctacgacccgtcccccgtaggtgataggcgtgccataggccaccaccatgccatctccatcctgatagggctgggagatgtagggatgtccctctccagcgggaatgcggtaggagtcctctttcgcatatccctcgtaggcgtcatagatatgaatggaagtatccgctgtatccatggtgacgtaaaatccgtattcttccatatcgctctgaagctggtagggctcaaacataacgccgagcatcttgatctcgggggtgtttttcactgtatttcgggcggtctctacgacaaattgttccagattataggcggcggacgtcagagctctccctggataaagcatgctctgctgcaggtcagcgtcgccttcttccgtgacctggccgctgtaaagtcgtcctatgtagtcctggatgcccagggccgcccgctccactgtgtcaaacccgctctggatctccccgccgttgaactccgcgattgaggcaagctcgccggagatccccgtgtaaatgctggccctggacgtaacgacagttatggtgatgaggaccgcgaataccgccatcacgaccgcgctgatgaccagagtcaattttgtcgtgagcttcaattttttgaacaattttttcttctcccctcgtgctgccatcgatgatccatacagacccccatggcaactgatctgtttctcccatgttttatttattatatcgtcctctattttaaaaaaataacatttgtcatcaattttcttcctgaaaatgcgttttttccgctgcttcaaaaaatacagcagaaggggacggagcagctctctttctgctggcttcttgcggattccgttcctgttctgtataattaagatatattgagttttggggagatcctatgtgtgatatcattgaggtgacagacctggacgcgccggagctggacgtgtacgcccggctgacacaggctcagctgcgcagccggcgggagccggaaaaaggtatttttattgcagaaagccctaaggtgatcggacatgccctggacgcgggctgcgtccccctctctctgctgatggagcgcaggcagctggagggacagggccgggacctcgtagagcggtgcggccaggtgccggtctacaccggggaccgtgcggttctggccgggctgaccggctatgagctgacccgcggcatcctgtgcgccatgcgccggcccaggctcccctctgtggaggagctgtgcgcccgggccagccgggtggcggtgctggagggcatcgtggaccccaccaatgtgggggctatcttccgctccgccgctgccctgcatatggacgccgtgctggtgacccccacctgctgtgaccccctcagccgccgggcggtgcgggtcagcatgggcaccctgttccagatcccctggacttttctgggcaccgacgcatcccagtggccccagccggggctggagaggctgaaggagctgggcttccagactgcggccatggccctggacagcaccgccctcagcatcgaggacccccggctccgcgcggcggagaagctggccatcctcctggggacagagggggacggcctggccccccggaccatcgcccagtgcgacttcaccgtgtgcatccccatggcccggggggtggactccctgaacgtggcggcggccagtgctgttgccttctgggagctccgggcccggtagcgtccccattgtatggaaaaacggcggaccgtctggcggtccgccgttttccggcttgtgaaaaaagcctcgcagagttcgcgcccgcaggcgcgaatccagttttgatctgttttccccggcgacacgtgcgtcggggaaaacacttctcaggctgcaagtgtggggtttgcccgccgcaggcggtcaaaccctgcgcgcggcagactgctgttttctcgcaaacgtggcacagccacttttgcgacagtctcaaaaacggcggaccgtctggcggtccgccgtttttcttgtttgattcagatcacgcccgccagcaccagggcaaagaccacgaaggtggccagcagggacagggcaaacagcacgaatccggcgttgatccgcttctcctgggtgctctgggaggagggcaccactccggctctccgcatggcggacaccaccggggggtagagcagcagggtggccgccatgttcatcccgcccttggccagattgaaggggaggaacagggtgggcagcagcccggccacgtcggcccgggaatagccggtcatatacaggggggtgatgaggtagttccacagcagcatcaccgcgaccaggcacgccacgccgcaggccaggcccaggaccgcgcccttcttggaatggaccttcttgtagatgaagcaggcggtgcaggagaaggcgcaggtggccaggacattcatgataaagccaatggggccggtgtggctgatggtgagcatctcgatgaaggccaccaggatagagatgatggcggcggcgaaggggccgaaggtgaagccgccgatgcagaccaccacgtccttgaagtcgaagtccaaaaacatgacgctgggcatcagcttggacaggagcatcacgatgtaggcgatgccggtgagcatggcgatgctcaccatggtcttggtgtccatcttgggacgggagggggtctggactgcggaaggtgcggacataaaaaacactcctttttgttttggtacacctgaaagcccatgtcttccaggtgtaaaacaataaaggaggtgcgcaggaccgcgcgcctgacggcgcacgacattgttttgacacacatcttcttccatccggactttaaccgttggtcccggagtttcaccgggtcagcgggcgcattgctgcgcccggtcgcggactgtaccgccagtgggggatctcaccccgccctgaagacattcgattcagttgtccgaactcattatagtgcatccccgcgccaaatgcaacaaaaattttgttccccactcccacagcccctgcggttccgcgcctccttccatatgccgcttccttttttcgtcgaaatctgatatagtagtcaggtcacagccccggccctgccggtctggggccgcatgggagggatcttatgaccggcatcggtacgctcgtcaatgtgtgcgccattattttaggcggattcctgggcctgctttttaaaggcggcctgaagcagcactaccaggatgcggtcctgcgatgtctgggcctgtgcaccctgttcatcggcgcggccggcggtttgtccggcctgctgtccgtctccggcacccgcttggagtccggcggctccctggggatgatcctctctctggtgctgggcaccctggtgggggagcgcttgaacttggagggccggctggggcagttgggcgagtggctcaaggccagggcctcccgcggggaggacagccgctttgtggagggcttcgtcactgcctccctggtggtgtgtgtaggcgccatggctatcgtgggttcccttcaggacgcactggaccacgatccctccactcttttcacaaaggccatcctggacttcatgattatcatgatattctcctccacctacggcaggggggccatcttttctgcccttcccgtaggggtccttcaggggagcgtcaccctctttgccggccttctcgcacccctgctcagcggcaccgttatcgacagtctctcctttatcggctccctgctcatcttctgcgtgggcgtcaacctggctttcggggatcggttccgcgtggccaatatgctccccgcgctgattttcggtggcatctgggcttccctcatgggatgatttaaaaaatggcatgccggcagactgacccaaacacttgttcagtaacatgaatcattcaaatcgctccaatcttgtactgaatgggctgaatcgctcttatcatgtcccatacgaatgacttcttttgctcatgtatgctgataagaatatttttctggatatcgctaaaaaattttgaacaccaccgatacagccggtggtgttcattttgggcggcttccagagccatctctacaaaaaattcggacggccgtggcatcggaccctgcgtggtttgtaccattcctgctccctgtccgtgatattgctttaaattttctttccgtccagctacatggaccattctctatctgtaccgatatataatgcataacagagtcctgtctgtgtacaagtatgtactcgaacaggcacaccggaaaagtcttttttgtacattaccttagtttgaaaagtatggtaaattggatgcagaacatgtcgaagcgggtgattttatggatgatttttggatcgagcgggccccggagaaactttccagcatcagccggaccatccgcttggatgcggcgctctttgagcgcatcatggaggagagcgaaaaaacaggggtctcatttaataagatagtcaaccagtgcattacatatgcgttccagcactaccgggaaccgaaggtaacaccggatggaagataagacgatcctgtattctgtgcgctatccttcggcccaggaggagggggagcgcatcaaggtccggggggacaggcaggcggcagaggcgaagctgaccgagtttctgcgccgcatgagggaggagcggacttatgagcccatcccggggcgggaggagaagggcaggcgcttcgccgccctggcccgggagctgtcccagatctatgaggtgggcctggacatcctgcggacgcccgactccatcgaggccgccctgcacctgtactgttccgcctattccagggatatgacgcggcggctggcagagctgttggggatgtgtgatgtctgtgccgccagccggcccaggacggagcccagtgatctcaccctctccctcatgctgtacacccaccgctgttatgtgtccggccggctgatcagcggctgaccggcccaagggataaaaaggcgcgccgcccggctgggcggcgcgcctgtctgcgtccatcaatagttcatctgcttgcggcgggacaggttcatggtcccgtcctgcatgtggtccaggtcatccagggacttgcccgtgccgtaggccacacaggagatggcgtcgtcggccacatgggtctcgatgccggtgtgggactccaccagcttgtcgaagccccagatcagggagccgccgccagtcatcacgatgccgttggtggagatgtcggccaccagctcggggggcgtgcgctccagcacgccgtggatggcctccaggatgcgggtggagggctcctcaaaggcctcgatcatctcgctggaggagacggtgaacacccggggcaggccggtcatcagacagcggcccttgatgtccatggtgacctcctccgggcgggggaagacacagccgatggtcatcttcagctcctcagcagtacgctcaccgatgagcacattgtgcttgcggcgtatgtacttgatgacagcctcgtcgaacttgtcgccggcgatcttgatggaggcggactccaccacgccggacagggagatgaccgcgatgtcggcggtgccgccgccgatgtccaccaccatgtggccgtcgggcttggcgatgtcgatgccagcgccgatggcggcggccacaggctcctcgatcaggtagacccggcgggcgcccgcctggatgcccgcatcgatgacggcgcgctcctccacctccgtgatgccggaggggacgcagatgaccacacggggcttgaacaggcggaaggaggtgaccttcttgatgaactccttcaacatccgctccgtcatatcatagtcggagatgacgccctcccgcagggggcgcatggcgatgatgttgccgggggtgcggcccagcatggcgttggcctcggcccccaccttcagcagcttgccggtgttcttgtccatggccaccacagagggctcgcggagaaccacgccttttcccttgacatataccagaacggaggcggtacccaggtcgataccgatgtccttgctaaaccaattcatatcattacctcattcgatttatcttgtattccaggagagtataaccctgaaactggaaaatatgcaaaaacaggagctttcttatttattataacggcaagcaggctgcatttcaactgttatttcgcagtttttcgcggcttttccggcctgtccttccgggcttgtgccagggtgacgcacaccacctccgccgctccggcggtgaggagggtcctggcacattcggacagggtggagccggtggtgaccacgtcgtcggccagcaggacccggaggccggcggcatcaggcgctctgtacacccccagcacgttggcccggcgctggcccgcctcctccagaccggactggggcggggtatcccgggtcttgctcagcagggggaggacggggacctccagcacccgggcggcctcctccgccagcaggcgggcctggtcatagccccgctgccgcaggcgcctggcgctgagaggggcccaggtcacgcagtcgaaccgtccgtccagctggtcccggacgcactgggccatgagctggccgaaggggcgggcatagctccggctgccggagaatttgtagcggtggacggcctcccgcaccgggccccggtaggccaggggagagacgcacaccccgaaaaattcccccgtgcgccgggcggagtccccctccagccaaggcagcgtccgctgacaatccgggcagagcagggcgtgccgctccgtcaggagccggcggcagaagggacagcggggcgggaacaggaggtcgaggagcgcgctgcccatcttcacggaacatcagccctttccggtccggcctgccgcgggggcacggcagccggggatcatgccctcatgataatacgcatcggaaaaagacgcaagtgaaagcggagaaaaatgacagagaccggggaaaaagcaagggtgccagccccgtgggcgggcacccttgcttcttaaaaacaccctccccggaggagggcggaggtcaggtggactggacagaggggtcctccagatcctctttggtgatctttccatactccttttcatgctcctgaacgcatttccgaagcagatagaggacctgaccgctcatggagcgtccctcataggccgccacgtactggaatttatcgtgaagttccccgtccattcgaatactcagatgttttttgacgttcaaagcgcactgcctcctttcacctgctgcttcaaagcatagcctgcgccgttttttcgtcatttaatcttagtgcaaatgtacggcttaaaatcttaaaccgctggaaaaatatcgaaatttggccgaattgcaggagaaaaatggtatgttttgggccggggagaactcagggcccggacagggggaaatcttaaactgggatgcagggaatatgaaaaaaagattaaatcgcggctgcctgccttgcgctggccgggaaagtagtataaaatgaagccaccaagcggaaggaccgcgtttgaagcatttgaaggaggttttgaccatggcattttcttttgatgatctgcgggagaaggtcacggacctggcccagagcggtgtggcgaagtcaaagcagctggcggagatcgcgaagctgaagaccagtaatatgggcgaggaggacaccatcaagaaggcgtacctggagctgggccggctgtactacgcggagcggggcgccgccccggagggggcctatgccgctgcctgcggacggatcagccaggctaaggcggccattgagaccaacaacgcccgcattgcggagctgaaggcccagggctgtgtggaggaggcagagagcgtcaccgctgagccggtggtggaggatgtcccccccgaggagccagcccccgagcaggaggtcccggagaccccggcagaggaggccgctgcccccgaggaggcgcctgccgccccggaggagcccaagcaggacgtatgaccccataggccaaaggcccggacagcttctgtccgggccttttccgcataggaatggggccggcgggggacactgtgggcggaggaggatgactatgaagcagtatttccgccgaccccaggacgtggtgggggaggaccgcgacctgctcacctactggaacactatgtctggcaaggtccagctccggctgctggagagcggactgtcggtgtccaccctgggggagctgaagatgctccaggagcagatcgagcacgagggctgaggaaggggccgcgggttgcaatccgcggcccgtttcggtataatggagcaagaaaactgcggtcccggtccggggccgggatggagtgggagacatgcttctggccattgatattgggaacagcaacatcaccctgggggggatccaggagggggagatcctctttgaggcccgcctggccactgacgccaccaagacctcggacgagtatggggtggagatcaaggacatgctggatctcttcggcgccagggtggaggagatccgggactgcatcgtggcgtcggtggtgccgccggtgttcaactccgtccgcaacggcatcgtgaagctgacggggaaggagcccatggtggtaggccctggcatcaagaccgggatcaacatcctgctggaggacccgggggccaccggggcggacctgatcgcggcggcggtggcggcggtggacgcctaccccacccccctcaccgtggtggacatggggacggccaccaccatcgcggtcatcgacgacgggaacgccttcctgggcggggctgtgctgccaggcctgcgcatctccgcagaggccctgtccagccgggcctccctcctgccgggcatccagctggaacggccccggcgggccattgggaagaacactgtggagtgcatgcagagcggcctgatgttcggcgccgcggccatggtggacggccttattgaccggatggaggcggagctgggccggcccactaccgtggtggccaccgggggagtggcacggttcgtggtccccctgtgccggcatgagatcgccctggagcgggacctccagctgaaggggctggacctcctgtatcgaaagaaccgccctcggaaggaggcggcccccgatccacggtgaaggaaaaaggagactgtcgaaaaagcggctttgccgcatttttgagaaagcttcagtcaaccgcgcccagggtttgaccgcctgcgggcgcgaactctgcgaggcttttccgcaagctgaaaggacctcccggcccaggccgggaggtccttcgcgtcctatagaggcctcaccagaaaaaggggacataccagccgccagggacgcatacattgggagcaacaaacgataggggtgttgccgcaatgcagactgaatggaatgaaaatcggatcgtcctccacgggcgggtgtgtcaggcccccgtgccctcccatacaaaccacggggagtcctacctgaaattccccctggcggtgtgccggctgtccggagcggaggaccgggtcaatgtggtggcctcggccgccctgctggagcgctgcccgctgacggagggagaggagctgtccgtagagggggaggtccgctccttcaacaacaggagcggggtgggcagccggctggtgatctcggtctacgccagacagatgcaccgggaaccgggggaggaggagaaccgcctgcggctgacgggcactctgtgcaaggtaccggtgtaccgcaggaccccgctgggccgggacatctgcgacctgatgctggcggtgaaccggcggtacgggcggacggactatctcccctgcatcgcctggggctccctggcaagaagatgcgcggagctggctcccggcaatcgggtggagctggagggccgcctccagagccgggtgtataccaagcgcctgggggagaccagcgaggagcggacggcctttgaggtgtcggtctcggtgctggagcggctggatgccccggctccggcggaacagccctgcggatgagcgcacgtgcctgtgaatgaagtgtgaattttttgacatagttccaaaagaacggttgcgctccggcggagaagctggtatgatatatcacaaatgaaaggggcgcgtccacggctttcccgccgcgccccccggcggcccgggccaccggagagaagcggctcgcggaaggcgggcgggagggacacttacatgagcaaaaaatatcggatggggaagcggttccaaaaggtgctgaccatgggcatcctggcggagatcgcggtcctggtggtcgcctactttgtctatgactggctgcttggcgaatggatccccagtctgaccggtgggcctctgctggccatcttcggttccatcggcatcctggctgtctggtgcaccaataagtttctccggcgttttaacgagaactactggtatgaggtgacggagaagggcctgcggatgaatcgcggacagacggcccggttctatccctgggaggacttcaagggagcgcgggtgaaccgcttcagcttcctcagcgcgctgccggtgatctttgacatgaccaacggccccatggagctggaccggagcctggaggactcctacggcctgacgatggaggtgctccgacacatcaaggaccatgcggacatctcccaggacgtgaaggatcggatcaatctggtggacctgatggcgaaataaatgcagagatcccggcagagaccatgtctctgccgggatcttttagattctggccgcaccgatcaggcgagggccttcttggcggtctcggtcagctgggtgaacgcggccttgtcattgacggccatctcagccagcatcttacggttgatggcgataccggccttcttcagtccgttcatgaaggtggagtaattcatgccgttcagcttacaggcggcgttgatccgggtgatccacagctgacggaagtcgcgcttcttcagccggcggccggtataagcataggtcagggacttcatcacggcctggttggccatcttgaagtgcttggacttggaaccccagtagcccttggccatcttgaggatcttatttcttctcttgcgcgtcatcatcgcgccttttacacgtgccatttgtctgttcctccctctatcttacttgtacaggatcatgcgcttgatggcggcctcgttggtcttgtcggcgtaggtggtgccgcgcagagcccgcttgagcttggtggtcttgccgtggccgttgagcaggtgacgcttcttggtcatggcgcgcttgaccttgccggtcttggtgagggaaaaacgcttcttggcgccgctgtgggtcttgatcttgatcttcggcataacagagaactcctttacttactttttcgcgtccttggcgggtttgggggagaggaaaatggacatgtgccgcccctccagcttggggctcttgtccatcacggcgatctcgccgcactcctcggcaaacttcagaagcaggtcctgaccgatgttggtgtgggccatctcccggccgcggaagcgcacggtgatcttgcaccggttgccgtcggccaggaatttctgcgcgttgcggagcttgacgttgaaatcgttgacgtcgatgctgggagacatccggatctccttgatctctaccacgcgctgattcttgcgggcttccttctcgcgcttggtctgctcgaaccggaacttgccgtaatccatcagcttgcatacgggggggacagcgttgggagagatcttgaccagatccagcccctgctcctcggccatgcgcagcgcctcctgagaggacatgaggccaagctgctcgccggactcagagatcagacggacctctttatcccggatctcttcattggtttgatgacctgtgttagcgatgggaaagcacctcctgacaaaaaataaatgcagctgccagaacaggcacccgcatcacgtgaagactaccgccgggagacccggcggagcagatccatgttgacccttcggcgctggcctggggtgaggacggggtaccgttcctgctttgttttgctcagctactatatcagaaagttccgtccttgtcaagggtgattttcagagattacccagtgtatttcaaaaggggccgggcagagagggcgagacttctccctgctccggccttctctgaggcgcctaaaaaatccggagtttccagccaaataaggcagcgcaccgactggctttttattttacataatacagacatggaatttttgtttacggaaagttatacacattttccacaggattatccacagcctgtgtggaaaactccggctctccaaccggggagcgtaggactgtggcggggaaggagggccgggcggcggagggccggtaaacgaaacgcaggtgacataatgacaaaaaaggtgtcatcccagggagatgtcccgagtggcataggcattcaggtccaggcccgcagtgcggccggccagaaattcgtagtacccctggcagccgatcatggcagcgttgtcgccgcagtatttgagctccgggaggaagaggcggtcaccgctctgccggcaggcagcctccaggtcggcccggatgcggcggttggccgccacccctccggccaccgccagcctgccgtatcccttccggcgggaggcctccatggcccgggggaccaggctctcgctcaccgcccggccgaaagaggcggcaaaggagggcaggtccagggcatcccccttctgctgggcgttgtggatcaggttcaggcaggcggtcttcaggccggagaaggacatgtccagctcggccccctggacgtgggcccggggcagctcatatttggcgtcgtcccccccgtcagccaggcggtccatgggggcaccgccgggatagccgatgcccagcaccctggccaccttgtcgaagcactccccggcggcgtcgtcccgggtcccgcccagcacctccatctctgtataggagcgcacatcaacgatggcggtggtgccgccggagacgcacagacagacgaaggggggctccaggtccgggtgggtaaggtagttggcggcgatgtggccccgcacatggtgaacagggatcaggggccggtccagggccagcgcggcccccttggcaaagttgacccccaccagcaccgcaccgatcaggcccggggcataggtcaccgccacaccgtccacctcctcccggctcaggccggcccgctccagggcctcccgggccagaccgctcactgcctccacatgtttgcgggaggcgatctcgggcaccacgccgccgtagatagtgtgcatctcgatctgagaggccacacagttggacagcacagtcctgccgtcccgcaccaccgcagcggcggtctcgtcacaggaggactcaatggccagaatgttcattgggaaacaccgtccttttcctcttccatccagcgtccggggggattgggccgctccccgggccggagggggatctgtatgaagcgctgatagagtgccggcgggaagtgccggcgatagatggactgatggacctggagcagttcctcagccgtcacatcctccgccccacggatcagggcccggtagtggacgccgaacagggcgcagtcgtacccgccgtagcggaagccgttgcgctgatagaaggccagccgcctgcggtgcaggggctccccggcggggtccccgttttcaggggcctccgcctccccgaagatgccccggaagtgggcgtagtgctccgcaagcaggtccagcatccggctgcccaggccccgctcccgcaggccggccatggtgcccaggtagtccagcagggcaaagggacagcccggctccagccaaatcagggcgtaggcgaccagatcctccccgtcgtacaggcccagggcctggtagcgtccctgctccatgagggagagcatggagcgcaggggcttgagctcctctgggggaaaggcggaggtcagctcctgacggtacagctgggccagctgctgtggggagagctcattcagcttcatggtgttcaaactcccttgtcatgatgatggcgtcctcccggggctgctggtagtagtttttccggcggcccgcctcctgaaagccatgcttgcggtacagggcgatggcgggggcgttggaggcccgcacctccagggtcaggaaggagagatgggcctgcccgaagcggcagaacacgtccagaagggcatcccccaccccgtgacggcgggcggcctcctccacggcgatgttgtcgatgtagccctcgtccagcaccacctggagaccggcgtagcccagcacgccgccctccccgtcctcggcgacaatgaagctggccttggggtcaaagagcgcgtccgagagcatgttctcgctccagggcgtggagaagcactcccgctccagcgccgcgatctgggggatatggccccggtccatggggacgatgatgtattccatagggtcctcctgttctcccggtgtgacgggtagatgtcatattatcatataccagaggcaggcgttttgtaaagggagaagggggggcttttcaagaggaccggcggcgcaaagcccgccagtccagtatgatcggtgctgcagggcgtagagagggggcccgggagccatgcgcactaagcaggacacgatgccgggaggcctccgccaggaaagacgggcttgttgcgggggtatctcatatggtaaaatacagccaaaccacagagaagaagggatcggtggagatgaagggaatcagagcggcggtcctggcactggggggcgccttcctactggctggatgcggtggggagagcggcgttctggcgcccatcccggcagagggcttctctcagggggtgtacgacgcactggaggagaactggacggcctgggaggcggtggacgagttggaacgcatgctgagcagcacacttctgggccactgcgcccaggagtttgacagctgggcgcagtgcgcggattttctggggccgtccatcccggacccggcggcggactgcggctggctggaggaggccacctatgcgggcatgcccctggaagcctccgacgccccgcgggtgaaggccgagtggtacggcacacgggagggccaggtggagtgggtcagcgtccagtcgggctggcgggacggagcagtccgggtgatggtatccgcggccctgtacgggacccgggcggaggacatgccctcggacaagggctgggggacagaactggcgcggcaggcctatctggaggcggcggaggcggggacgccggtggtgaccgcagagagcggggcgagctggtgctccatccaagcggagcatgcccgaggcagcgtgctctataccatccgcgcggtgggggagtctgggacggaggagcaggtgcggacgtctctggatcgggtgctggagacctggctttcggccccggaaggggaaaaacatctaaaatatgttaaatatatacaaaaatttagcgattataatctggaattatagatgaaacggcgattgcaattttcactttatcgggttaaactaagaaaaaatgattttcagtgaggtgccacatgaagcagcacatcctcacaactgcatctttctattttaccaacagctgggctcgatttatgagcaccggctatttcgtgctgggaaaatacagagagatggaatggatgtgccggtcccagagtaggacggcggccctctccgtgtgatcagatctggatgctgatgcgggggacacatcgatttcatcgatgtgtcccccgtttttttgcagcacagcgagaaaaggggcgaaacatatgacagtgatgatcgagcctgggctgctggccggggcggtgacgccgcctccctccaagagccaggcccaccggctgctgatcgcccgggcgctggcgggggagaacatagacgaccccgctcaccgggcggattcccaggatatccgggccacccgggactgcctgaagagcctgcgggaaggggagggggagctcccggtgctggagtgcggagagtcgggctccaccctgcggttcctgatcccggtggcgctggccctgcggggcggaggcatgtttcggggacgggggaggctgatggaccggccccaggagccctacttccggatctttgacgggatggggatcacccaccgccgggagggggactccctgacggtccggggccggctgcgtcccggggagtatcccctgccgggggatgtgtcttctcagttcgtcacgggcctgctctttgccctgcctctgctggagggggagagcatcatccggctcacctccccgctggagtccagagggtatgtggacatgaccctccaggtgctgcgggaccggggcatccgggtggaggagctgcccgagggcttccgggtgcccggaggccagcagtacggccgcggcactctgggggaggaggcggactactcccaggccgccttctggctggccgccgccgggctggggagcccgctgacggtggagggactggacccggactccacccagggggaccggtgtgctgtaccctatttccagcagctggccgggccgggccgggtggagctggacattgcccagtgtccggacctggctccagccctggcggtgcgggccgccctccggcccgggcagacggcccggctggtcaacgcggggcggttgcggctgaaggagtgtgaccgcctggcggctatcccggaggagctgaacaagctgggcggccagctcaccgagggggcggattttctggagatccgcggcgtggagcggctgctggggggcgttgcggacagccacaacgaccaccgcatcgccatgatgctggcggtagccgccacccgggcggaagggacagtgaccatccggggcgcggagagcgtggccaagtcctaccccgacttctgggaggtctatgagagcctgggcgggcgcgtcctgcggcagagagaggagcgagaagcatgcgatatgtgatctttggagagtcccacggccccgccatcggtgtggtgctggagggggtgcctgcggggctggagctggacctggagcgggtgtccgccgagatggcccgccgggccccggggggaagtcccctgtccaccgcccggaaggaggcggatgtgccggagatcctctccggcctgtttgagggcaggaccacgggcaccccgctgtgcgcggtgattgcaaataccgacacccgttccagggactacgcgaagctgaaggacctgccccgcccaggacacggggactacgccggctatgtgcgctatcaggggtgcaacgactaccggggcggaggccatttctccggccggctcactgcgccgctggtctttgcaggggcggtggccaagcagctgctggagcagaagggagtccaggtggccgcacgcatctccaacgtggcgggcatcccggaccccacgccggagcagtatgagcaggcggtgctggaggccaggagccagctggactcggtaggcgggtgcatccgctgcgccgtcaccggtctgcccgccggcctgggggcgccggactacggggagaacgtggagggcatcttctcccagtacctcttcgcggtgcccgcggtgaaggcggtgggcttcggagacggagtgggctttgcctctctgcgggggagccaggccaacgacagcttttatatggatggagacacagtgaagacccggaccaaccactccggcggggtgaacgggggcatcaccaacgggatgccggtggagttcgaggtatgcatccggcccaccccctccatcgcccagcctcagcagacggtggatctggtccagcgaaaagacgcggagctgaccatcaccggccggcacgacccctgtatcctgcatcgggcgctgcccgtgatcgaggccgccgccgccctggctgcctgccagctgatggacctatgaccgatttggacagagagagggacgcgatatgagcgatttggaacagtacagacaggagatcgacgagctggacgaacagctggtccggctcttcctccggcggatggaggtcactggcaaggtaggggagtacaagctggcccacgggatgcaggtgctggaccgggagcgggagcgccgggtgctggccaagcgggccagcctggcggtggacatccggcaggaggaggacgtaaaggagctattccagaccatcatggccatcagccgccgccggcagcaggagctgatcgaccgcagcggcactggcacggtccgaaagaccaatgtggtgctcatcggcatgccgggcagcgggaagtcctgcgtgggggcggccctggcggagcggctggggatgcccctggtggagacggacgccatggtggtggaaaagacggggcgctccatcccggacatttttgcccaggacggggaggccgccttccgccgggaggagaccgccgccgcccgccgggccgcggccatggaggggacggtcatctccaccggcggcgggatcatcctccggccggagaatatggagatcctcagcgccaccggcaccgtctatttcctggaccgggaccccagggacatcgccaacacggagctggacggccggccactgctcagcggggggcgggaccgggtattcctgttgtatgatcagcgcatcaacctgtaccgcaaatatgcccggtacaccgtccccagcaccacggtggatgagacggtggactccgtcctggccctggtgcggcggggccaggacgtgcgctgaccgagaaggagcgccgccgtgtcccgccgcccggagaggggcgggagaccggcgtgggaaagtgaggctgacatcatgatggaaaaaacggagcagggcctgggcaggctgtgcgtcatcggtgacccggtggagcactccaaatcgcccctgatccagaacgcgatgatcgcgaagctgggcatcctttatcactacaccaagcgcctggtccaccagggggatacccaggagtggctggataccgcccgccgggagggcttcgcgggcttcaacgccaccatgccccacaaggtggccctggtcccactgatggatgagctgggggaggatgcccggctgtacggcgcggtcaacaccgtgtgcatccggggaaagcggtgcatcggccacaacaccgacgggatgggtttctaccaggctctcaccgacctgggggtggaggtgccgggccgccgcatcaccctgctgggcgcggggggcgcggccaaggctgtggccctgaagctggtgcagcagggggcgggccccatcaccgtgtgcaaccggaccccccagaaggcggaggccctgtgcaatctggccaagggccggatggggcacatcggtttcgcccttgaggacctgcgccggggcgccagggactgcgacatcctcatcaactgcaccagtctgggcatgacagggacgaacagccagttccgggacctgagcttcctggacgaactgcccgggcacgcggcggtgttcgacctcatttacagcccggccgagaccgagctgctgcggcaggcccggctgcgggggctgaaagcggccaacggcctggggatgctgatctatcaggcggtcttcgccctggagtatttcgccggcgtaaggatcgacgccaaggagatggaacagcacgtgatcgaggcctgcggcctgggcggagaggcataaaaacggtccccgcggaaaagaaaccccttttccgcggggaccgttctctttggggcgtcggtccttccagccagttacgggaacacagacaaaataaaacgagaaaatcataatgaggccggttgcgccgggataacctatgtggtaggataaaagagcagaaggattttccatacgaaagaaggtttatgatatgcattgtgtgcggaacgtgacagaggatctgatctggatcggcggcaacgaccggcagagcccccgctttgaaagtgaccacccggtccccagggggatgtcctacaactcctacctgctgctggatgagaagacggtgctcttcgacacggtggaccgggcggtccagcaccagttcttcgagaacctggagcacgccctccagggccggaggctggactatgtattcgtccaccacatggagcccgaccacgccgctaccctgggcgacctgctggtccgctaccccgggactaccatcgtctgtaatgggaagtcgatgaacctgctccgccagttccactggagcgcccccaagggggccatgctggtgaaggagggggacaccctgtgcacggggcggcacaccttcaccttttactccgcccccatggtccactggccggaggtaatggtgagctacgatgctgcggaccacatccttttctccgccgatgctttcggcaccttcggcgccctcaacggcgtgctgtttgccgatgaggtggattttgaccgggactggctggacgaggcccgccgctactacaccaacatcgtgggcaagtacggccctcaggtgctggccctgctgaaaaaggtggaggggctggacgtccggatggtctgccccctgcacggtccgatctggcgcagggacctgggctatctgatggacaaatataaaaagtgggcctcctaccagccggaagtgcggggagtgctcattgcctgcgcttccatctacggggggacggagacggcggccggtatcctggcctgccgcctggcggagcggggcatcccggtggagctgtatgacgtgtcggtgacccactgctcctacgtgctgtctgacgcctttaagtacagccatatcgtctttgcctccgccacctataacaacggcattttcacccccatggaggagttgctgcgggacatcgcccatcacgccctccaggatcggacggtggctctgatccagaacggctcctgggctccagccagcggaaagctgatggcccagatactgggggagatgaagaacatggagctgctggagcagaccgtgacgttgaagtccgccctggctccagggcaggaccaggagctggaggcgctggccgatgccctggccgcctccgtgaggggggagcaggaagcgccggagcaggcggtggcggacgcccccaaggccaagggatttatctgcaagatctgcggcttcatctacgagtcggacaccctgccggaggacttccggtgccccatctgcggccgtccggcctctgattttgagccggtcacctgagagaatgagcgggtccccccggcggcatcgccgcgccgggggacccgctgctcctctggggatacctccggggaaacgcggctggcgttcagagctcagccggccggggtgaccgaggcggcggtgagccccgactccttgggctccgccgagaccacaccggagacctcgtctcccgtgtccaccgtgacggtggaggaatccgcttccccgccggtataggtgtagaccggtccctcctcgccctcgccgtggaccgagcagatgagggtccagtcctgcacactgccagtgacggtcaggtccagtacggtgccctcactctgctgctgaaaggtgtagtgcccatcctgggccagggcgtctgtgatgtccgtctcctccccgtccagaaggaggatcgcccggccgtcccggtcctccaggctgacctcaggcatgtggtagatggtgaggtccaccccctcctctgtggtgatgtcctggcggaacacgcccacctgaacggcggtggagatgtggtacaggaactcctggaccggttcggtgttgacagcgcccacggagatgcccagcagggccagggcggcggccaccgcggccacggggcgcagggagtgcgggatatgtctgcggtcattctctttcatcttgatgatctcctccagcttgtcgggatcggcccgcagggccgaaatggtgtcaaggtacgatctgcggtcgaacatgctcaggtccctccccttcctcttcctcagaaagtgtgcggcgcaggcgggcccgggcccgctgcagccaggtctgaacggtggatggctttgcgcggagggcggctgccgtctcgctgacggagcagccctcatagtagtagagatagatggtcaggcggtatttggcgtccaaagccatcacggcctgaaacagctcggactgggccgggtcctggaacacgggggcatcccgccactcatccagggggacggcgtgcctgcgccagaaggagcgcagcagcttccggctctcgttgacggccacccggagcagccagtgcttcatgtgctcctcgctctcaaagggctgccggtgctccagcagccggagcagggtggtctgcatcacatcctcggcgtcggcccggtttttcagggcgtgataggccacgcggtagactgtgtctccataggtccgaacggccgaggtaaaggactcgtctgtcaggggagctcacctcctttgcgggatcttgaaaagcttttcaccaggaatatccccggacacggaaaaatatctcatagggaacaaaaaaatttctccagagggggaacttttttaccctttgaccgtctatctcagtgcaaggaaaaatttccgagcgtttgaaagaaaaaggagtgttatgatatgaaacgaaccttctctgctctcgtgataagcggcgccctgctctgcacccttgcggtccccggtatggcagcagaagccgaaggtcagcctggagcttccgccgccgcctctgcacctcaggcccagactctcccggccagcgtgctgtactttggacaagtgacccaggtcgttcgggatgaagcgggcacagtcacccgcctggtcctctcctctgagcgctacggtgagtatatcatgaatatttcttctgatacagtatggatcgacagcgggaaccgcactgcatcagatcccgcggacctgaaggagggggagagcgtctatgtgttccacagccccatttccacccgctcccttccgccccagtccgcagcctatgcggtggtccggaatatccctcaggatatctcctgcgcccagtaccatgtggtggaggagatcacagagggggaggacggcggcctgatcgtcacgacagacaacggcggactgctgatctatctggacggtgatacccagactgtccgttatgcgggcggctctgccgcactggaggacctgaaggcaggagaccggatcatggcctggtatcaggcggtggccctgtcctatcccggacagacccacgctgacggcctgatgctcctgcccagtgagaaggaggaaccgtcctccgttctcccggagaacggcacggcgctggacctggtgctggagggagatatggtcctgcccgttaccggcctcgttgaaaacggcaccgccatggtccccgtggccgctgtggcccaggcgcttggctatcaggtgatctacacccccggcgaagatggagagggtgacaggatcgccgtggagagcgatcagttctctgtccagatgacggtgggagaggaccagatcattggcgtgacgaagatcaagggggcagtggggatgaccgcccctgcggactatgggatggccccctacattgccgcccccggcaccacctgggctcctgcccggctctttgagatgttgggccgcacagtcaccctggagggcgatgccctgtccatccggtgagccggggccccctgaaaaaggagctctggaatatcgagaacgctcagccggcactgtcttttggacagtgccggctgtcgtggatttagaaggcgataccgcccagatcagccgtctctctttttttgcattttcctacggaatgtggtatgctgtttctgccatttcgatccgagaggagtttttcatatggaaaagctgtaccagcaggaccccttcctgacacgcttcactgcccaggtggtgtcctgtgctgctgacaagggtgggtggtctgtggtgctggaccgcacggccttctatcctgaagggggagggcagccctgggacaccggtacgctgaacggcatcccagtcacccaggtccaggagcaggatggagcggtggtccacacctgcgccgcccgcctggagccggggactcaggtggagggggctgtagactgggcgcggcgcttcgacctgatgcagcagcactccggggagcatatcgtctccggcctgatccacagtacctacggctatgacaacgtgggcttccatctgggcagcgacctggtgaccatcgatttcaacgggccgctggaggaggaagacctgcgggacatcgagctgcgggccaaccagtacatctgggaggaccgccccgtatcggtcacctaccccacgacgaaggagctggctgcgctggactatcggagcaaaaaggcgatctctgggcaggtccgcattgtctccttccctggggcggacacctgcgcctgctgcgggacccatgtggcatccgccgggcaggtggggctggtcaagcttctctccgtacagaagttccgggagggcgtgcgggtggagctgctctgcggcggccgggccctgagctatctggatcgggtgctgggccagaaccggcggatctctaatctgctttccgccaagccctttgagacggccggcggggtggagcgcctgctgggggagaatcaggacctgaagacccgcctcgcccgtatggaggaggcacggtttgcccagctggccgatggtctggctggggcgggggatgtgatccttttcgaggaggggctgtctcccgacggactgcgccgcctgtgtgacgcagtcctccaagtctgcggcggccgctgtgcctgcttttccgggggcgatggggaggggtataaatacgccatcggcctgcggggcggagatctgcgctcctttgtgagggaactgaatcaggccctggacggccggggcggaggcaggccggactttgttcagggttcggtccgggccgggaggactgccatagaggagttcctgtccgccgaaaaacagagataaacaaatggtgtacgcctcccggcacagaggtcgggaaaaacggcatactgcctttcgaccatcttgataaggagatcctatggattatactgtctatcagctgctctggctcttcctgttctattccttcctgggctggctggccgaaaccgttctagccgcgctgaaacgccgccgcctcctcaaccgcggcttcctcagcgcccccttctctcccacctatggcctgggggcgctgctttttgccatttttctgcctgaactgcgggaagacccatttttcctcttccttttgggcatgatcctcgccacatttctggagtttgttaccggtgtattcctggagcgcatctttcatcagaaatggtgggactattccggccagcggtttcagtttgaaggacatatctgcctgaaatactctgttatctggggcttgtccgctctgctggccatctttgttctgaatcccatcttccttacattggtgggcctgatccccaggacggcgggagagatcgtactgctggtggtgtatattctgctgggagtggactttgttggctcctgggccgctgtgctccagctccacggcgccctgagcgagcctacccatatctcccgcttcctgagccggcttacccataccctagataccaccgtgacccgacacatccagagacgtatggaaagggcataccccagcctggagcgggaacggctgagcggaaagcaggctccaaaggtcaagccggagcggtttgcccagggatgcggcttttacaagttggccgcgctgttcttcatcggttctttcctgggggatatcaccgaaactatttggtgctgggcagtgttggggaagctgatgagccgcagcagtgtgctctacggccccttctccattgtctgggggctgggctgtgtcctgctcactgcgctgctctacaaatacaaggaccgcagcgaccgatatattttcctggccggcacagtgctggggggcgcatacgagtacagctgctccgtctttactgagttggtgttcggtaccgtcttctgggattacagccatattcccttcaaccttgggggacggatcaatctgctgttttgctttttctggggaattgcggccgtggtatggctgaagggcctctatcccagactctcagcgtggatcgagcggatccccatccgctggggaaaggcgggcacctgggtgcttatcgtctttatggtgtgcaacatcatcatatctgccctggcactggaccgatacacccagcgcagcgccggggacgccccccagactactctggggctcttcctggaccgccattaccccgaccagcggattgagcgggtctaccccaacgccaagatcgtggactgagaggacggccgcctgccccctgagagggagaatgtcccaggataacagcgcccggaagcgggctgaggtccgccccttagggggcggacctctccgtctctccaagcagctgttccagcaccgctacattgccccgcagccgcgggtccgatggagcacaggcgagggcagccctggcctcatccagcgccaaggccctccgcccagtctgaaaaagggcctgacagcgaaggtcgtggggcaagctgccccaggagtccgcctcacagatataggtttttgggcggatagtgatggacagggcacagccggtaaagtagagcactccatcccattcctccatgtcatacagcatcctggctagatccatatacggctcccgcagatggggggcctctgcaatggcacggagataccagtcccgtgctcgggcccggtctccctttcggagccaggacagggcgatataccgcatggaggccgcccgctcatctttccaggtggcggtgggcatggacaggtggtgctccagggtgcggatgcagtcgtcccagcggccccggtacatgtactcccggcccaaatagtgggtgttccggtcatcctccggctcctcctccacggacagttccagcagaggcaagtactgtccccgggactttgtggggtcggggtggtggtccagctgcatcccctctaccgtcacggtggggccggggaccccctcgcccacccatttaaggacctcgtggaccgggtgtatccactgatagccgtacctggcatgggccttttcataccagaagaccaccccctcgctgccgtcagggttgaaactccaagtatagcggtaggtcgcctgtccggcccccggctgccaggcccgctccagcgcagcccgccatccggggtgaaacacctcatccagatcggtgcacacacagatgtctgtgtcctccgatactaggtccagagagcggttgcgggccacgtcgaaccgccaaggagagatgagctctaccgtgacctgagcgccccgctttttaaggcgttccactgtgtcatccgtagaaccggtatccagcaccaccacctgatctgcttcggacatggaatccatccaccggtccacaaactgggattcgtttttacagatcgcatagaccgcgatcctcatgactgtcactcctccttctgagaggcggggtggacggcacatcgtaccatccaccccgctttatgcctcaaggctctgcccgggcagtatcttttgatcagttcagcttttggatcacgatggcggcctcagtcagggtcacattgttttcggtagaggccagtgtaatggtagccgttccggtcacatttaccagcaccgtggccgccaggttggcgacattggaggtggtggcaatggtggcttggctctcgctgccggggacgggagtcgagttgttctccagctccacacctacagtcccggtgctggtggtgttggacgccaccgcagagtaggagatcaggtaaatccctgactcacccagcgtaaaggtgggggtgctggcggtatgggtaatggcagatccttcttccacctggttggtgtcaaaggaggcgtcatcgccggtggaagccagtgtctgagtccccacattggtggcatacagtgcattcagcgggggaggagagccggcaggtccggtagcgcccgttgcgccggcagggccggtgggaccggtggggccctcagcgccggcggcacccgccgctccagttgcaccggcaggcccagtaggtccagtaggaccggttggcccggcagggccggcaggtccggtggcacccgttgcgccagcgggtccggcaggaccagcaggcccggtggggccctcggcacccgtcgcacccgtcgcgcctgtcgcaccagcagggccggcaggtccggtaggaccggtgggtgcaagtatatatgcacaacacaaaatgcctggaaaatatagcaaaaacccaggaaaaccccctatctataacatttaagcaggaggtcacgccgcctcctgtttttttatgtccaaaaggaggcaaccaccatgccagaggccatcctatcagattatttttacggcgacgaatccgagcaatttgtattcttcaaaattccccgtcagcttatcactgacccaaaattcaagcacatctccaccgacgccaaactgctgtatggtatgctgctggaccgcatgagcctatccgccaaacacggctggtacgatgataccgggcgtgtctatatctactacaccgtagatgagatatgcggggacatggtatgcgggcgggacaaggccatgaagctgctggccgaactggacagcaaaaagggcattggcctgattgagcgtgtcaggcagggcctgggccgtccctcaaaaatctatgtcaagcgattcaccaccaggacagcgtcgccaaaaccagctccgccgtcccctgagccttttgcgcccatttctgaggtcgatttttccgacgtacagaagtcggaaaatccgacttcaagaagtcgaaaaaatccacttcaagaggtcgaaaaaaccgacccaagttatactaagaaaatccaaactgattttatccagccgtatccatccatctccccccgacagccccccgaggacgaattggggatagatcgattcgagcagagagaggttgtcaaagaaaatatcggttatgagcagcttcggcaggaacttccctacgacgatgtggaaagccttctggaactgatcgttgacgtgatatgcagtaccgcctccactatgcggatcggtggtgaggtcctgccagcggagactgtcaagcggcgctttcagcagcttgacagcggacatatcaggtacgttgttgaatctctgcggcagaccacaacgaaaatcaataatatccgggcctatctgttgacggcgctctacaatgcgccggtgacgataggcccttactataccgccgctgtgcggcatgactttggatgaatgaaatcccaccgtgggacgcaatttcaccccaaatcacaactttggttaaatattcaaatcccaccatgagacgcaaatccagtccggttatatttcgcccggcagagaatgaaatctcaccgtgagacgcgaattttaacaaatatatgccatgaaggaggtaaattgaatggcaaatgacaacagcaagacccaagcgcagaccattcccctggcaaaaatccatgacctgcccggcgtgttcatcagcaagcagccggacaaagcctacggtggcctcgttaccagtatccaggcgggaggcgtcaaggagccggtgatccttcggctccgtgaggacggcgagtaccagcttgtgacgggctaccgccgccgccgtgccagtgagctggccaagaagcaggacatccctgccctggtgtatgaaatgaccccgcaggaggccatcgactaccacaatcgggtacagaaacagcccggcctgcctattcccggaaagctggtggaatcccctgttttggacggaaaatcggaaaaatccgacatcaggggtgtagaaaacccgaccactggcgcgcagaaggtggacaagctcacggaggccccggctcccgctacccccatcaaggacggcaaggctcaggaaggccccgatcccaagcctggagagaagcccgctgctcccgtcgctggggataaacccaaggaggccccggccaccgctacccccatcaaggacggcaaggctcaggaaggccccgatcccaagcctggagagaagcccgctgctcccgtcgctggggataaacccaaggaggccccggccaccgctgcccccaccaaggacggcaaggctcaggaaggccccgatcccaaggctggagaaaagcccgccgctcccgtcgctggggataagcccaaggaggccccggcccctgctgcctccatcaaggacgacaaggcccaggaaactcccggtcccaagcctggagagaagcctgccgcacctgttgtttccggtcctgcggcaaaaggtcccgccgggaccgctatctcccaggtatttgacgagcgccttgcacccccggacgaaaaggcgttgaaagacctgcctgtgcccaaggagggcgaatccttctttatcaccctccacccggcctacctggaaaagtccaagtataacgtcttttccgtggaccaatccagtgagaacttccgggaactgaagaagtccgtggagctggttggcatcaaggaccctgtgctggcccggctgaaaccggagggcggcctggaaatcctgtccggtcagcgccgccacctggcagccctcgcgctgaactatcccgtccccaccatcattcagaagattgacgacgctgacgccaaaatcattgtagcggacggcaatctgcaccgggataaaatctccatgtacgacctgtcccgcgcccttcggatgaaaatggagggcatgaagcagaagtcgggccgccgcaagaagggcacgtttaaggccgaggaactggacagcgatgaaaagctggccctggaaatgggtatgagcgtcagtaaactgaaccgcatgatccgtctgtccgaggccaccaaggatgtatgtacccgggtggacgacggctccctccacctgtccaccgcctcggctatctcttttctgaagcctgagagccagaatgaagtgcttcacttgatggacatgggctataaggtcaaaaatgaacaggtggagcgcatgaaaaaggtggacaaggccgggaaactagacgagatgaccatgcggaacattctggacgacaaggacatcaaacccaagctcccgcctacgcccccggcccccgagcctcaccagcctgtccaggtggtggacggtcagactaccaccctccagggcggccagatcattcccccgtccccggacgtgaagaccggtcccgagcagacggcaggcgcacagcccacacctgataccgccatccccgccgcaccggggacagagcccccggcccccaccgctgaaactccggtacaaaccgctcctgccaccagtcctgcgcctgcctctggaaacagtcaggaagaaaaggaactgttcaaaggcggccaggaacggcccgagatcaccaaggtcatcctgaccggggaccgcctgcgcaagtatttccccgacgtgtccatgacgccccgtgaaattgaggaaagcgtctacgacgccctggaggagcgccgccagcggcagatcaagtcccagcagaaggacgctatttttcagcgtggcagaggtccgggccggtaatggaatttaccgccaatattgctaacctgggcaagtataacgccgggcagctggccgaaaccctcctgtccttccccgccaccacggaacaggtccaggcggccctgcgggagattggtgtagacggcctgcggtatgaggaaatcattattttagagtgccgtaccagcattagaggacttgacgacaaaataggtgattttgaccacatcgacgagctgaactatctggcttcccggcttacagagctgacaccggaacagctcagtaagttttccgccgccgccgagcatgacgagtacggcggcagtttgcaggatttgatcaatctcacctttaatttagactgctacgacctcctgcccgatgtgaaatcagatgaggactacggccattatctggtagacatccatcgggaattttttctgcccaaaacggcccggctctacttcaactacgaatcctatggcgaatgtaccgccatcaacgagggcggctgctatacaccccagggctacatcttcaacaatcaccgcacaccgttcaaggtgatttatgacggccagcatgttcccgagcagtacaaggtgttccggtatcccatccaacagaagatcaaggccgcccgctctggcaggagccgggacagtcctccccataagcgtccatgagggcgctttgttatgtccagaaaaaaacgggccaggactgaaaaaccgccgctccacgttgtttccttctcaggcggaaaggacagcaccgcaatgctcctgttaatgattgaacgtggtatgcccattgatatggtattgaccgccgataccggcatggagttccccgaaatgtatcgccattgggatcaggtggagcaatatctactgcggaaacggggtctaaagctaacaatcctaaaacatccccagggatttgaatggttgatgtttgaccgccccgtgacccgtgcggaagaatggaaacacattaccccctacgggtacggctggcccggtatcaaaaagggccgctggtgtaccggtcagctcaaaacacacctgatcaacaaggctgtgtctcagttgagaaaagaataccggattctccactatgtcggcatcgcctttgatgaaccgaatcgaataaaaggcgaacaatatcccctttacggctggggtatcaccgaggtccaggcgctgcaaatctgctatgatcgtggttttgattggggcgggctgtatgagatatacaaccgctgttcctgctggtgctgcccgtttcagcgcattgacgagttgaggaaactccgccgtcaccacccgcagctttgggccaagctgttggacatggacgaaagggctttagcacaattcgggcacagcgccctgggacgtttcaaggattactggactgtagcggagctggaagaacgcttcgccgctgaggatcgggaaatgtccctctttgataacaacaagaaaaaaggagttgattcaatggatgttttggataacaacacagagcagagaacgagttcgatcaatgttttagtagtagagcccggaatggctccctacgagaaggaaatcaacggcctggatgaaatgcaggccgttgtgggcgggcctatcaccgccctttatccctttgaagagatggtcgccattgttgccaacgatgaggcccttaacatggggctggaatttaaccgcagcgttgaaggcggctatggtggtgttttcggcacattttttgtctgcggactgggtgaggaggatttttgctctctccccccggagcaggtggaaatattcaaaaagaaataccaccatgcggaaattcttctgggtgcccaaggcaacgagcctatcacaatgaaggtggaaccccgcagaccgcccagccaggaaccgcccaaacgtccgcctaaaacacctggacggtgagccatgtcccccatatcagatgaaaggctggccgagctgaccgaccggctggaaaacgggatcagggatttgtacgccagtgggcggtatgcggaatatctggccgccatgtccaagtttcaccgctacagcttcgggaacgccctgttgattttactccaatgccccacggcatccaccgtagccggttacaacacctggaaaaagacctttgggcgtcaggtcaagcggggtgaaaaaggcatacagattttggcccccctgtcaattcacccatttggtggagtatcagaagattgatccagccaccggacaacccctatatggcaaggacggcaagcccttaacggagcgccggcgggaaaatgccacccgttttaagattgccactgtgttcgacgtgagccagactgagggccgggaactgcccaatataggagtttctgagctgaccggggaagtttcagatttttcagggatttatgaccggctcaccgctttctccccccttcccgtggagcaggaccacgttcccggcaccgccaagggttacgccagttttatggagggccgaatcgtaatcaaacccggcatgagccaggtgcagaccatcaagacgctggtacatgagattgctcatgctaagctccacaacccggattttctgtctgaggaacagaagaaggcccggcgggagaaggaggtggaggccgaaagcgtggcctatgtggtctgccagcacttcggtatcgacacctccgactactccttcggctatgtggccgggtggagcagagggcgggaactggcagagctgaaagcctccttggatgtgatccactccaccgcaggggaaatcatcaacaccatccagccgccgcctgaattggagcgcaaaacccaggagcagttgccgcagcatcgaaaatccaaaaaatctatgaggaagtgattttgtgaatgactatgatcctatggagcgcatgagggaaatcgaaattttcggcgtccccgccctgttcacagacaaggccattcccccggaggctgtccatcccggcatgagccgctatgagctgctggccggggacgacgacccggagcggccccggtatgcggccacccagccgggcggcaaattcctgggcacggtacttacccctgtctccatcttccgttacccctctgatacccagcgggagattggcccgggggatctgattctggataccgaggccgggtactacacccccgccgagtttgaggaaaagtatctgtccccggactatgacgagggcacccaacaggagcgttatggaaaagatgattgatattatccgctttttggcgggagttgtggaggaaaacacccacagctatcaatcagattttgattatgacaggaaacgcctgcaagacgcagaatatgaaccagcccaggaaaaccgaacatttctctggatgagccgtccatgcggtacgcactgtgttctggaatcggaggcatttttgcggggaacaggagcgcatagtatttggacccattatgagtatgaggccgcacaggtcagggcatttcgtatcattgtttcccctgagcggaccggcgcacttgtgctgggaaatgttcagccgctgaattacggcgagcaggtacagcgtgtcaagcggaacgccatccttgtgcagacggtaacaatgtcttttgaggacggggaacactgtgttctgagctatgaggactaccagagacaaatgcgcggtttgattgacacccacggcaggatcgaacaaatctgctacgctcccgaaaacgcacaggagctatcgtgcgtgctccagacagagcgcgcgatctcctatgccaaaaagcagccccgccgaccccggaaacctcccacccggtaacaatcccccgcacagcgccgctctgcggcgctgtcccagcaagtatgtcatttggtagcacaaatgacccttgttaggggcaaaagcccctaaaacccctacggataattgcgtctcaccgtgagacgcgaaactgcgattcccaccgtcaaaatgaaatctcaccgtgagacgcaaatatgaggaaaggaggcagtcgtgcgaaaacgaaaccgccatgtcagcgtctggatgaatgagcaggaataccggcacctcaaagcccaggctgaaaaagcggggctgggtatcgacccgttcatccgcactttggtcgccggtgttcagctccgcccccgtccgcccgacacctacgccgccttgctccgggagctgtccgccatcggcaacaacgccaatcagatcgcttattgggctaacgctcaaaagagcatttctgaggccgacatacggcaggccgccgccctggtcagggaggcgtggcggctggtaaaggagacgctgtagtggcctacaacaagatcatcaccatccgcagccggttggatcactgtctggactatgcgctgaacgaggaaaaaacggcgctgtcccaggccatcgactacggtatgaatccgggcaagacccacaatctggtgacggggatcaactgtgacccggatacggcccaccgggacatgcagtccaccaaacgccgctgggacaaacggggcggggtgctgggctaccacatcatccactcctacgcccccggcgaggtcaccccggaacaggcccacgccgccggggtggacttcgcccgccgtctgctgggggaccgctatgaggccgtcgtctccacccacaccgacagagaacatctccactgtcacgtcgtattcaactccgtgtccttcgtggacggcaaaaaataccgcagcgactttcaaagctattttggcactctgcgggagacttccaacacggtcagccgggaacatggcctgtccgtcattgacccggagggccagggcagacactacgccgagtgggactccgagcgcagcggcagaggcaccatccgagggctggtccgccaggacatcgacgccgccatccgggagagctttacctttgacagctttttggccgcccttcggcggcagggctacacggtgaggtatggggccaacatcaagcacaccgccattaccccgccgggcggcaagcgtgcctttcggctggacagcctgggaaacggttacaccgagacagacatccgggcgcggctggccgctgcccgcagcggcggcataccacctccgccagtgaccaagcccacagctcccaagcggtacactgtcaaaaggcggatatttcaacggggccagcggcgcaagctccacggctttcgggccctatatgtctactatctgtatctgctgggcgggccgcatctgaggaagcggaaaccgccctctttctctgtccgggcggacgttgccaaactgcggcagtaccagcggcaattttcgctgctgcaaaaataccgcatcgacagcgacgctcagcttgccacgctgggcgaggcccttcaagcacagatagacgctctgaccgatacccgcaaggacttttattccagaaagcgggatggtgaggacgtggaaccggatatttccgccatcaatggggagctgcgccgtctgcgccgggagctgaaaacctacggcaaaatcgaggcggacataccccgtatccgggaaaagacagcactttatcaggagcagaggacccagggcgggccggtcagggaccgtccgacaataaaaattgagaggaagtgatccaagtggacgtgaacgccgaggccgccgatctggtggtcaaggagagcatccaggccacggagagcgccgtcaagctggccggggccggtctgaaaaacgtcgccgcccttctgctggccctacagcggcaggacaacaaggtggtgggcaagaccagcgccaagcggctggcccgtgaccccgcccccgctgttgttgttcccttgaagcaggaggacataggccagtttaagaagctggcaaaagagtacggtattttgtactttatcgcacagaaaaagggcaatgataccggctatgtcaacatcgtatccaaccagaattacgccgcccagctcaacgccgtcatggaggccatgcagtaccctatcccccaaaagtcccgggaggacgagccgtcaaaaaaagcgaccccccgtgctccacaagacaggtcctcgcccgagcacgggagtggcttgaatccctcccctgcaacgggaacggatattgaatccgtccgggcccggctggagggactgaaagccatgtccaaggggacgcacaccagggagaggacccacgaaaaaattcgataggaggaattatttttggcaagtatcagcgacattatcaaaggcagagcggaccgggatcaggcccggacggaacagctccgggccgaccgggaaaatctgtcccatatgcgggacagcgccctggaggacatcaccaccaaaccggaccgctaccagcactatctgaccttgcaggcggataacgtccggtgcagcgtgggcaacgtggccctgaccatgtaccagctggagggggccaccaggatcggctctaccgacttctggcaccagcagggccggtacgtcatggacacggctatgaacagcggggccaaggtgttcgtcccgcccagggaccccaagcgccggggctacttcatgggcagctactacgacatcagccagaccaccgggaagcccatgatcgaccccgcaccgctgacagacaagacgcccaggatgacggcggccttgactgccctcatggaccagacgccggtagccatcgccgtggacaaggagatcgccactcccgcctactataacgaggccgactttaccatctacatcaaccccagccacagcgatacggagattttcaaggccctggccacggagatcgcctacgcccgggcccatgaccggggctacaacaagggctataagcgggaaatctaccgtctggattctgagagcgtgggattcatggtgtgccgccgcttcggggtggcctgtgaccccccggacgccaagcaggtccgcattttctatgacggctatgacccctccagccgggccgaggctctggaacagcttcggaatacagcccggagcattggggacggcctggaccagcagttcaacccccggcagcaggaacggcagaacaaccgccgtcacggagccagataaagcggcaatattcggggcgtgtccccttcggggagggtacgccgggcgtccctgccagtcaaggccgcatgattgcttcgcaatcatgcgcgagccggccagtctgaggactggccgggccttgacagccagtgccccccggcgtctttgttatgaaaggggacacaccccaaaagccgcctttcggcggcttttgctatcctgggaggcggtttgtctcccaccgtccagcggggccagcggccccgctggactaccttatactaaaattggaggtttgcatatgaaacgtacatggaggcgctttgcccccgcattggcagctcttacgttggcgctgaccatttgtcccgcttcggcgctggccgctgaacaggacaccggaggcggcaatcaggctccggctgctgtcgcttatcccgccgaggtacgggagagcgaggaaaacggggtccaccggattgaaaaggtctatgttctgtccgtccgggacgaccccgctgctattcccaccgccgactttgagcgggagggccgcagctacaccctgttggacgtgatcaagaacaaccagaccgagacggacaccaaggaccacattgaggtcgtcaccctggctacggataccaaggacgtggctgcaatcatccagcagctggagcccgccctggaggtgaccaccgaggacggctacaccggaaccctcaccccggactaccccggcattaccgtggaggcggacggataccagaccagctcccgcactgtcaccgccacccgcagctatcccaacctgtccgacgctgacgcatctctgatccccaagaccattaccgacggcgggcggacgctgaccctggccgacgttcagtggcaggaggctgggggcttctacaacgccaccgccagctacagcggcaccgccacggggaagtatgccaccggctacaccgccactgtggagtacaagggcgaggtatccaggaccagcggcgacactgtgatctacaccgcaattttcacgtctcacggtgagacgcgaatcgaccccggtatccaggacccctccgccccggcagaccaggacaacggcggaggtgtgagcaaggccctgttgatccttcctctggctgttctgctgggcggggccggtttcggcggctggaaactgaccaagtacatgaaagataagaaacgggggtatgtaaaatgaaaaaacgcttgacaacgctgctggccctctgctgtctgctgggggccttcgccatgcccgccagcgccctggaatacacctttgacagcccgtccaccggggacttcggtgctcccaccagcgacacgaccatctacgagcataaagaccccaacgtggaccggagcaagagcagcgccctgattccgcccggcttcggaacgcccaccagctatctccccaaccccggggagtatttgacgcccaatctggcagcgggcggaccgctgaataccccatctctcaacggaaccttcaccggctccaccggtggagggacgctgcttctccccggcgcagttgacatgcccacatccagttaccctaccaccggaagcaccacggccaccggctttaccgacgtgacttctgatctctactacagcaacggcagcctgggcaccctgaaaatccccgctattggcttgacagtaaaggtggtccaaggtacggacagcaaggctcttgccaagggcgcgggccactttaccagcaccagcatttgggacggcaatgtggctctggccggacacaaccggggcgtgaccaatcatttcgggaagatccacacgcttgacacaggtgataccatcaccttgaccaccaggctgggcacccggacctactccgtcaccagtgtgatgaaggtgggcgagacggacaactccatgctggccgctacctctgaaaattgtattacactgtttacctgcgtccgggatgaacgggactaccgctggtgtgtccgggcagtggaggtataaaacaaatcccaccgtgagatttattttcggtgctgatagtgcgtgatttttgacgttttcttcgtgttttggtacaatattattaggaaatcatttcctaaataaacttctggaggtatcaaaaatgaaagggaaatacgttcaatttgcggctggcattatcatcggagctgcgctggttcccaccgcccacgcggcagtccagcagctcaccgccacccccagcacccagcgattctatgtagacggcgcccaggtttcgctggaggcttacgccatcaacggcagcaactatgtgaagctccgggacattggcgaggccgtgggcttcaacgtcagctatgacggccctaccaacagcgtctacatcggggagcggcccaccgtccgtaacagcgataccgtccacatccccacagaccgctccaagtacatccccaaggctggggaccgggtacgctgtgacgacggctacatctacgagatcaaggacgtcagccgctacgacaacaacgtattcgcggagggcccggtgggacccctgcccgcccccacctgtgactggagtgctttcccggacctggagactccgaaagcggaagtcaggcacttcgctcacgacgacggagattccatgtttatccgcaacctctatgagacccggcggatggagtacaccatctacaacgccctaggcaaagagcccagcgcgtggcgggacggcaggccgctggcgtccgtccagctgaccatccgcgccgaggacgacgcctatacccgctccttctggccctggcggagctcagagctggagaagctggtccacagccgccccaacagccgctactatgtggaagcctgggactactaccataaaggcatcttccaatataccagatactgtgtggtatccgaataatttcccatattcccgcgccccttctggtgacagaaggggcattttcatacccaaaattcatttaggaggtagacctgtgaaaaaaagaatgatttcgctcctgctggtcctcgttaccctgctgggtatcctgcctgtgacctccttcgccgcccccaccctggaggaggcgatggcggaggtagatgtgtacgccaggaatgagaccctggactggctgaccatgaacggcagcgtcaaggagcagcactacacttattacaaatacgaatcagtccagaccggacaggtcaaggagattcccgcctactgcgtggacccccgtctgtacggcgtcccggccctggtgccagaggggacgcccatcaagtacaccgccccggacaccgtctccgaccccaaggtctgcggcatcatcgccaacggttatccccatgagccgctctccgttctgaaggtgaacacccctgaggaagcctactacgccaccaagaccgccctgtggatctatctgctgggcaactggtctgtcaacggtctgggcatcaatcccaaggcgaaccaggcggcggccaagcgggtgctggaggccaccaggaccatctacaacagaggcatgggctggagcagcatccccacgcccaagctcaccgccaccgctgacaaggacgtggcctaccccgtgaccatcaacggccagccctattaccagcaggtcattacaatttccagcgacacatggtccattgaggacgtcaaggtcaatctggccgagggagcgcccgccggagctaagattctggatatgagcgaccaggagatcacccgtgtgcccatgagcaccttttcaatgacggacgggcacaagggccagtgcaagatcgtctaccccgcctccagcgtggaggggcggaccggcaccgtccagctgaacatgcgcagcgtggtggtgcagtatgagatctactacgccaagtccctccaggcggatcagtacggcaacatccaggactatatgctggacaccgacccccacctgcctgtggaggcttcctttatcagccggtactccgcagagcctgatgaccccgacgaccccgatgatccccctccgccttcttccgaaaccgcaatcaaggttatcaagctggaaaccggcaccctgaccccgctggagggggctgtattcaagctcaccggcccggacggaaccacagtcggctccttctccacccagcgggacgggacctttaccgtccccgtgacccagaccggccactacaccgtggaggagctgtctccccccaagtggcacctcatttcggacgacgccacccagcacgttcaggccgtccacggaaagactgcggaagtcaccttctacaatgacccctacggcaacctccgggtggagaagtacagcgataccggcgagccgctgaagggcgtcaccatccagatcaagcacattgccaccggcgaaaccaggtccgctcagaccggccccggcggggcggcggagttcactgagctgaaacccggcggctgggaggtcagggagaccgccggtattgagggctggatcgccgacaccgataccgtccagaccgtgagcgtggtcgccggcgagacctccaccgtcaccttcaccaacaaggagctgcccggcctgcggatcatcaagtatgaccggaccaccctgaaggtcatgaccgacatcccctttgaaatctggcgggacggcgagagcctgggccagtacagcaccaaccagcagggggaaatcctcatcaccaacgcccagcccggcacctatgtggtgaaggaggtacagagcgacgatgagcatgtcaccgacgccacgccccagcagatagagctccacgccggggacggcatcaaggacctggtgttcttcaacggcaggaagcccggtatccacctggtcaaggtggacagcgccaacctgtccaagcccatccccaacgtcaagttcagcatccgggccgtggacggcaccttcggccccaaggagtttaccaccaacgaggacggcgagatcgacctgtccaagctgtcccccggcgcatacgaggtgctggagctggagtgccccggctatgtcattgaccaggcccagcgcattatccagctggaggcagaccagaacgccgagtttgtatttaccaacagcaagctgcccagcctctatctcatgaaaaccagctcggacggctccccgctggcgggcgtcaccttccggctggccaagatcgaggacggcagccactatctggaccgcaccaccaacgcccagggcgagatcctgtgggagggcctggagccgggcgtctactccctgaaggagacggccacagtggccgaccacattctggacatccgggagtaccatgtggagctgttccccggcaagaccagcgagatcgtgctggagaaccagaaacggcccaacctggtcgtctataagcacgacgccgacaccggggagcccgtcaaggataccgtttttctggtaaaggcggcggacggccacagcgtggacgagatcaagacggacgccaacggcagggccaccctgacaaacctcctgcccggagtgtacgaggtgagcgaaaagtctgtcccggccccctggcttatggacgcccccagccagctcgtgacgctgtaccccaaccgggaccacactgtgtactttgagaaccacaagaagcccaccctgacggtgaacaaggtggacagcatcaccggcagtcccatcaagggggccaagtttgaggtttggtacgggagcaacagcaccaccacgggcgaattgaacagcctgggcaccttcttctccgacgagaacggccagttctttgttgacctgctgcgggacggctggtacaaggtgacggagctgacccccgccgctgggtacaccatcaaggaacccgccacccaggaattttatatcaagggcggcgagagcaaggttatcacctttgagaacgtgcccaagaacgcaattatcgttgagaagtatgacagcgtcaccggggcagccctgcccggctgcacgttccagctgcgctacctgggcggcacctctggcacaggcggcaccgtcattggaaccaaagtgacgggcaagaacggcaccgccatgtggacgggcctcaaccccggcgcttatgtgctggaggaagtagacgctgcggacgggtacaacatcatccagtcctccgagaccatcatgctggccgacagcggcgaacagagtgttgtcaccgtcagattttccaacgccccggacggaattttgctgatccgcaaggtctgttctgtcaatcccagcgtgaccctgcaaaatgcggagtttaaggttgcctatgcggacggcaccgttgtgggcgacagcaacggcattttcagaaccgatgaaaacggcgaaatccgcatccccggcctgacccccggcaagagcgtggtggtaacggaaacccgcgcccccgccggcttcattctggacacgcagagccagaccgtccagataaaagagggcagaaccgtaagcctgacctttaagaaccaaccgaaaggggccatcatcatccagaaacgggacagcgccaccggccagcctttgagcggggccgagttccgcgtgacgaccgccgctggttgtgaggtagggctggacggtgtgatcagcaccagcaccctgacgcagaacggcatttttaccaccgacgcccagggtgaaatcaagatcaccaacctcgcccccggcgcttatgtactgaatgaaatcaaggcccccacagggtacgttatggacagggccagcaccaatgtggtcattgggcagggcggcgacacgcagaccgtcattgtaaaaaactccaaggccggaacgctggtgatcgacaaacgggacgccctcaccggcaagcccttaaagggcgtcaccttcaaggtgactacctccacgggggagtttgtaccaactgaaaacggacagatcagcagcaacggcttgtatttcaccgacaaggacggcaagatcaccattaacggcgtggtggggacgctggtggtaacagaaacggccaccattcccggctacaccatcgacgaggccacccggacgcagacggtggacgtgcggcccaacgacacgcagaccctgcactttaccaacacccccagcacgacacttgtcgttgaaaagtacattgaggggactacgacccccctcaagggtgttacgttccttatcaccgacagctccggcgcggtggtgggtaactccaacggcgagttcatcacggatgaggcgggccggattgtgctgaacgatttgacccccggcactaccgtcaccgcacgggaggtcaagacgttggagggctatgtgctggacggccagcccaagtccattctgattaaggcgggcgaagttcagaacctccgtttttacaacgccaagcagggcaccatcgtgatccgcaagctggacaagcagaccagcaagcccctggccggggtggagttccagatcacctactcggacggcagctatctggacgacgactacggccacctgtccagcaagggactttacaagaccgacgccaacggtgagatccgcatttcaggcgtggtgggtacgctgattatcacggaaaccaagcccctgcccggatatgtgatggacgagggcaccaagacacagaccgtcaaggtaaaccccaccgacacgcagaccatcaccgtgtataacacgaaggtgggcggtttggccatcatcaaaaaggacgaggaaaccggggcgcggatcagcggtgttcagtttgaaatccgcaaactgaacggcgagatcgtcggcacctacaccaccgaccgcagcggcgttatcactctgccccaggctgacaagggctggtatcaggtgacggagttgaaggccgctaagggctaccgtctggacagccagccctaccaggtggaggtcaaggacggcggcatcgccaccctggaaatcaccaaccggaaggccgggagcgccattattcataaagtggacagtctcaccggagaaggtatctatggcgtcaaattcctggtgtccgacgccaagggcaaccctattggcacctatgagagtgacaacgaggggtatgtatacatcgacaaggaccttgccgacggcaagtataccgctcgggaattggagtgcgcccagggctatatcctggacaccatacccaagaccttctatgtggagtacggcggttgcactaccattacctggcccaataccgccgtccggggacaaatccagatcgtgaagaaatccgccgagtacaacagcgtaaacggcctgcccgccgggacgctgctggagggggccacttttgagatttacaacgagcgcaccgggaacaaggtggataccatcgtcaccggggccaacggtctggcctcgtccaagcagctgcccctgggtcgctacaccattcgggagacaaaggccccggccaattacggcgcgtccactgacagctacaccgccgtgctggaatactccgggcagatcgtgcggctggaaatcagcaacaagagcctgtccaccggcgtttccattgagaaaaccgggcccaaggaggccatgagcggccagcctgtccgctatgtgttctcccggatcggcaacaccagcaatgttatgctccagtccttctactggagagacaccctgcctgctgccgttcggctggataaggtagtcaccgggacctacaacttccccggcacctataagatcgtgtataaggtgaacggcaccggcgactaccgcactctggccgacagcctcagcaccagccgcaattatatcttggccgccagccccgccgccctgggccttgcgtccaatgagcgggtgacagaggtaatgttcgtgtttggacaggtccccggaggctttagccaggtggaggcccccatgctccattgtattgcccttcccggtctggcccccggctccagttttgccaacatcgctgatgtgggtgggacctataacggtgtgtgggtccagggcgtgacccgctgggtgacgaccgtgtacggcaagcccacgcctttgccccgcaccggctattaaatctcaccgtgagacgccaatcggccagaaaatgaaatctcacgctgagacgcaaatcaggaggtatccgtgaagcagcagaacaacagcaatcttctcccgtggctcctgctggccgtccccgtcctctgggcgggggcggccctggccagcggctaccgggagggcatgaccatctttgacctgatggggcgtttcagtatcatactggaacgcccctttgacatccgatggacgccctacaccctcaaatttatggcggtggccctgatactgtacgccttcggcattactctgtacttttccagccgtcaaaacaagcggcccggcgaggaacacggctccgcccattggggaaatgtccacacactgaacctcaaataccgagacaaggacccacacaacaacgtgatcctcacccaaaatctccgcatgagcctgaatgggcggaaacatctgcgaaaccttttgcaaatcgtggtgggcggctctggatcaggcaagacccggtatgtggtcaagcccaatttgtatgaagccaacgcctcttacattgccactgaccccaagggggagctggcccggtccgccgtcccgctgctgttgcaggagggctacaccatccgcattatcgacctggtggacccggaacactccgactgctacaaccccttccactacatccgcagcgacgccgatgtattgaagctgattgccaacttcatccgtaacaccaccccgaaaaacgcccattccaatgacccgttttgggagcgaagcgaaatcgccctggactccgccctcatgctgtaccttctccatgaggctccgcccgaggaacagacgatggaaatgatgttgactatgctggagtacggggcggccaaggagggggacggagactatcagtcccccctggaccttctctttgaggccctggaggaggagcagcccaaccacatcgccctgcgccagtacaaggtgttcaagcaggcccccagcgaaaccgctatgagtatcctcattaccgcctccgtccgtctggctcccttcaccttgccggaggtccagcggatcaccagccgagacaccatggagctggagaagctgggagaacggaaacaggcggttttctgcatcatcccggacagcaacgacgcctctcttaatttcctggtgggaatgttgtatacgcaggcatttcaggagctgtactatcaggcggacaaggtacacggcggcagcctgcccgtcccggtacggctcatgttcgacgagtttgccaacgtcgcactcccggacggctacgcccgattgcaggccaccatgcgctcccgcaatatcatggctactatcatcctgcaaaacatttcccagctgaaagctcttttcaaggacgattgggaggggatcatcggcaatgcggacagcttcatctacctcggggggaacgagcagagcacgcataaatttgtctctgagctgctgggcaaggaaacgatccagacccaaacccacagccagagcaagggacgcaacggctcattcagccagaatttccaatcggccggccgggaattgcttacccccgatgaagtgcgtatgctggacaaccgccttgctctggtcctgattcggggcgaggccccggtcattgacgccaagtacgacctgacccgccaccccaacatcaagcggacagctgacggcggggccgccccttacacccacaatccccaatgtctctacgacatgggcgacctggattttacctttacatccctggatgaaatcgaaatttttgaagatatggaggaatcttgactatgaaaaaacaccttttccgcaaagccccggagtatcccaacaccgcacttacccgccagcagcgccgccgccgtgcccgctgtctctacaccgccgccgtcctggccctctccctctgcgccgtgctgaccgtcccggccttcgccgtcgggggttccgaccccctggctattgtcaataacctgagcgacttcatcttttccatcatcaaggccctgggcatcatcatcctgggctggggcattgtccaggtgggcatgagctttcagtcccacgacgccagccagcgcacccagggcttcctctgtctgttcggcggcttgatgatcgctttcgcgaaggaaatcctgggcaccattggcgtggtatgagcggtattggcataaaaacaggaatggcgtctcacgatgagacgccattctttcctatggaggtgagcgacaatcagcgataactggatcgtaaatattctggaaaccgctctggccgactggaacggaaagctgacggagatatggacgctgctgacccaaaccccgcagaatttcaagggcggcgacgtctggaccgtgatcgccggtatccacaacgccctggtgggggtaggctacggcctgttggtactgttctttgctatgggcattttccagagcgccgccagctttcgggacttccagcgcccggagtttgccctgcggcactttatccgcttcattctggcaaaggtggccgtgggcagctgcatggagatcatgaccgctattttcagcgtgtgcggcgggatcatcgccacggtcatgtccggtatgggcggctctgtctccacagcggccaccctgcccagcgaaatcgtgacggccatagaagggctgggcctgttggagagtatccccctctggcttgtctccctgctgggctccctgtttattaccgtcatgtcctttattctgctgctgacggtgtacggccgttttttccgcctctacatgttcaccgccctggctccgctgcccctggctaccttcgccggggagggcaccgccgccagcggcaaggcatttctgaaaagctacatcggcgtgtgcatggagggggccgttattgtcctggcctgcctgatctactccgcgttcctctccagcagcaccccggcggcggacgccaccttgcccgccgtcacaatggcatggcagtacattggacagctgattttcaatatgctgatcctcaccgggcttgtcaggggagcggaccgcattgtgaaggagatgttggggctataggaaaatacaatatcatttacgcagacccgccctggaaatatggcaactggtgttctgcggagcgtcattatcccactatgtccaccgagaaaatcaaggctttgcctgtctctgacctggctgctgacgactgcgcccttttcctctggatcactatgcccatgctccatgaggcatggggcgtgatggaatcctggggcttcacgttcaaaaccgccgcttttgtctggatcaagctaaacccaaaagctgacacggtattttggggacccggaaattggacaagggccaatgcggaactgtgcctgttggctaccagagggcatccccagcgacacgccaaaaatgtccatcaagtgatcctctcccgcattgaagaacacagcaaaaaaccggaggaagtccgccgccgcattgaggcccttatgggtaacgtaccccgtgtggaactgtttgcccgccgtcctgccccaggctgggatgtgtggggaaatgaagtggacagcaccattgactggatatgacctattattttagaacgaggtgattcaatatcgaaatcaaaatccctaaagaagtacgccagcacaaggagagtatatttttcggcctgtccacccggcaatttttctgcgctgttgtcgccgttggcattgccgtggctgtttatctgctgttaggcccggccatcggcaaggaaaacgcgagctggctgtgtgtcctggccgccgcgcccgtagccgtggcgggcttcttcagctacaacggcctgaccctggagcaatttgcctgggccttcctcaagtcggagcttctgtgcgctgggggccggcgctttgtctccgaaaacttctattacaatatgctgggccgaaaggaggcgaacgactttgattaaagccctgatcgccgccaacaagagcgaacgggataaattcaagataccccgcagcgtccagcagtccattcccatcaagtgtatctacgaggacggcacctggctggtgggccgcaagcacagccgcacatggagattttccgatgtgaactacgccgcagcgtctgaggacgaccgccgggggatcttcctgtcctacggcggagtgctgaacagcctgcccaccgacgccgccgccaagatcaccattatcaaccgccgcctcaaccccgtggactttgagcgcaccatcctgatgaaagaacggggcgacggcctggacaaataccgccgggaatccaaccgtatcctcacccagcgggcggcggagagcaacaatctggtccaggagaagtacatcaccctgtccatcccccagcggaatatcgacgagacacgggcctacttccgccgggtggacgccaacctctccaagagcttcgggcggctggacagcggggcccggcccgtctccaatcatgaccggctccgtatcctccatgacttcttccgtcccggcgaggaacagtattttactttcgaccagaccgccgctatccgccgtggtctggactttaaggacctgatttgcccggacggtatacggtttcgggccgggtactttgaaatgggggacaaggtgggccgtgtcctgttcttgaaggacttcgccagctacatcaaggacagcatgattgccgacctgtccgacttctcccgtaatctcatgctgtccatcgacattctgcctattcccacagacgaggcagtaaaggagattcaaggccgtatcctgggcattgagatggacattacccgctggcagcagcggcagaacgacaagaacaatttcaccgctaccgtcccctatgaactggagcagctgcggggggaggccaaagaatttctgtccgatctcaccgaacgggaccagcggatgatgtttgccgtggtcacgctggtacatatcgcggacagcgtggagcagctggacgccgacaccgaggccctgttatccataggccgggaacacctctgccaattttccactctgcgctaccagcaggaggacggcttgaacaccgtcctgccctacggcctgagaagggtaaaatccctgcggacgctgaccaccgagagcgccgccgtcctcatgcccttccgtgtccaggagattcaggatcccggcggcctgccctatgggatcaacgccatttccaaaaatctgctgatctgtgaccggaaacggctcatttctccccacgccttctacctgggcgtctccggctccggtaagtctatggcaatgaagtccaccattgagaatgtggccctcgccaccaatgacgacattattatcatcgacgcggaacgggagtacggccccttggcccgtgccctgggcggggaggtcattgaaatttcccccaacagcccccaccacatcaatccgctggagctgacggaggactacggcgacggtgagaatcccgttgcaatgaaatcggagatcatcaccagcattttggagcagcagatgggcgtgggccgtctgagcggcagccacaagtccatcatagaccgctgcaccgccaacgtctaccagaactatttcagcagccggggcaaggcccccatgcctctgctgaccgactggagaaatgaggtcatgcgtcaggtggacccggaggcccgggagatcgccctggccgccgagctgatcaccgagggcagtctgaatgtattcgcccaccccggcaacgtgaacatggacagcaggatcgtggtcctggacctctatgagatgggggaacagcttcgccccaccgccctggtggtcaccttggaggccatccaaaaccgtgtcatggaaaaccgcaaacggggcaaatacacctgggtattcctggacgagtgctacttgtacttcaaatatcactactccggggaatttctctaccgggcgtggaaacgctttcggaagtatgcagcccccatgacggcggctacacagaatattgaggaatgtctgaaatccgagacggcccggctcatgctggccaactcggaatttttgctgctgttcaatcaggcggccactgaccgggcggagctggcaaagctgctgcatatctccgagacgcagatgggctacatcaccaacgccgaggcaggccacggtctgctgcggatcggcggctccctggtgcccttctccaacaccattcccaaggatacggagctgtataagctcatgtcaacgacccctggggaatgaaatcccaccgtgagatatgaatttgtgccctataccattgtgtaataattggtatagggcacagttcatttaataattgatgataattcatcaaaaatttttgccgcagctacaatttgattatacttactactctcacgaaggaagtattgacaagatgtatttctctccacaggttgttttagcgtggcaatataccaatatgccaatgcacaagggccctcaattatttcatgaaacgtccttccattcataatcatattatttttataagaatcgccttcaagcgtttttatatattcatataaattttgacccaaaatgtctatccatatctgttttgtcaaatgacttatttcaggaatccagtcactaatatgttccgttgggtatctatatgaaataatttgatgaagtaattcaaagtataatattgatggatgtgacaaatccccaaacgctaaattgtggagtacgattatgcgattaagaatcttttcttgagtacgaacatcaatatcactaaaaagccgagatgaaaattgtgataaatcctgcaactcaacatcattcatcgtttcaaaacgatcaagataatctttgtgtctttcccaaaaggaatcggacaccaaaccgttatctaattgtacagagaaatcaataaatttcctcataaaatgttgaacatcttgttcctctataccgtatatattttgtataacatggttgagtttagtgccatcatatgccaaaatcactataatattttgctgactttcaaagagatgatgtaggcgctcaagaaccttaactgcatattctggaacacaccgatccaattcatctactacgacaataattggtttatcttttgccatttttgaaagctgatttctggttttagttaaaatagttttaaactcaaaaaacgtatcatatttatggtccttttcagaggcctcttctataccacttttctgtgtttcatatcgctcaattatagattctggagaccatccagtttttgtctctatgacgttgtatacaagttcttttcccaaatcttttgcagccttaaatgtagctttcaatgttggattcgctttaggcagcaaccgattatagttttcacaaatattacgaatagcagcaatgatagcaatggcaggttcatcataatagtcatattgccaacaatcataacggaaaacgatgtatcgatcaccagcagcgttaggatcttggaataaactaatctgttcctcgaacatatcaagaacatagcttttaccgctaccccatttcccgtcaatagcaaaagtacatccttgtttattgtcagctaattgcctcacaattttgattaagttgtctacaaattcttgtcgctccaacacgtcaattttattattcatagagataaactcccttttctatctaaaatcacccggaagggatattaaaattatagtgttagaacatcgaaaaatcaactattaacaaaccagtattaaggtacatctctcgaaaagatgtgccttctttttttaggaggtaaaatgtccaaaatacgagaacgaatccaaggtgacaaaatcaaaaatcagggcaagcgcaagaacggcaagccggtccaacagagggcccgccgtgttatgacggccaagatgaaaaaggagctggcccagcagaagcggggaggcagctccgtcaatgaacagtcccgtgacagcagcgccattaccgaggctgtggatcaggtggagcagaccaccggggccgctgtccatgagagcggccatcagataaggcagggtatttccaaggccgtcaccaaggccaaaaaagagcgacaagagatgaagaaacggcagaatcggccagaagcgccagagccgccgtcccaaacgccacccagcgccacaccccagcaatctccagcttcacatggcagcccgcaagtatttgggggacagccactcaatactctatgcaacaccaccgggccaaaaacttatacatctggcagcccaacagcgcccaaggtacgagacacacccacagcagtagcttcaccgggaatcaaggcccggtcaagctataaagcggaagttccagcgtctcagccgccgtcacccggggcccgtatgctgcaacaggccgtggatcacaggagggagcttgcccggcatccggagcggcccggcactaccccggctggcagcggtcagccaatccaaggacactatggcaaatccaccgctgtccctggcatccctacaactccaaaagaaaatctcttcccaaaaaatcaatctatcaatccatccatcaaggagcgcccccggcgctccttcctcttgaaggagaagcctccaggtggagcgtttacccccaggacccggccaagaactgaacagtccgtcagaaatgcagtaacccctacgaacaaaaaacaggctgctgccaatttgattacaagcaaggcccgccaaaaggctcagagggaggcccagcggagtatatttcagaggacaaagcaggcagcgaaaaccaccgccaatctatcgaaaaaagcggctcttgctactgcaaaggcggtaaaagccttaatcggtgttttatctgcccttatgggcgggactgttctagtggcggccctctgcgtcatattcctggtggccgctgtgatcgcctcgcccttcggcatcctgttcgccaacgagccgtcccccggggctgtgccgttgaacgccgctgtctctcaaatcaacatggagctgacggacaagctggccctcttacaagcggggacctatgacagcattgacattcagggcgctggcccggactggagggaggttgcggcggtatttgcctgcaagacagctatggggacggacagtgtggatgtggctgctctcactccagacaaggtggaccggctgaaagcagtcttttgggatatgtgcgttattacttccagcccggaaaccattaaccatcccgccgttggcagtacagcggcatggagtgaaaaaatcctgcatatcacgattaccgcaaagacggcggaagatatgcggacagcttacctgtttaccagtgaacaaaacagcactttgactgaactgttgactgatttgggtgtaattgatggtctgctgggcgatttgagcatttcccagggtgacgccgccgaactgctacgccgtttgcctgcggacctatccccggagcgccgggccgtggtggagacggcctgcaaactggtaggcaaagtaacatatttttggggcggaaaatcaagaatgattggctgggactctcgctggggaacgctgaaaaaagtgtgggcagatggcaactctactaccggcacctaccgtcccttcggtttggattgctccgggtttgccgattgggtattctacaacgtctcaggtggcagttacgtcctgggccacggcgggggcgctcacgcacagcatacctactgcacccccattacctgggctgaggcccagcccggagacctggttttttaccctaacgatactcatgttggcattgtgggcggctgggacgagagcggcaatatccagatcatacactgtaccagcagctacaataacgtggttattactggcaaggccggttttgccaccataggcaggccgcaatactacagctcataaaaaatgaaatctcacggtgggacgcgaatcttatcaagaatcgactcccaccgtgagattttagtttgcttacttattgaatattgatttcaggattttgtccagctggttcgggtcggaggggagacaaccccgccactggccatccttctctccgggtaaccacaaatgttttccgtcccagtaggcaatgcaccatgaggagcagccgctgacctcccggagagctatgcctcccttcgctggacggacaaagggaagaatacgggtatatttttctccctggagggcgttcagcgccatctgccccggtgcggccctttcggcagtaactggggtatcgctcatgccggggtaatcgcctgcgtgaaggatactgataaagcggcgcgcatgggctggtgttcctgcgtcgcattccacatagacggcggggacttcagcatcgtaactcgcaatttggtcataggtcagctcctccgtcagataggctaaggtaaagcccagtccggcgatagacagtaagacggtaacaacacaaagcggccaaagcagctttttcataattttttctccaatcgtaatcatttcagtttctactcagccgctattccgttgccaatacccacgcatattccaaagcaccgtgttcccaaacggttctggcaacataaacagaatttggaacaggatcataaattctataagcataatgctgtgagtaccgaatatctcacgttagtcaccctcttcgcatttttattgggcgttgaccagtcccaataaataaacgcagaaggggacgatattcttacatcaaatttgaaataattttattttacggatttttccagggcaacgctctccgcgatccgcagaatatctatctatctatccaaaagaagcatccacagcaaactggagatttgattcttcgtcgatcacaaacactgaaacataaagatgaagcaaatatatttgacagaaaacaaatctcacggtgagacgcgaatcttaccatgaatcgaatcccaccgtgagatttaattttctgtgatccattgaataaataacgaaaccttttctaaagccgaatcatctaattcttgcagccttttccccagcgccgctcttttcgtgtcctttacctccagtccggagaaaaactccgagggactaaccccaaaataaagcatgattttgaacagctctttcatggagggcattgtggccccgctggtaattgaccggatgtatgatccgctctttcccaattctaagctcaggcggtgttccgacacattcttctgtccccgcagctctgtaattcgctcacgcagatactgttcatattgcagaagctcatccatgcggcacacctccccgactgttcactattgtaccttgaatcagcagagagtatcagcggtataattatcaatttcaagtttgactttgcagtacttagcattataattattaaatattagaagaaattgaacttcatagtatttgacaagagggtgagacaagatatattttagtagggaaccggcactatataatgtgaaggtctgaggaacttacttgacgaaaatctattggggaggcaggatcatgctgacttttgaaaaggtactgagcatatttgaacaatttctttccgaaaacggaatatatgaaatcgtacaaacttcacacggctatactgtgctggagtgggattcacgcgcgaaagaatggatcggcgtacaactctgttcaaccccggaggaaatggcagaaatcttgttggacaatttaacgggctatttggaatacaaggccacgctgggccgtagagatctgacctatgacgatatggctcaggtcagtgctcaacggcaagcctatctggaaaggctccagtagaacaacagcacaggcgctctaaagttaaggtgcctgtgctgctattcattatcctcaatttctctggctcctatcaatccttctgcggttgattccataacggataactctttttcactcagagaatccagcagccagtctactcgctgccgccgttcgctcttttctttttgatgttttggggaaaagaactgatctacggaaatatccagcaagacaacaagtttataaaagactgccaaacttggatactgcccccggttttccatatacatgacggaatgagcggtacggtctataagctggcccaagtattcctgcgtccacccctttgcttcgcgctttcgcttaatctcttgaccaagcgcacgaaaatctaactgcatttcatcattatacattttcatatcacctcacatcattttacattctagtagctgacatgaaaacaaaatgaaattctagttttagtacaattctattttatattttttgaaaaattaaatcatcccttttgtaccggtactacgttatactacatagaacaaggtggtgagccaatggagtacagcgattttgatttgataagaggaataaaaagcggagatcaagacgcgctgtcgctgctgattcggcgctggtatcctaaaatttactcatactgctataaaatgacagaaaacgaacaggattcctacgacattacacaggatatatttatttctgtaatgcaaaatgtagaccgttttcatatatggaacaaattcagcagctggattttcacgattgcgcataacaagtgcatggactatttcagactgcaaaaaaaggcccgctcagtccagacaatggaaactgaactctatgccccgccacctgcgttggaggagcaaatagctgtttctgataccgttgagaaggcgctattgcgattgcccgaggtgcagcgagacacaattattttgcactactttcagcaatttacctgcaaagaaatcgcccgcatgaccaatacaccactgccaaccgtcaaatccagattgactgccgcaaagaaaatgctgtctaaacttctttgggaggactttcaatgaatgaacgtatggaacaggagatcaaccggacaatcgctttattgcaggcgtcaatgccacggagaagatccgaggccgctttatcgcagctgctgaacatagcgaaaaatgagatgaatccctttttactgctggctttgttttttgtttcgattctgtgcggcatgtgtttgtcaaaagatgtcgcttctccaatggtaacgatattttgtatcagcccgctgcccatgctgatcctgtttcaccgatatgtacttcattccaacgagcctatgcgtgagctggaggagacattacccttttcctattctgaaatgctggttggccgcactgcgctgatatccgcttacatggtgctgatttttgttgcgcttgcgatactcctgtcccactcggcgggagaaaacttccttcgattggccctgtgtggggctgttccaagcacttatctgtgtatggtactgctgatcctgtccgcttttatccggaatcaggatgggctgtcgttggcggccattgttttgtgggccggaatcagctattgcgcgctggtcctgccgtttgaccgttttttgattttgctgccaacctccgtgtatgcggcgcttctgacggttggagcggctttatacgggatgtgcgcttgcaaaataaaacaaaggaggtattcttatgcaactggtattgagtgaggccagaaaacaacgatcattccgcgaggtttgggtggggtatctcctggcagttctgctcttgtccgcatttatttactctgattcaggggagcttaaatatggaggctggtattctatacagcaggatattcacaggtatgtgggcgttttgactgcctttttgcttgtgattggattgtcccgattgatgtgctatgagacagaacaaaaaactgcgggactggttgggaccactgcgcatggtccgtctctgacatggcgggcaaaggttggattgtcgctcttatattgtacggctgtggtatttgtacttggagccgtaaccctgggtattcgcggcgcgctgattgggtttcagggtgcgtttgtgcccgtttcagagtgcttgcattttgaggacgtacctctgtcaaatctggcatactgcattgtccaatatggtttcctgctgctgggggcgctgtattttaccggctttattctgattgttgcaacgctcacaaaacgtacttcatttaccattttcctctgcggcggcatatatttggcctccctctgctaccaatttgttattgattaccggttgaggggattggccggccaaatctgcaaggttatttttcaattcagcttttgcggctttatgcagttggaaagctaccgctggttcggatggacagggcaatgggaaaatgtttggaagccgattgtgtttgtcctgctggcgaccgtccttgaatttgccgtcttgtggatactgtggaggcgtaaggcaaagacatgaaaacagaatgtctccaatacctcaagaatccatattactggaccgtgattggcctggggctggccgcccgcgcaggattggcctacctggacttccgataccggggcccgcaattttgggagctgtccgctgacttctggaacaagaccggctccgtcacaatagggtttttgatactcctggtgatgatccgccgcttttctttcgatacggagcagagaacattccccatgatcaacagtacgacttatgggcgtctctcactgttctggaaccgtctgattggcggcgaagctgcggcagctgcggctgtactgcttctgtatgcgggaaatatcggaatctcatttttgctgggcagtcaaatcggtatgactgatggttggacaggctctttcagccatgctacattggctgcgcttgtcggctcacttggttactttacaatgtcagctatgatatgtgacttagcaaagaaccaccctatcgctatgtgcctgtgcggacttccctttgcaagcagctacttcatcaatgttgatgtggtaagcccaccggatatattctggtttttgcgatatggcttttttacggagttggtacgagggaaaacaatcaaatcctttccagcgttctggtttgtttggtatatggcactcattggactgacactcttgtttgtgattcggaaaaggaaggagcgcaaggagctatgaaccttgtttttgaaaatattagcaaagtgttccaggaaaccgtcgctctggaaaaaatcaacctgaccatgtccggcggcgtctacggcctgttaggacccaacggagccgggaaaacgaccatgatgaaaattatgaccgacctggtgcccccctccacgggccgggtgcttttggacggccaggatattgccttaatgggagccgccttccgaaagaagctggggtatctcccccaggattttggcgtctatccaaactttacggcggagcaatttcttctctacattgcgcgattgaagggcctttcaaagtatgaggcgaagcagcagacggatgacctgctggctatagtggggctggaggagaaagcccggaagaagctaaaagggttttccggagggcaaaagcagcgggtgggaattgcgcaggccctcctgggcgacccggaaatcctggtactggatgaaccgacagccgggctggacccggaggaacgcatccggttccggggaatcatcagcgcgttgtctcagcaaaaaatcgtgctgctgtccactcacatcgtctctgacatagaggccatagccaatcaggtcattttactgaaaaaaggctccatattagacgtgaagcggcccgccgagctattggagaaaatagaaagtaaggtctggaccgtcacggttgatatagaggatgaaacggagctgattcagaaattcccatgcagcaacatcatgcacatggatggaaaaagcgtggttcggttgctctccgaacataaaccatatacagaagctattcagcaatcccctaatatggaagatatgtatttgtattattttggaaaataaattggtaaaacttttcgaagtaaaaaaggcagcaaaaattttcaagataactgtgagaaatgcacctccttctgcatttacccaatgtcattaggaatagcaagttagatcatatccgcccaacggcataataaaaaaaccgttgttttggcggaggggtattgtcgtacccaaatacagatggcttaacggcggtttagaaatatcaattttcaagccgccgttttcttttgaaaaaatgataaacggggggtgtgttaaagtcacccatttttaagaacacggcggtatccgggaggtatcaccgtgtttttttgtgcgctcaggccacatgactggccaaaaaaatccattgctccaagacgggagaaaccaccccggaatatactgaaaaatatcatctaactgaaaacgcccttgtacctgtccgtgtggccttgcgctatgcggatattttcatgtccaataggcccaaaatctgccgaaagcagctatttatatgccctaaaaatttttttcaaaaaacgggcattttgcgggtagcaaagggcctgcccattgtcttagtggcggaaagggaaagaaccacccatccccgacgaaagggggtgagaaaatgggatcgatcccccgcgactatggtaagcagtgccaatttgacactttctgcaaagcggtactgcgcaacgaagcccgaaatctccagcagagcatgaagcgtcagcggcgccgtgtaaccccgctggataccgtgtctccggccgagtgggacaagctcagtgtcacagacagctaccccagcgacagctttgtattttcgtcgcacgggtacagcatgtgcatcgacaacgaacttgtggccgccgcctttgccggcctgtccgctacagagcaaagcatcttgatcctgcactgtgcgctggacctgacagacacggaaatcggcacatatctggaaatgtccagaagtgccgtccaacggcgcaggacaaaagcgttgaccggacttcgcacaaaattggcggcactaatgccgaagggagggtaaacatcatgaagcagccccatcacaagggcagagcaatgctgcccctatcggtaagcaatgctgcccgggccggagacgccgaagctgtggagcaggtcctgcggtactatgcgggttacataaacaagctgtgtaccaggacgctctacgacgaaaccggacgcccctatgaatgtctggacgagtacatgaaacgctgcctggagatcaagctcattcaggccatcgtcacagcagagtgactatgcggcccaggccaagcggaacagcttaccctttccctgttccgactgaccgctggccgctgacggcaccttgaaaaagaaagccccgcaagagaacggcggagcagcatagggcaacggatacattctgtatgcgccgcatcggtaagtgcgccataaccccataccctatgggagagcgggaaccacttgtaccgaaggctggcagccataatcagcggcgcatacgctaacgatactcccctatagccacagcccgagcgttcaaagcgtcgcaggcaatgggtagggccgcatgagaaccatgccgggggtgaaagtcccgtggagctgtgccaacagccgtccgattcatgcccatacttgaccgcactctattggtgcggatattcccatattcaaatctcaccgtgagacgcaaatatggaaaagaagtcatctccagaaagggtttgattttgccgcaatcgggctgatccagtgatacagtccggcttttgcgcatagaaatcagaaggaggtgctttctatgattgacaagaaccttctggaagatatgtcgcgcatcaaaatcaaagatgtggtccctgaccttctgcaagatattcttacagtagaagtcagcggcgaaactgccagccagcggctggaaagctacctggatcaggtaggcaacccatactgtttccgggttgggaacacaccggtacgaatttccttcaaatcctgtgaagaaacacttgacaagaagataaagtcctactttatggggctaaaaagttgatgattcttcccgtttatgctataataatattgttatagaagggggagaaaaaggaggctccccgtaatggcgagaatcagaaaatcggacaagagcagaaccgtcaaaacgcaaatcgtctggaagattgggaaatatatccgcctgtcccgtgaggacggaaatatcgtctctgaatccgtagtcaatcaagaccaaattctaaatgatgaaattcccggcttttttgaagatggtttgtatgaagttgtagacacctacattgacgacgggaccagcggcacaacagacctggagcgccgggactttcagcgcatggtccaggatatgaagtgcggacggatcaactgcgtcattgtcaaaaatttgtccagggcatttcggaacagcgcaaaccagggacactttctggaagaatttatcccgctctacaacacccgttttatctccctctatcagccgagaattgacacgttcctggacccggaggtcgttcacagcctggaggtcagtatcaccggctttatgaacgagcagtacgcctacaagacctccgccgatgtgcggcggacctttaagcacaaacgggagaatggggagttcatcggggcctttgctccatacggctacgccaaggacccggaggataaaaactccctgatcattgacgaggaggccgcccaggtagtgcgagatattttttcctggttcattaccgaaggtctgagtaagaacggaattgcaaagcggctcaatgagtatggaatcctgaatcctgcggcctacaagcgatcaaaaggttttcactacgaaaaccctcattgtaaatacaacgatggaatgtggtctccctctaccgtggcgcgtatcctccaaaaccctttatacatcggtgttatgcgccagggcagacaaaaggtcatcagttacaaggtccataagcgaaccagcgtaccagaggacgaatggtatattgtagaaaatgccgttccagtcatcattgacaaggaaatgttccaagccgctcagaacttacacaagcgtgataccagaacggcgcccggaaaacgggaagtatatttattctccggctttatccgctgcgccgactgcggcaagagcatggtgcgccatacatccagaaaccttgtatattaccaatgcaggacctatcaggataaatccagggataaatgcgccaagcacagcattaggctggacatattggaaaaagctgttttggcagctgttcaaaaacaaattgaacttgtggattctcttgccgagatgattgacgagatcaaccgtgcccccgtggtacacacggaatcccttcgcttgaacgccctgttggaacagaggacaagagagctggagaaggtaacaaaggtcctggacgatctctacatggactggaaaagcggcgacatcacccgtgaccagtaccgccgtatgagggtccggtttgaagaacagtcccagcagctccaggagacgattacgcatatccagggcgagtgtgagatattggcccagggcattgataccgaaaacccctacttgaccgctttcctgaaacaccgcaatattgacagcttatcccgtggcctgctggtggagcttgtcaacgcaatctatgtccatgaagataagagtatcgagatcgaatttaattatgcagaccaataccgccgtattgcagagtacatagggaacaaccaaaaggagctctgcgaaaccggcggaaaagccgtctgaaatgttgcgcataaatgattgtctccgtggcacctgtcgcgcctgtggcgccggcagggcctgtggctccggtggggccggtcacggtgaccagatcaaagtccgccgaggagcccggcgtcccggtagcgccgctgcggttggtgcggtagagggcaccgttgtagtagaccagtgtgcccaggtcatacggtaccccgggaacgaactgtgtgacatcattcagcccttcaccggcagggccggtgggacctgtggggccgataggaccggcaggaccggccggtccagtgggacccgtggctccggtagcgcccgttgcgcccgtggcacccgtagccccggtggctcccgtgggcccggtaggtccaatggggccggccgcgccgttgggggaacctgatataattgggataatcagtagggacccttgtgctgccgcggtttcactggtctagtcccatttttcacaaaaaatgcggccgcttttgccgagataacaaaataaaggaccaagtcatttgacctggtccttcattttgtgacactgccctatttgttggcgcgctgcaggaagcgggtggcctggacaggctggcccggcagggcaattccattagcttatgaacttccatttccagaagccttacagaacaccatggtgtctctgacgggaaagatcattcaggaagaactgttgcctcagccggaaaaatatatccttgactatcagtagggatttggagcccccagacaagaagctgttccgataggaacgaaacctgtgaacatggactttgaagagtatcgattgcagggatacatcacccagatctccaccctctgcggcagcaaacgtattccagatcttaacatggtgctcatcaacaagaacatgcacaggtccgggatggagcacagtacgcaagagctgggatcagggatgaagcagagatttttccagatcctccaccaatttgacgcaatccacattggccgagtcaaggttgacagaggccgcctgttggagctcgctgcgcaggatcagcacgtcttttggggcattgatgcccagcatgacggtgccgctggcgtcgaccgagaggatggtcacactgatctgatcgcctatgacaagcgattctccgccctttcgacgcaaaatcagcatacagaccccgcctcctcagatcgaaactcagaaagccggtggcgcatatgataagttccggtatccaaaatgacctggaccgcttttttctcctcagcatggatcacaatgggacatttcaaattcacggtactctcgcctacaggctcccggacgacacacaggacataatagcacaggtcctggctggaggagacccccataaggtagagttcctcatctgacagaacaggagcataatttggatccagagaaaaaggattcatggctacaaaagcaagtgaaggggtgccaacgctctgaaagcagagcagattgcctccgcccccatgaaaggggagaagcagaaactgcttctcctcttcaaatccaaagatcccattcggaaacgagagcacctcggtgggatcatagtcgatttggccaaaatattttgtcatgagatgcaagatcgatccctcctgttatgcctgcatatcaatgggctcataatttggatcagaggagggggggacgtacagcggaccgcccacatatttgatgatgacatctgggcgctgagtcatggtaaattcaatatccccgggtacaaaggtgaaattcatctgattcatgcgccagttgaagttcagtttgtccatctcatagcggatgctcagctcacctccctcccaggagaggtcaggggcggcgctggggagaaaatcgatgtttacattcaaaggtccttccgcagtctgctgccgggcaagctgaggaatgatatcctgatcgattttggcttccatcatcatacgcccctcccgggccaatacagaggtggcctgataagcaccctgtactccgttttgcgcctgctgctggatcagctgggccgtggtgggagtaacggagctgcgagcctcaaaggtgtcaatattgacccggatgggatggctgcggatattgagcccgccctgttcacgggagatctccatctgagccgttcctcgggcatattccaggtgagcgtcagtgaccttcatctggatctcgattggaactgtggtgatttcgatcaacggatacatcgatgttcacactcctttttaatcagatccgcagctgggatttcgatctcacgggcgggcgggtctccttccggcccggccctagagccgttaccgcagataatccatcaaagactggggaatgacattagcgcctacctgaagagcggcgttatagcaggtctgggcataggagagctgcaggatcgcgtctacccggtcgatgtcctcaatggcgaccagctcattgttcagcgagtcaaaggtgcttttcaggcgggtctgattggtctccagatagtcggcctgggagctgagctccacgtgctcctgaataaggccgttgtgggctttttcaaatttgcttaccagacggctggcatcgtcatagttgccggcggggccccatgtcccctctgtattggccgcgtcattgtgctgatagccgccgaacacatcagagatgcgcagcatgatggaaacgatgtttttgggatctccatcttcatccagcccaaagccgaggatatccatcccggacagagcggaatcaaaggcggtggaggggatcacggctccatttctgtccagctggaagccgagtcccacatccacatacagagtttctccggccatgtccgtcagcttgtcgtggacgtctgagtttgtcaacggcactccattttccagaacttcttttccgttcaggtccagatagacatcatcgttgttcggaacatccaccctccagccccggaaggtaagcacatccacggggggattctggctctgatcctcctgaatggcgaagggagcctctcctgtttcggagccgttaaaaataaagtcgttctcatacttgccattgagcacttgaacaatggcgtccgcgcccgagcggatgacctgggcgtaggagttgagcgagctgagatggctgttgtccaggccgcccagtgcgggagcctgcgccaggtcgtgggtgagctcgttggtcacctcatccaaaatggagtaagcggtgccaaatttattcaggacagtttcgttgttggcagcttgggcattgacggcgttcagcgcactgtgaagcttaaaggcgcgggtggccccggcgggattggaggcgtaggagtcaaaattccgccccgtcatgagcttttccatggcgctgtacagctgattggaactctgcatcagattggactgatacatatggagcgtgctgttggtggtcacgcggatcatagttgattcacctcattatgaaaaaatgccgaaggtcagaccacagtgccgttgatgagggagtccaaagcctcctccagcacggtcatcagccggcaggcggcggtataagccttttgataggtcatcaggctggtggcttcatcgtttagatccacccccatgacgccctcacggtctgtatagacctcgctggccgttgcggagtagttggtcagcagggcagtggtggtcatctggtcctcggccagaacggactgcacatggagcagcatgtcctcgaaggtgccgtgataagcctctcccactgcatctcccccggcgacgtggtcgggatcgaattttatcttctggtcaaagagggccaggaacttggagagattggaggtatcaccgctgggggcatccggtttggtggaggcctggagagaaaccttatcctctgcccaggcctgggagatggagatgttcgctgcggtgatggcgctggcgtcgttggtggcgctgcccatgctgaacagatttccacccgcgagcagatttcccttatcatcgtaaatatgattcagctcgttcatagcggcggcaaattcatgggccagggaatccaaagccttctgatagtaggggatgccccgctttacagcggcattcgggtcattggtggtgccgtctatcgtgtattcgccggcttcggtcagcatttcacgggtggactggagtgcgccgtacaggtcgttatcatccaagatcttcggatcggtggcgttgggctcctgcttctccccgtttttgtcccgcagggcgtacaggctgaccggacagccgtccttggcgctgccagccaggagtttggcagaaaatcccccatccaccagcttgtccttgccgccggtgcccagcgtaacggtcattttttccaccatcaggccggcgcccacgtcctccatctcatattttacgtcgatatccatgtactgactcagctgatccagcaggagattgcgctggtcccgcagctccagggcggcatctccccggatgtccgcatcccggatggatatattcaggtcccgcaggctggtcaggatgttattgacggtgtctacctggtccttgagctgagtctcccaggtctccgtcatgtccgcaagcttatctgcggcatcgttgaacagggagcagagggccttggccgaggcgcggatcagtccctcctgggtggagtcaagaccgctggtgatggccttgttgatcagatcgcgcaggtcgttgagctggttgaggagaacgccgtcatcctgctcaccgtcccccttgcccacctcatccaggatggaggccagcttttccagaccggccagcttggcgtcggcggcgcccacgtcagccgaagcattgcggtaggcgatatccagcccggggtcccggagctgggagaccccggtggtcaaaacgccctgccccacccgggtcttatagggggaataataccggtccgaggcggaggtgatcaggctgacctgatccagccgctggcgggtatatcccgctgtattgatgttggtgatattgtttccagtcacgtccagccccttttgggcggcatagatgccgagacggactgtattgaaggaaccaaatgtactgctcatgatcggcctcctcagactctgagatcggtgtgtgtgtcggagccggtgcggctggcggtggagggaccttcttcctccagccctctgcgctgcagctcctcttcgatcagccggagccgactctccatcaaaatgcgggagggctcctgggcgctgctcaggatgcggtattggttgataagccgctctgacatgcgcctggcggcctcccggtgctctggaggacagcggctgggaagctcccggagggagacatcctccagccccagtgcggcgaggagacgcgcgcgcttttgctcaaagcccttcagggtcatggaaaaggcctgctcccgcttcatgcagtcgttcagcgcatccagatcccgggcgctgacagcggctgccttcttctgttcaacgtcaacgagctgctggagcgtgtgctccagctcctccagaaaattcagatattcagaaaaatccaccatatgtcagtcctttccctgcagcagcatgcgggcggcgatctgaccggggtccacggaatagaggccgtcctggacctgctgacggagcgcctctatctcgtgacaggtggggcgggtccggatctgttgagagatctgcgcggtcagctggcgcacccgcccctgcatgccggcgggctgccctgaaaactggatctgatcgaagctctgccggaagcccccggagaccttttgggtgcgggaggaagaataccggccgacctctcccaagggagagaatccgccgcgatcgatacggaattccatggaaatgtctcctttcgcggatgctcaacaaatatggagcgggaccctggtccggggacttgggggagcggacagccgggaagataggagggggggataagagacggctgcggatatccttccaaagccccggaccagtacactgtaaatatcgtccggaaaatctaaaagttaagcggcgggggcaagttttcttggagagcatgcccgtttgcaggcagtgaagaaaaatttttgtcaggggcaaggggttattttttaaaatatttgaacgatatagaaataggggagacctataaaaaataagccgcggtttttgggatgctccctctctggcggatgggcggagcatgaaaggaaaaccttccccaggcgccaaaacaagatccgaccgatcataattttgaggggagatagagctatggcaatgaaatatgagctgaccagtgatctgatgacaggaaacagtctgatcgatgcggagcacaagcagctgttcgacgccatcaatgacctgatggatgcctgtgcccagggggtggggcgggagaagatcatgtccaccacccagtttctgaacagctatgtcaataagcatttcggcgacgaggagaagctgcaggtccagagcaagtatcccggctatgcggcccacaagcagtttcatgacggctataagcgccagctttcccagacgactcaggcgctgatcgcggagggccccaccgtcaaggcgctgggcgacctgaaccggatcgtgggggtgctggtgtcccacatccggatcgaggacaagaagctggcccgccatgtgaagggcgcctgagacggacacggcgcccccggaggcggcggaataaaactgtgagactgcccgggaaagcggcggagccgctttcccgggcagtctcaggggagcggaaaattttcctgctccccttatttttttcaaaacctggacgatgagactcacagaggaggcagagagatccggagtctcccgcctgctcgtcagcaggatcttttggccgccgtgaaggcctgcggaggctgggagatcagagcagggcaagaaggaacttgcccgcaaaacatcaaggaggaataaagatcatgcgtattcagcacaacatcatggcgatgaacgcctaccgcaactacaccaacaacaccagcgccctgtccaagaacctggagaagctgtcttccggctataagatcaaccgggccggcgacgacgccgcgggtctggccatttccgagaagatgcgtgcccagatcaccggcctggacaaggcccaggacaacgccaaggacggtatctccctggtgcagaccgccgagggcgccctcaccgaggtccacgacatgctcaaccgcatgtacgagctggccgagcagtccgccaacggcacctatgagaatgagaccgaccgtgcccagctccagaaggaggtcacccagctcaagagcgagatcgaccgcatcgcagactccgccaacttcaacggtatcaagttgctggacggctctctgtctagcacgggtggaagtgccgctgtgaccaatatcaatttggatggcggtattacatctacaaccgtagatgctactgcatggaaaagtcaagcaaatctcaaaggaaccgctgtactcgctaaaacagctactgatggtgacaaactatctttggatttcacctatgtggaaaacgggaaggagaagactacctccatctcgtttaccctttccaccaataaagacggtgacaaggtcctagttggggactctggcgcagagtatgccattgctgactttgctggtgctggtgtagcgactaccgacctcgatgcggctgtgagtaaggagctggcgaaatccccgctggcggataaatttaagattactggagactacaatgctactggcctgacctttgaatccaagaccgcaggcgctaatggcccccgcctgactggatatactacaacaactgtggtcgggggaacggccaccagtaccgctgttgccttgggaactgctcaaacacagggagcggacgctcattacacggcgaccacgactgcctttgatggtacaaatgcagatgatgctgtctttactgtgaatggcaaaaaatttgcgtatgcagtggacggtactgatatcagtgcgctcggcaaagatgttaccgttgtatttggtgcggacgcagagaaggctaccaaaaatctggcatctatgatttccaaggagaccggccttaatgttacctctggtggtgctaatgcgttgactatcaaggctggaactgctactatcaacggtggtggcctgactctccagattggcgacactagcgatactttcaaccagctgaatgtgtccattgatgactgccacaccgccgctattggtattgacggtctggatatcggcagtcaggacagcgccgccgctgcgctggacaccatcaaggacgccatcaactacgtgtccaacgtccgcggcaccctgggcgccacccagaaccgtctggaccacaccatcaacaacctgtccgtcatgcaggagaacatccaggatgccgagtccaccatccgcgacaccgacgtggccgacgagatgatggcctataccaagaacaacatcctgatccagtccgcccaggccatgctggcccaggcgaaccaggtcccccagggcgtgctgcagctgcttcagtaatcccaggaaagttcatacgcaaaagagaacggccagtggccgttctcttttttgccgggggaggagcaggggctttccccgccctgggggaggggcccccgcgcgagcccagcggagcgggtcgcgtggggagaggaggcgcgacggagagagggagctttgccgcaggcggcaaagcgagcggttcgaagtccgtgccgacgaagggcgtgctgcagctgcttcagtaatcccaggaaagttcatacgcaaaagagaacggccggtggccgttctctttttttgcctgttaaaaaagccgcgcagaattttgtgccatcatgggcgaaagcatccagatccgttttctctggccgcgtgtgcgtggaagaaaacacgccccgccccgcgagtgcggggccttttcccggacagcagacaaatgatgcgcgcggcaggctgagaaatcatttgtcccctttgaggtgggccatcagaacgccggcaatgttctcgcaggaggcctggacagccaccgcaccgatatcataggcgaccatgggcattccgtagaccacgcaggagtccttgtcctgaccaatggtataggcgccggcccggcgcatttggagcaggccgtcggcgccatcccgtcccatgccggtcatgatgatgcccaccatagggcacttcacagccgaggccatggaggagaacagggcgtccacggaggggcggtggccgctgaccttttctccgggcaggcaggacagggtgtagcggcttcccatacggactacccgcgcctggaggtcggcgggggcgatcagggccaggccgcggcggatctcgtctccgttcaccgcctcccggacttccatccggcacagccggttgagccgctccgcatacatcttggtaaaacccaccggcatgtgctggacgatcaccatgccggggatatcggcagggaggcgcttcaggacttccagggtggcttctgtgccccctgtggaagcgcccaggccgatgatggtgcgatccagatccgaacgccccccgacgccggcgggagagacggaggacagagagggggcggcgggagagacagcggcgcggcggcggaccttggcgcaggaggcgaccacgattttttgggcgagggagtccagaaaggactgcttgctctctgtgccgtccggcttccggacaaaatccactgccccggcggccagggcgtcaaagaccttgaggttcagagacgagaccaggatcaccggaagaggggtgacagggagcagttccttgagaaaatcgatcccattggtgcctggcatctccacgtccagggtcatcacatcgggcgcaagactggagatctttcccctggcgtccaaagcgttgaccgcatagccaacgacttcgatattaggataggaagaaagcccgcgagtaagaaaggtgcgggcgacagcggagtcgtccacaacgagaacgcgaactttgcggttgatcgagagcatggtaacgtcctttccggcttgcctgaataaaaagccattgtcactttttgcggtagactgcaggggcaactgtctgaaacaggggattctggttcagggattcggagtggctgatgaacagataggcccctgggttcatggcatcgtaaaagcgccggacaagggcatctcgggtgggctgatcaaaatagatcatgacattgcggcagaaaatgacatcgaatttgagacggaagcggatcggctccatcagattgaaggaacggaatatcacgttgtcccggatgggctgggagacacggtagagcccccctgtcccctcccgctggaaatatcgcttgagccaggcgtcgggcatgtcagcgggtggctggtagacgccggccatggccttggacaaggcctgctgagagatgtcagtggccagcaccctggtatcccactgggaggcccgggtgccaaaaaattccttgagacagatggaaagcgtgtagggctcttctccgctggagcagccagcgctccagatggagagcacctggtcccgctgatgctttgcggagagctcggggaggatcttatcctgaaaataggcgaagtgatcctgttcacggagaaaaaacgtgtaattggtagtgagcttgttcagcaccagctccaggtccgcaggatcacgggtggaaaacagatgctccagaaaggtgcggaaatccttatagcccagctccctcaaagaatgggagagacggctgctgatcagctggcgctttttgctcaggtcgatgccgtaattctgctggatgaactggaccagtctgtggaagtcggcgtccgatatggtaaagtcatgggaaaatatatccaagataacaccttctactttccgggcatcaggtatgggtcaggatctgagggcagtcgaagaccagcatggtctgcccgtcctccagggagcacatgccggagaccatgtcctgggtgttctgtgccggagcggggagaatggcggacttctcaatgtccatcattttctgtacggtatccaccagaatgcccaccatggtgtcgttgatgttcagaatgataatacaggtgtcctgctgggccggacagcccagcaggatgcgcatgtctacaataggaatgatctgtccgcggaggttgatgatacccaggatatagctggggaccagggggagcagggtaatggtgtgattcgtgatgatctccaccacatattctgcctttactccaaacaggagctgatcggacaaaaagagaagatatttttccgtctgggagtcaaggggggcggaaggtgcctcctccatccctgcgggcagaagtaaagcgtcttgtgccatagctggcagacctcctctaataaaaatgggtcaggcgggggtgtaaaggttggagatatccaagatgatgctgatattgccatcccccaggatcgtgcatccggcgatgccgctctgcttgatgttgaagcgggagagatagctgggcagaggcttcaccacgacctgctgctctcccagcagctcatccacaaacaggcagtaggagagctcgccggattccagccagatcaggatcccatcgctgatctgggagcagcccccctccagctggtagcggtcccgcatccggataacaggataaaaactgcccatgcatttgaacagctcccccccggaggcgtcatggatcaggtcggagtcgttgaccttgaaggactggcggatattctgaatgggaatggtgaagatggaggaacctaccgagacctccatgccgtccatgatcgccatggtcagggggatcttcagcgttgtggtcattcccctgccgggatcactggtgatgaccaccgtgccgcccacgtcctccacattccgcttgaccacatccatgccaacgccgcggccggaatactccgtcacctccgtgttggtggagaagcctggggccatcagaaagttgagaatatccctgtgggaatattccacgtccggcagagcgatgccgtttcggatggccttgttgagcacggcgtcatagttgacgccctggccgtcatcccggatctcaatgatgacctcgctcccggtgtgccgtgcggataggatgatctcacccaccgggtcctttccggcatcgatccgatcctgaggggtctcctcgatcccgtggtccatagagttccgaacgatatgcatgatggggtcgctgatactgtctacgatggtcttgtccacctcagtgtcctcccccaccagggtgagcttgacctgtttccccagctttttgcacatgtcgcgcacgatccgatgcattttttggaacgtcccggagaccgggaccatgcgcagggacatggaaacatcctgaagctcatccgtaagtttgcggagctgacgggcggatttggtgaaggcatccagcttgagccccttcaggtccggagaggaggtgaccatggactcggtaatgacgatctcccccacaacagcggccaattgatccagcttgctcagattgacgctgatgagactttcgcggtggtgagcgccggcatcggaagaggactgagaagagggggagggcgcagcgggcttagcattggcggtggttttctgctccgggggctccggggcagaggccttctgctcggcggggagcgcctgcggggcaggggcaggaatggagctggactgcgggcggtcaaaggcctgataggtccggacagagcccgcgcccgtgactgcatggacggcattttcacggtcctctgcatcccggaagtacatcatgaagccggagtcgatgatctggcccgcggtgctgggatctgtggagatgtcggcgggagaaaagtgaaaattcccctccccgcagatatcacggaccgcattgaccagcataaaggcacgggcattttccatgccgcagccctcatcaaaaaagatttgaagcgcataggggaaatcaggatattctgtcggctgatcctgggcgaccgcccccgcctgccctggggaagggggctggggagcaccggtgttttgaatttgctggatcagggtattaactttttgcagcaagctgtcgatattttcagtaaggggttgcccattttcgatatgatcgatctcctgacggaagaagtcgatggtctggaaaagcagctcgaacagctcagggcggttggcctctgggacgatgtccatggacttgtcccgaatgatggaaaacaggtcctcagcgcggtgggcgatcgtcatgatggagcgatactccatcatggcagaggagcctttgatggtgtgcataatacggaagatagtattgatatcctcctcagagaaggtgtccttttcctctgacgccagtacgatactgtccagctgctccagcagagtgtttgtttcataaagataggcgtccaaaatgctgtcgttcccagtactcataaagccgtatccttcctttgcagtttaacattcactctgtttatcgaccgtgagagagaaaaaataaggcttgaatttccaaaagacacactttgggcgctggaaatggcggaactgccgctgatgcagcgggaaagtccagacagatgcagaatagaaaggtgatttgaagtatggcagacctgctcggtgcgaccaatccggtcccaggctacgatggcgccagccaaaacagaagtcattccgccttgccgcaggtccaggaccccagggtgcagaacgtgccggacctatccagggtcagccgggcggacggacggacagagcagcagggtgccggcaaccatctggatgccggcaggctgcggtatgattccaatctgcagacctttttgcagcagctgcgggacgcgccggatctggccgcagtgctggcaaagaccgtggtttggatgcgtggactggtatcggcacccggactgtctgaggggatcgcccaggaaatggcacagctgctggagatgctgcggatggatcaggagggatttcagcgcttttttctgaaccagatgcaggcggggaaccgattttccggaccgctgttctccctgctccgacaggcatatcagaacatgcccagcgaagggatgcgggaggctattcttaattttgcaaagcgctatggagatttttcggcggagcagcacctggcagagaatatgacgcttcggctgaagcagatggcagactatctgcccaaaagctggcgcggccagctgatggagctaacagcaaggctggaaaacggacttcaggcaggcagccggacggaaaatctgaagctgctccagggagagatcattccatatctgggctcctatgtggagcagacccatgatattgggaagctgaggactctgatcggacttctgatgctggatgtggcgcgctatgaaaacggcggggaggagggggtcctggccgccttccgccagctgagcggatatggagagatgctggccggactgaacgaacttgacgatgcggccctgctgcgcctcctgcgggagaacagcttcacaagagccgttcaggaggaccaatttgcccagcgcctggcccacacggcggcgcaggcactccaagggaagtatggggctgatgtccgggagggcttccaggaactggtgcgggcgttcctgctgaatgaaagcgtttttatgccgctcaaccatatgatcatcccgctggagtggaacggaagggcgatgtattctgagctttgggtagatcctgatgcgggggaccgggagaaggggagccgccagccgggccaagaaaaaattcagttcctcttcaagctggatatccagtcgctggggtatctggagatgacgctggccgcccggcaggaagagatcgaactggatatttatggtccggatgcggtgatggagtgcggcggggtggtcgcagaggaccttcgggagatactggcctcccacggattgtctggaaagaacgtccgcgtgatgaaacgggaaagaccactggctctgacggaggtgtttcccgacctgtttgagggaaagaggagtgtaaatgtcaaggtctagtagaggccagatccccggggagggggagcgggcggtagccctgcagtattctccgggaaatggggcaccggtcatagtggcgtcaggtatgggccacttggcagagaagatcgtggaagtggcggtggagagcggagtgccggtctatgaggacaactcgctggccacggtgctgtcccagatggaactgggacgggagatcccggaggagctgtatcaggcaattgtggagatttatgtctattttctcaatttcgacccaaaggaccctgagaaatttcggagagaacgaaacaagcagactggaccagccgcaggaggggaaaagacatgagacatcaatatttgatgatcgacagccgcgggaaccccgtggcccacggaacatctgatgacgggctggaaaagtcggtctgggagatccaagtggacagcggggatatcaagcgggtgctgtcccatgagtatgtcagcttggtgagctcatcggaaaaagttccggcgatggagggacggatcatccgccgggatggaaatatcatctcagtcgagtcggtccgaaggctgggagaagatgtgcggcgcaacctgcggatgccggtccggtttgagagctacctgtacccggtctcaggggaatggaagggcagactgcctattttgagcaatgacctgagctgcggggggatatcttttttctgcgcaaggacgctggcggagggagagatcgtgcagatcgccgtgccgatcacggctcagcccctgctgctgaacataaaagtgctgcggcagcgtccctcaggggaaccgatcccactgtttgcagcggcgtttgaggaactggtccatgaggaagaaaagatgatccgggaagcagtattcagtctgcagctgagcgggacgaccgggatctgagtgaagctgaaagagaaaggaagcagtggacagagatgaagagatggaaagagtttcgttttgaatatctgaggacggcggctgtcttcctgctgctgtgtgccatggcctgcaccttgatatgggcgctcccggcacaggtccatgcggactatacagagccatatatgaaaagaatggaagagctgggactgcttcagggggatgcagatggggatctgaggccgggagaccccatcacccgggcggaatttgtcactatcatcaaccgggcatttggctatcgatctgcggggggacatcccttccgggatgttccgggcaccgcatggtatgcggaagatgtagacatcggctatacggagggatatattacggggacctcccctactgccttttccccgaacctgagcatcacccgggaggaggcggctttcattctggcgaagaacctgatgatggaaccggcagtgggggagaacaccagttttgcggacggaagaagcatcagtacatggagccgaggaatggtctccgcggcagcggagaataacctgatcagcggttatccggacggcaccttccggccgcagaaaagcatcacccggggggaggctgcggtgatcctcctgaacgccgttggcaccccggtcagcaggcctggtactactacactgggagatgtttggggcaacgtgacgatcacatcctccggtgttactctgaaagataccgttgtggcgggaaatctgtacgtcactgcgggggtggaactgggtgacgtggtgctggagaacgtgaaggtgctgggggagatcgtggtcagcggcggcggcgtcagtgaagcgggcgaggacagcgtgatcctccgcaatgtggacgcccccaagctggtggtggacaacatcaaaaaccagcaggtctccctccgggtggagggagatggcctgatccagcaggccagcgtccggacagacgcctttttggcggacaataccccagccggacacggcatcggggagatcgagctcaacggagaaaacggcctggagctgaagctggcaggcaacatcaagaatgtggtcaaccgcacaccggagtctgcactgagcatctctagcggacgtgtggacaccattacagtggatgagaaggcagtggacagcacactggagatctcttccggcgcggaggtagatcatgtcaatctggatgtggggaccacagtcactggggacggagacatcggagatctggtggtgaacgcaccggggagcaatgtgtccatgctgcccgatcagatcgtgatccggccgggggatacggccaacatcgacggagaaaacatggacagtgaggcagcggcagagtcctccgcagatccgcgtctgctctcagggtatcccaaaatcactgacctggccccaacctctgccacagcgcagttcagcggcaataagcgtgggaccgtgtactgggctgtcacctcggtgacagatggttcggtggggacggatgagctgatcgatccgccctcctataccacgaagatcgtggcaaatggctctgccgccctgagcggggcgggagagaggtctacggcaaaaatcagcaagctcgtctccgacggctcctactatctttccgcggtgctggtggatgccagaggggatcagagtccgttgaaggtgctctccttcacgactccggacaatacggtgccaggctttgccgatgggtacccctatatgtccaaggtcacaaatgtgtctgcgcaggtgactgtgatggcgaccaagagctgccggctttactgggcgctgctgcccaaaggcgcgcaggctcccacggcgcaggacttcaaggccaacgccgtaacaggaaatcttggctatggaagcagagatgtgaccaaaaacaccgcctattcctttgatgtgaacaacgtggcactggaggaactggagagctatgatctgtatctgtggctcactgatgtggaagggggacagagctcccgggtggagaagctgtccttcacgactgtggaccgcaccccgcccaagttcaacaccaacgccacagtaaacaaggtggagcggacctcggtgggcctctatgccaatctgaatgaggcgggaaccctgtattgggtggtggtggaacaggggacagagtaccccaagcctctggcggggcagtccggcccggtggacctgtccagtgatacggccaagatgcaggtttctgcggggatgaacgccctgaaaagcggcaaggtgaacatgagccaggacaaagatgtgagcttcaatgtcagcgggctcgacccagagaaggcctatgacctgtattatgtagcgcaggacaaagcaggcaactactccgccagagttcaggtgatcaccatccataccctggaccccagcgcccccaccgtggtccaggagtttacccgctacaacggggacgaatcggggacgccttatccggatacagatatccggctggtgttcagtgaggaggtccaggacgcggcagccaatgtgacactgaaggagtattacgaccgggtgactgccgccaagggggagacggagaaggaacaggccagaacggccctgggaaatgtgctgagaaacagcatcaagctctatgtggacacagggagcgggcgcccggagctggtggccgatggtgtggatgccgcagacaagacccagggaggctgggtgatcgactaccgttatgccgaggttaccatggaagagggaaaaacggtggtgatcttccggactgcggacagcgagaaggagagtgctctgaatctccagagcggtgcagagtaccactttgagatcgaggccaacaccatttccgacacctcagacgccaaaaatatcatgggaaagaccaagctggataccttcaagaccattttcgcagtggtcaacctgagcaaccccaatgagtccacgctggagggaacgatcacagactaccatgacccggggcaggagatccagctgacgggggatgacaagctggtagatatcagctggctgctggcccccgccactactgagagcgtgccggacaacgtggactgggatatgatcatctggtcagacaccagcattgcctttgatctgtaccgccggaccaatcttgctgaaacgccggggaaatgggagcggatcggcgaggagatcgagctgacagtgccggacggagacgaccggaggggcgtcagcctgactcggatcctccagaagggaaacaacccccagttccagcagttgaatcagctgctggaggagaaccagtatgagtatgccgtccactttacccgggtgggcaccctgggggaccgggatacctggagccagcgggtaacgatgggggtcactgtggtggcgggcagcaccagcgatctgggaagcctggccaacggacggctggacagctccgcactggaggaagcgctggctgaaggggtgaccaacattggacagccggacgactttacgctgcgcaagcagttcagcgaccagaccccgcccatctttgtggataaccggccgaactttgagacgggagattccagcgtcaaaatgtacctgatgctggaccggccggggaccatctattatatggtggctccatacgggacggtaactacagagggcgagaagcgggacggctcaaagaaatatcatttcagtaccgataaaacagactacgaagcgcttccaaaaaatggggagaacgatccgggcagcggcggaatggaatacccatttaacatcaccgcacccacgcccttgtctatcatcaacgcggggaatcaggccaacgcacgcatcaagcacggctccattcagggcggcgccacagaggtggagaagatcgtccaggatctggaagtcaaaacggactacatcgcctattttgtgatccagggcagctcctcccaggtctattcggaggtctatgcctaccggttcagcacagacgatgtgactccggcctacatcacgatgcgggcggtcaacccggaggtggagttcaccacctcccaggatgccaccctgtactattccctgtttgcctccaacaagctgccccccctgtttgggcaaaacctggcgagaaatcatctggacccagagtaccgagatgaggttggaacagagataactgacctgacgctgctggaggccattcaaaagaccatcaatggtgtgacaggcgaatcctattttgaccgctatgccagtgaggagaccaaggagcaggtgcgtcaggccatcaccagccagaccagcagcgaggcgctggacaagggcagtatccccaatatggcgcagaaagagccccaggcccatgactttaccaatgccatggacccggagagcgccactgcctatgtctgtttggctacagcccagaatgcgctgggcgggaagtggaccttcaaggcggtggacggggtgcgcatcccagacgaagacgcccctgtgctgctcaaggtgacgaccacggtgaccaaggtaaacgatgctgcagatcctgtacgggtctccggaactgtgacactccagttcagcgagaccatctaccacatcaacgattccggcaatccggacaccctccgggccatcatccagcgcgatgtggacaaacagaaggaagtgggcttcctgaatctggtcaaccagagtcagagcaatttgaagtacagcaaggaatcgggcaataccaccaacaccattacgctggatttctgggatgcaccggtgggggccacgttcagcttctgcaacacgggccatctggcggacgcatccgccaacagccgccagaacgacagctatacgctggagctgcagccgacagaggggatcgggctgatcacaggagggaccacctatcactttgtggtgacacagggcaattatccgggaaactaaaggaaaaagccgacatgggcgggcaaagcattgcccgcccatggcttaagatccgggagggatcatgatgaaaagaagtatcgcgaacaggatcgccgccctggcattggcactggtgctggcgggctctttggtgcccggggcctgggcggcagagggggagccggagggcggcggacagctgaccggtgtgacggtcacaccctccaacctctccatgaaagtgggggagcgggcctatgtggaggcttcggccgccgggctgagccaggaccagatggaagacgcgcggatcgagtggtcccttgagaacaacgatccggagcgggtcaggatcgcctctggtcgggacagctggaccgtggaggtggaggcagtcaacaccgccgagaccacggagacagacccggtgaccctggtggccactgtgacctgtcagggaggcgcggagagggacacctgcgcgatcactgtggttccggatcagccggccggccttcagatcaccccggagggggatcaggagctggagccgggtgagaccctccagctccgggccgagatcaccccggcagatcaggctgagcctgtgacttggtccagctcggacccggatgccgcggaggtggacagggacactggactggtgaccgcggggcgggaaccggggcgcacaaaaattacggcccggtcgcagagcggcctgacagattcctgtgaggctgccgtgcggggcatcgttctgccggagaaccttattatgcgggaaaatgaaaatcagcgcctgatcccggaagtctatggcgcggcgctggagcgggaggatgccgcctggaccagcagcgatgagaggatcttgaaggtggacaatgggtatctctatcctgtatccgtgggagaggccgcggtcaccgccgagatccgggcgggcggccgcctttatacggcttcctgccaggtcactgtagaggccaacaccgctgatgtgatcacggcagctgcaggagcgggggacccgctgcgctttgacgagatccagagagagttggagcgggagtgccgaagcgtgctgggaagctcactggactatgtgggcggcctgtgggtgaatacccggcagggcacgctctactatcgctataattctgaaggggatactggagccggggtggggaccagcgagaactactatgccgatccctcagccagccagatgggcctgggcgatgtggcttttgtccccaagggagatttcagcggaacggcagtgatctcctataccggctatgcaagggatgggggctcctttcaggggaccattgaggtagaggtggaggagacagaggagatcgagtatgctgtctccgccgataaggcggtccagtttgacccggatgacttcaaccgagtctgccggaaccggacaggccgggatctgagctatgtggaattctctcatccggacagtggaaagggaactctgtattaccgttatatctccccggccaatccgggcagcgaggtagacccctccaaggagtacaagcgttccggaactcccagtctgtccgatgtctattttgtacctgagggaggcagcggtcaggccgtgatctcctataccggatacaacgtctacggcgactccttccgggggaggatcacgatccggatctctgaggccagcggtcggggcgacctgaattattccatcgctcaggggggacggctgaacctggacgagagtgatttcaatgacctggccaaacggatcacgggatatgctttggactatgtccagtttgaactgcctgcttcttcagaggggactctgtattacaactataccggaaacggctcctatgacagtcgggtaacagagggacgcagctattaccggtcgtcttccccttacctcagacgggtcacctttgtggcagacagggatttctccggaacggcggagatcgattttaacgcctgggatacaaagggaaaccggtttgccggtactgtggaggtggccgttggccggggcggcaaaggagatatccgctattccgtccatcaaaatggaaaagtcacactggatgacaacgatttcaacgcgctgtgccgtgaactgacggggagcacgctcgatcatgtcagctttgaccctccccccgcagcccaggggaccctgtactatcgctatgataacggagattatgacagcaaggtgaccagctctaaatgctattaccgctccgggagtccctatcttgaccaggtgaccttcgtgccggcccggaatttttctggcgtggtctccattccctttaccgggcgggggacgaatggagaggacttctcgggccagctggagatcggcgtggatactggatcggacctcatcgagtaccgggtgaagcccaacagctttgtcacctttgacgatggagattttgacgatctctgtcaggagatgactggaagccggctgcgctatgtccgcttcgagctgcccagctcctccaaggggacgctgtattacggatatgacgatggtgactatgacagtaaggtgacggagtccaagagctactaccgtgggacagatccctatctggaccgggtgtgctttgtccccgctgaaggtgttttcggagcggtggatctggaatttaccggctggagcacagatggcggcaaatttgaagggactgtgagaattacggtggaggagccgaaagggccttctgtgatcacctacgcgacagacggccgcccgctctccttctacgcccgggacttccaagaggcatgtgaggaccgcgggatgggcggactggcctatgtgcgttttgatacacccagcagcagtgtgggaagactctattttcaataccagggagcgggggaaagcaatacagaggtccggatgaccaccagctattatccggcgaagtcccctggaatttcggagatcacctttgttccgaaagtgggctatcaggggacagcaagtatctcctatacaggatgggacacaaaaggaaacgaataccgcggtcggatccagatctcggtaaggcccgccacagcctcacggtatttttgggatatgagctcctttgagtgggcggttccggcggtggatctcctgtatgaaaacggagtggtccacgggacgggaaatgggacatacagccccggacagcagatcacccggggagactatgtactgatgctctgtcaggcgtttcagctctctgggcagggaaaggctggattctgggatgttccccgggacagctactatgcccaggctgttatgactgcccaagcgctgggcattacaggcggctatccggacggagggttccatccaggatcaccggttacccgccaggatgctgcggtgttcctgatgaaggcaatgcaggcggatggatggagcctgggcggcggaaatgagcagatgctcagccgcttccgggacgaaagcagcatttcagcctatgcgcgaagcgccatggcagttatggtggagtatggagtcctgtcaggaacagcagatcaaaccataagtccgcaaaaggcgatcactcgcgctgagatggctgtgatgctggccaacgcgctgaccctttgagcgttgaatatatgagaataggatccctgccggacctccgtgaatacggaggtccggcagggatttttctatgcagcagggcaggcagtgaaatagacttccgtacttggactcataatacatgtaaaaacattcactaaaacaagggaactttgtgtcccgcctactacaatagatgcatacctcaacatgaaaaaagcgatttggaggagaaattatgagtctaaaaaatgcaggaaagaatgtttttgagaaagaagatggggcactggaagcctttcgccgatatctggagctggatgaaaaaagcgaggcgacgatcagaaaatatatgcatgatgtcaaagtgttcctgacctttcagaaggggaaaggctccttccggaaggagcagatcattggatataaaaattggctgggagagcggtacgcggtgcgcagcgcaaattccatgctgactgcagtgaatcagtttctgaaatttgtcggggcaggggaatgctgcgtcaagctgttcaagctgcagtaccagactttttgtgaccagagaaaggagctggggcgggaagaatataggcgccttttggagacagcccggcggaaaaaacagatccgtctgtacttcctgatcttgacgctgtgcgctactgggatccggatcagtgagctgcaatatattacagttgaggcggcagtgagtggaaacactattgcaaaaaataaaggcaagagccgggtgatcctgatcccgcaaaagctttgcgatgtccttctggactatgcggcatggatagggatctctcacggcccgatttttattacccgcggtggaaggcccgtggaccggagcaatgtgtggagagcgatgcagaagctgtgcagggaagccggagtgccagaggaaaaagtatatccccataatctgcggcatctgtttgccagcaccttttacgaaaaagagaaggatatcctgcatttagcggatatccttggacacaaaaacgtcaatacaacgcgtatctataccctggcaacaggtgaggtccaccgagcacagatcgaatctttaaatctgttcgttccggtgctgaatacggagcagccgtctcgcaataaaaaacaacgtaataataagttatgttgtttacatacgaaaaaaaagttctgaaaaatcttttgtcgctattattctacaattttccccacacttttgcaagtctaattttgcctctttttatacaaaaaaacaagaggccattcttttttcttttacattttctaagatattttttgaaaaatcgcattaaaccaccgaaaaagtttacatttttctgggctaacatcgataaaaccacttaagtacaggccggtattttgaccgcttgctaatcatgcccacatcgaaagaaacaacataacttattattatgtggtaacgggtttgttttttgcagattttgtcgaagaaccatgaaaatgaccgaaaaagaagagagggctggtcgataaaatggatggtctcagcagcaactcattcctgatgatgcagcgctccatggaatttctgtggagcaagcaatcctgcattttagacaacatcgcaaatgtggagacaccgggctatcaggtgaaatacgctacgtttgaggaggcgctcaaaaatgccgtcctctcctccgcccaaaatggaatctcctcttcttccatccggaaggccattgaagagacgcccgtagtcgtgcgggaggcgcaggagagtgtccgcatggacggaaacggtgtcaatatcacagaacagtccgtggagctggcacgcaacgggtatcaaatgcagtatgtatttggggccatttccagcgacattgctacgcttcaggccgtcatccgcggctaatgagacagggagggacctaatatggcgtttttaagctcaatgaatgtggtgggatcagggctgaccgctcagcagctccgcctggacgtagtatcggagaacatcacgaacaggaccaccacgcggacagaggggggcggagcctaccgacgcaagatggtggtatttgaggcggagggagagcgcagcccgtttcaggcggcactggaccgtgccttggggagaggagcctctagcaccgcgggaggcgttcgggtaactgaaattgtggaggacccctctgactttaagctcgtctatgatcctgagcaccctgatgccaatgcggagggatatgtagagatgcccaacgtggatctgatgcaggagatggcggatgccatggcggccagtcaggcctattcggccaatgtgaccgcattcaatgtgctcaaacaggtggcggctaagggactcgagatcgggaaataagagaaagattgaaaccagcacctgctgagcaggtgctggtagtgcagatgcggaggagaaaacagtgatggattttcggcctatagaccccatccaacccctttttcggggagatactgcaggaagcgtcgggacagccggggacagccgggagcagggctcgctgtttgctgatatttttcaggcggcagtggaaaatgtgaaagagacagagcgggtaaagaatgatgcagaatatcgtttggcgaccggtcagatggacaaccctgcggagatgtccattgccagcagccagtggtcaatgtctgtcaatctgttgattcagctgaggaataaggctctggatgcttacaacgagctcatgcggatcagtttgtaatcacagcaggagccggagggagtaagcagtgcaagagaaggtaaagggattcttccagaagatcaaacagtggtggctgtctgcggcaaaaaaaacaaagatccttttaggggccggagcggctgcggtccttgtggtgattgctctggtactggctgtgagcctgaaccagccctatacagtcctttttaccgggctgaaccagacggatctgaccgcgatcgtctcctatctgtctgataacggggtgacggattaccagatccagggggaggacacggtcctggttccggaaagtcaggaggagcagctgaaggcggcacttctgatagagggctatccaaactccgggtcgggttattccatgtatctggaccacgtgagcagtctgaccacagaatcagagcgcagtcagttggcactgtatgacttacaggacaggctggcgggcgtgatccgcaatttttcctctgtgcgggacgcagcagtctttatcacgcctggagaggatcatacctatgtgctggacagcggcaatgtggtggaggcccgcgccacagtgattgtgaccatggaggaaggggcctccctcacagacgggcaggtgaaggcgatccgcaatgcggtcagccatgcggttcagggactgagcatcgacgctgtggccattgaggaccagttcggcaacaactatactgcccaggacgggatcaccgatgtacaggacatctctgcgctgaagatgcgcctggaagagcagacaaacaacaagatccgcacccaggtgatgcaggttctgatccccttgtttggggaagaaaacatccgggtgagcgttaacagcatcgtaaacatggaccggacctataccgattccaccaactacagcggtgaggaagatggagagggcatcatcggagaccgggtcttcgagcaggagatcatccgggggggagacgagacggccgggggtacggtcgggaccccttcaaacgcagatctgaatacctatgttcaggagcagctgaatgccaacggggatgaggtgctcatctctaacagcggtgaggagcacagcctggtggacacggagaaggtccaggtggagcatctggccggaactgtggcggatgtgatggtgtctgtcaccattaaccaatcggcggcggggggtgccagcgcaaacagcctctatccccatgtggcccgggcggccggaatcggcacagagctccagaatgaaaagatatccattctgatccaacccttctatcaggagggaacggcgccgatcccggtgccggatggcgttccggcatggatgctctatgcggcgctggccgggctgggtgtatttgtgatcctcctgatggtagtcctgctgatccgcaggcggtcaaagcgccgaaagaagctggatggagtgcagacggtccagagggcggaggagatcccggcgcctgctcccgagggggccgatatcatggatatgaagacggaaaagagcttggagctgcggagggatgtgcggaaatttgcggaggaaaatccggaaattgcggctcagatggtgaaaaactggctgcgggaaggagatgacgcgggatgagcgaacctatatccaagggaggcaccgcccatcccaggctgactaggcaacagaaagcggcagcggtgatcgtctccctgggcacagacaaggcatcccagctctatcagtacatggacccggaggacgtggaacagattaccctggaggtggcaaaactgggttatctggattccagcgccactgaagacgtactgactgagtactaccagatgtgcatgaccaacaaggcggtgacagagggcggcctggaatacgccagggctgtactggaaaaggcgtttggccagcagacggctaccagcctgctggagaaggtgaccaagtcgctgaaaaaccgagaattcgcctttttgaacaaggcggatgagaagtccctgtatgcggctttgcagcatgagagaccgcagaccatcgcgctggtgctgtcctatgtggatgcggagaaatcagcagccgtgatcgaggagctggatgacgagcggcaggtccgggtgattgagaatatggccaatatggagagtgcctcccccactgcggtaaaaatcatcgaggcggagatggagaagaagttctccagcctgatgacagccagcaatgtaaaggtgggcggagtagactttgtggcggatgtgatgaacaatctggaccgctccagcgagaaaaacatctttgaccgcctggccgagtacaacgagcctctggcggatgagatccgcaagcgcatgtttgtgtttgaggacatcgttaccatggatgaccgttcggtgcagcggtttgtccgggactgcgatcccagagatctggtgctggcgctcaagggcgcaaacagcgatgtggccaacaaaattttcaccaatatgtcggcccgcatggcgcagagcatccgggaggatctggagattaccagcaatgtccgcatccgggacgtggaggaggcccagcagcgcattgttgggatcatccgggacttggaggaacgcagcgagctgatcatcctcaagggcggaaaggacgatatcattgcctaatatttttaagagcttcctgaagccggctgtcaactcctatgtatttccggatgcagagagcctccaggtggaggagagcccggagcccgagggggaacaggcggaggaaacgccgctccaggagcaggagccggaagcgccccatactgcggcggcggatgccctgaattacgccaagatccaggcggagaagatcttggaggatgcccggcaacaggcggaggagcttttagaacaggagcggcagcacatccggcaggaggcggaggccgagaaggagctggccagagcggacggctaccggcagggctacggagagggactgcggcaggcccgggtggagggcgcggcccagatagaagagcatcggaaacaggaggcagagcgtatccgcagctttctggagcaggcggcggcagcgcgggattcgctgctggagcaggcccagaatgaactgtgtgagctgagcctggcagtagcggagaaggtcatccacatcagtctgcggaccagccgggatgtgatcgcccgtatgatccaggtggcgacagaaaagctgaagcgccgggagtgggtgcatatctatgtggggggatatgaggccagggatctggcccagatcaccccagagcttaccacagcgctggcggggctctcagagcatatcaagatcatccctatgtcagatgatgagctgggtgcctgtatcatcgagatgccggacgagatcatagacgccagtgcgtccacgcagctgaacaacatccgggacgttctcagcggaggctgacagccgggacagcggaaagggcacagattccatgtttgaagacaagatccagcaggtccgaaaggcggagaccatcagctataccggaaaaattgaaaatattgtgggcatgtctatcgaggcatcgggaggccgggcggcggtgggcgacatctgtcagatttacaacggagaatccggtggacaggtcctggcggaggtagtgggcttcaagaacgacaggatgctgctgatgccctactccgacatgagcgggatctcttcgggaaattttgtccgcaataccggccgcaggctgagcctgatgatgggagcctttctcaaagggcgggtgattaacgcactgggacagcccattgatggaaagggacccttccatggaggtacgtccttctgtgtggaacggaaccagtatatcaatcccatgtcacgcccccctatccgggagcggatggagtttggcgtgaaggcgatagacagcatgctgaccatcgggaagggacagcgcatcggtatctttgcgggatctggtgtaggcaaaagcacactgatggggatgatcgcgaaaaatgtgaaagcggacatcaatgttatcgccctggtgggggagcggggacgcgaggttctggagtttatggaaaaggacctgggagaggaggggatgcgccgctccatcttggtagtggcaacctctgaccagccggctatgctgcgcaagcagtgcccctcagtagccaccgggatcgcggaatactttcgggatcaggggtgtcatgtgctgctgatgatggactcactgacccggttcgccatggcacagcgggagatcgggctggcggtgggggagcccccggtggcgcgcggctatactccgtctatctatgcggaactgcccaagctgctggagcgcagcggaaattttcaaaaaggctccattaccggcgtctataccgtgctggtggagggcgacgataccaacgaacccatcgcggataccgtgcggggtattttggacggacacattgtgctctccagaaagctggccaacagcaaccatttcccggccatcgacatcaacgcaagcatctcccgcctgatgaatgacatcgtcgcgccggagcacctgactctggcggcccgggtacgggatgtgatggggatctatgaaaagaatgcagatctggtctccatcggtgcttacaaggcggggaccaacccgcggctggattacgcgatcagcaagattgacgggatcaaccaattcctgacccaaggggtgaatgaggcattctcctatgaggaggatctggaggcaatgcgcgggctgctgtgaaaaggatggaacggaaatgaagcggtttcaattcggtctggatacggtcctccagtataagcgccaggtgctggatggtgctcaaaatgaatacgcggaggcgatccagcgggtccggcagcaggagcggcggctgcgggaagcggaggcgcgccaccggagcctgaatcagcagtttcgcagggcagaggcagaggggatcaccattgcggacgccatgggctatgagatggggctgcggatgctggagggagagatccagcgtgaggagagcagactgcaccagcttcagacggaggccgaagaacggcggaagaggatgatcgcggccaggcaggacacctcgtcactggaaaaactgcgggaaaaaaagctggagagctatgagaaagaactccagaggcaggaagaactgcggatcgacgaactggtggccaatactcgtgcggtggaagccggcctgctctgactttcagcattgaaaggaggtgagaaagatgaatacaagtgatttgacgcttcaaatggcttatttggccggacagatcgcccagagcaccctgccggatatcggggtgtctgctggcaggccggagcagaagatggattttcaggcgcttttgaatgaaaagcgaacccaggcagaccgggaaagaacggagcaggagcctcagaagacagatccgtcccaagatacagagaccggaaagacggagcagaaggacgaagatgtagcggctcaagcagctggacagggcgttccactgatgctggatttgagttcggtcctggccggcggggggatcgtgccattcgtgggctgcgctgttgtaacggagcaggcagaacagataacagcacaggcgcctgctttgccggcagctgatgctgttgtggagggagagaaggctgcggagccagcactcccgcagaatattgagcgttttggtgaagcggctgtgccgcaaaaagcggaacaggaggctgcacctgggtcccttatctcttctgctggacaggcggagggtgaaggacaaggagcggaactccaggtcaaggcggaaggccagcacatggagcagcctgaggggcagtcggagcagagtggaaagcagccgggcacagaccagaagatggatgtggaggtcacacagctccagaccggaggcgatcagaagctgttccaggggacggaggccgctcccgtaaaggtaggggacggcgcagtgctggataccacgtcagaacagttcgatgcccgactgagcaggaccattcgcagcatagcggaccaggggatgcagaagatagagctgaagctgacaccggagcacttgggtaatgtggtggtggagctgacccggagtgagggcagcgcactccatgtggtgctgcgggcggagagcgaacatacagccaacctcctgcgagagcacctggggactttgggctccatgcttcagaacggaagccagcaggaagtccggatcgaggtggcccaccctcaggagagcgggcggagctggcagcagactgaccagaacggcggcgggcagaatggacagccccaggagcagcaccgggacccgaagcgggaggagtcggaaaacttccttcatcagctgaagctggggctgctggagcaggagaccgcacctgtgtaagaaaataaggaggaaagcacagtgagcagcgattttatgccccaggcgctggacagcctgctggctagtcagcgggccagcgtctatggcagcagcaagaccggctcctcggacaactcctggatggaggattatgagatccatcaaaagggagaggacatggggctggattttaccgactatctgcagctgatggtccagcagctgcagaatcagaccatggacaacaccacagatacttcggatatgctcaatcagctggtacagatgtcggtggtgcagatgatgaccacggtcaagaccagcattgacacgctggtggacgccaacacgctgacctatgcggcctccctggtgggaaagaccgtgacggttggagagtacggcgaggatggaaagctccaggaggtagtggggaccgtcaccgggacagggacgtaccagggagtaccagtgatctttgtagacggagagatgtacgccctcagcgacatcatggcggtggggaccctgccagatattccggagactccagatgagccggagggaggcagcggtgagggcggagatacgcagacgcccgagacctgagccgcaggggcggctgatccaaaggaggtgagcgcagtgatcgaccgtacagcatctatcacgggggccagtgtgcaagccgggataggccgaccgcgagccgttcaggccagaggcggggacggctttgtacaagctctgcgccaggagctggaacggacgggcggaagacagatcgccttttccaagcacgccatggagcgggcagaggagaggggaatcgaggtgacacccaatcttctggaccggctgacggactctgtggagcgggcggaggccaagggggcgacgaatatcctggcccttgaccagagccttgcctttatcatcaacgttccaaacggccgggtcattaccaccatgtcccaggatgagatgaaagagaacatatttaccaacattgacggcgccgtgatcctgtgacaaacagaggacaggaccatttttggatgtcctgggggacgtgcgactgacgggcccccggcggcgcgaaacagagaacaccaaaagcaaaggagatctgaagcatggcattgacaggagcaatgagcgcgggaatttccgggctgaaggcacacatggaggcattgaatacagtgggcaacaatgtggccaatgtaaatacttatggctataagcccggccgcgtcacctttcgggaaagcatctattccactcaggccgctggttccgccggcacaaacatggtaggcgggaccaatccgcgccagaccggctatggatgcagcatcggcaccatcgatctggatatgacgaccagctctctggagtccaccgggatgcccaccgactgttttatccagggagatggttttttcctggtggggcctaaggatgtggatgtgaacaacgcggaggacgccaaagctctctccctctcaagggtaggtgatttccgatttgactcggatggatacctggtggacggcgcgggcaacgtggtatatggcttcgtgacctgcaatatggatggagctgatcaggcagatgaggccggtacgaacggagatgggatcagtacccagctggtccctatccgcctgcctatgaaggcggtgggagacgccgcccagggagatatcaagccgggggacgccctgttccctggtgtggatgacaccggacacaatgttccggcggaggaaggaacggacgcagagaactccaccggtgactgcatcgcctataacagcctgaagatcgacagcaacgggcaggtatcctgtgtcaacgatgataccggggacccggtggttgtgggctatattgcactgggaaaggtgacaaaccccaatggcctggagcacaccgagggcccttacttcaccgcgggcgacgcagcagggacgctgaccatcggaacggccaacagttctgtaacgggatacctgaacaatcaggacaagctgggaaatgcggacctggatcctgaaaacatgctggccgctggcagcaagaccagccttcaacctggctttctggaggcatccggaaccgatctggccactgagtttgccaatatgatcgtttaccagaggggctatcaggccaacacccggatcgtcaccgtaaccgacaccatgctggaagagctggtcaacatgaagcgctgagcgccgctggagtaaacagatgccttcccccgccggattcccggcgggggaaggccggaagcgaggaggcataatcttgatcgtattgcggaaaatgaataatgagcgctttttggtcaatcacaatcagattgagtgcatcgagctgatcccggagtgcaaaatcgttatgatgaaccatgactattatctggtcaaggacaccgtagaagagatcatccagaaaattgccgactataacgcgaaggtccaggacatccaccgggagatcagtgttctggacaggcggagctgaggcggggccgcatcctgcctcccaatagagaaaagaagggatacgcgctatgaatattgtgtatatcgtcggcattgtgatggcctttttctttactgtgtttggaattgtggtcggtttcgatatgtcgacgcatcaattcagcttcagtattggaaacctatcgaactttgtggacctgtccagtattctgatcgtcatcggcggcacgctggcggtggtggtcgcctgctatcccaagcagatcaggtccctgccaaagcactttaagatcatgctccactccaacacctttgatccgcaggtgtatgtggatcagctgaccgagctggcacagatcgccagaaaaaatgggctgttggcactggaagagaaggggaacgagcaggaaaactccttttttaagcaggcgatcatgctggtggtggacaacaatgacccggagcgggtgcgcagtatcctggaaaatgagatcgagcagacctccgagcggcaccaggcagtcatcgccatgtatgagcgggggtccaatgcggcaccggcctttggcatgatcggaactctgatcggtctgatcaatatgctgaagaacctggatggagcggatatgaactccctggggcctgacatggccgtggctctgatcaccacattttatggctctctgctggcacatgtggtattcaaccccattgccgccaatctgacggcgcgggatgaggaggagatcctgtgccgccagatcatcatggaggggatcatggccatccaatctggtgagaatcccaagttcctgcgggagcggctgctgacctttatgaatgagaagcagcgggaaggcggagaggcggcagagggagccgatgacggaggcaaaaaacgccggggaaaaaagaaatgagcttcaggcggcttcaaggaggcgggacccagaatgaagagaaagaaaaaaagcggaagcggcggagcgaactggatggacacctatggcgacatggtcacgcttctgctctgcttttttgtaatgctgttctccatgtccaaaatggatgaatccaaatggatcgccctggtccaggcactcaatcccagtgcagtggtcaacgggacgagcatggaggagccgcccgagggcagcgtcgtgacacaggatcaggtggaccgggatatggaacagctttaccaggccatggcagaatattttcagcaggaaaatatgatggaaaaggtgagcattgggaagggaaacggctatgtgttcatctcctttaatgacaccgtgtttttccgtcccaatgaatatacccttctggacgagggcaaggaagttttggaccaggtcgcccgatccattgcggaagtgggcccttccatcaatgagatcagggtgctgggccatacggcgcaggcgacagccaatgaggaaaatgactatacagtggatcgattcctggcgtccaatcgggccacagtggtcactgtatatttgcaggagaaagagatcattgacccagcaaggctggtcagtgtgggatatggccagtggcggccgatttccagcaatgccattccggaagaacgggcaaagaaccgccgggtggagctgatcgtcaccggactggatctggatgctttggcaggcgatgatatcaagcagtattacagcatgcgggagagtaccggcacgccgagcccggcgtaccagccggaagagcagaacgcagcatcctgatccatactctgcctgggagggaaaacaatggcggaagttctatcacaaagccagatcgacgccctgctgaatgctgctcgcagcggcgagatggatttggtagcgtcggcagagaaaacgacagagaaaaagtaccgaaaatatgacttttacagcccgaggaaatttacaaaggaccgcatgaaaatgatcagcggcatctttgaaaattataccagggtaattaactccaggatcaatggactgctgcataccacctgcgaaatttctgtggagtcggtggaggagcagcgctattacgagttttccaacgcactgacagagggggatgtgctggtgctggcagatgtgcagtttgcgcacaaccagcaggcggaggaacagcccgttctgctccacttttccacctcgctgatgctgagtatgatggatcgcctgatgggtggagaaggcgatgtcgatcctgcgcttccggctggatataattttacggatctggagttgaagctctatgagagtattgtgaaggatctcatctccgtgctggggggaagctgggaaaactacattgacctgtccttcggagtccggcgcatggaaaccaacccgacactggtccagctgatcggcctggatgagacagtagtcatcatcggtatcaacatccaattttccaactgttccggacagatgaacttctgcctgcccggttccatgctgtccgccatctttgcccggatcgctgcggccaatcaggcgggaagaggggccggggaggacaattcagaggagatccttgatattctcagggattccgagctggagatatctgcggagcttggccgcacagaactgaggctgcaggatatctattatctccatcccggtgatgtgatcgaccttggacacccaacagcgcagcccatttacctgtatattgggggaaagccttggttcagcggaaaaatggggacgttgagcagcaatatggcggtaaagataggggagacctatcacaatcagggaggaagggacaagtagggacatgaaacaaaatatattcagcccaatggagatcgatgccattggtgagatcatgaatatcagcttggggtcgtccgctacagcggtctccaatatgctggatcaccgtgtggatatcaccactccatctgtgtcggtggtgccgatcgaggaatttaccctgggagaactagagcctgcgatcgggatcgagatcaaatatgtctccggcctcgaggggagcaacatcatgcttctcaagcgccacgacgtcaagacgatcgtagagatcttgatgggaacggagatatcagatgaggagttcgagtttaatgatctgacgatcagcgcggtatgcgaggtcatgaaccagatgatgggcgcggcgtccaccgctctctctgacttcctaggccgctccgtcaatatctctacgccccagtccttcactctggatgacctggatcagtttgagcgggaacacttccagtatgacagcgggatggtggtagtggccaagttcatgctgagcattgagaatgtgctgaaaagtgaattcgtcaatgtcatgtctgtggacctggccagggagctgatcgccggatttggcgtagatctgagtgatggggagggcaagggagctaaatcggaagaagaggtaaagccggagccttccaccggcggagccaagctgagtcaggaggagatcgagcggctgatgagcgggggtgccccctccgcgccgccccccgcttcctccgggagcggcaagctgagccaggaggagatcgagcggctgatgagcggaggtgctccctccgcaccgccccccgcttcctctgggagcggaaagctgagtcaggaggagatcgagcagttgatgagcggaatggctccctctgcagctcaggcggccccaccccggcagccggagccgcagcagagttcggcgcggccttatgaggcagcggggcagtacatgccggctcctccggcatacgctggggaaccgcgggtgatcaacacgaagccggtccagctgccgcccctggatgtggcggataagatcggccaggagcaggctcagaatctggaattgatcatgtcagtgccgctggaagtgtcagtggagattggacggacgcgccgaaaggtggaagatatccttaccttttccaaggggtccctggtagttttagacaaactggcgggggatcaggtggatctgtttgtaaacgggctgtgcgtggcccggggcgatgtggtggtcattgacgacaactttggaatcagaatcacagaagtattgaagcgtcctgagctgagtgagctgacacgggcagactaaccaatcaaatttagaagaaaaggatgatgtgacatggcaaaaattttggtcgtagacgatgcagcttttatgagaaaggtcattcgcgacaccctgacgaagaacggctataccgatgtccacgaggcggtcgacggaaaggacgcagtggaaaaatactttgagctccatcccaacctggtcctcatggacatcaccatgccgaatatggatgggctggaggcgctgaaggcgatccgggccaaggacagcagcgccaatgtggtgatgtgctccgccatgggccaggaggctatggtgatggaggcggtacaagcggggatcaaggactttatcgtcaagcctttcaaggacgaccgcctgatgaaaacggtcaattccattctgggcgcaccctgatcagaaaagcaaaatgcgggatgaaatactggagctggtttgggctctggccgcgatctgtgctgtactgctgctgtcctactggtttaccagatatgttgtggcggggcgggcggcagcagggcggctgaaagggcggcatgtaaccgtcttagaagagatccaggtggggaaggatcaaaagctgctactggttcaggccggagagcagatctgtctgctgggtgcggcgccgggcgggatcacctgtctgaggacactgaaccgggaagagatggggcagtgggagcaggaaggagcaccggagggtgcctgccagcggataagctttcaggaggccctgaaaagtgtgcttcagcagagaaggaaataagggggtgggagcttggacgcgctgatcaatgtaaatggagagaattttcagacgctccagatcctacttctgactaccctgatcacactcctcccctctattgtggtgatgatgacctcctttacccggtatatcatctccctctcctttctgcgttctgccattgggctgcagcagaatccgcccaacatggtgctggtgggaatggcactgttcctcaccctgtttaccatgtccccggtgatcagtgacatccagacaaacgcttatgagccatacatagcagagaggatcactcaagaggagttttatgaaaaagctaaggtgcctctgaaggaattcatgctggatcagacggaggacagctctctggagctgttctgtgagctcgccggagcggatatgccggccacacgggcacaggcggaggggctgcctctgcggatcattgtcccatcctttatgaccagcgaactcaagcacgcatttctgatcggattttacctgtatattccctttgttctgatcgatgtggtggtggcgtccaccttgatgtctatgggaatgatcatgctgccgccctccatgatctccatgccatttaaattgctgctgtttatttcgctggatggctggcagctgctgttttctacactggtgcggagcttccaatgagtaaggaggagttatggacgtagtcgatatcctgcgggagggcgtgggagtagcgctgaagctgggggcaccgctgctgctgctgagtatgctggtggggatcctggtggctatttttcaggctgtgacccagatccatgagcagtccctctcctttatcctgaaaatgatcgtggtcgtccttatccttctggcggcgggcggctggatgctggagactctgaaggattttacacgctacctgtttaccctgatgtgaggaacagacagtatggttggatggtcagagctctttggatttgaaatggtgttggccaggatcagcggttttgtcctgttcagcccgatcctaggccgcagcaatatccccgggtacgcaaagacgggcctgattctggttttgtccgtgtttgtctacgggcttggacagccgatgccagcaccgccaggaacagtggtggaactggtggtccggctgggcgtggaacttgtggtgggattcgtgctgggctttctgatgcagctgtgcgcagctatcgtccaggcaggaggagagatcatagacgctcagatgggactgacaatggcgcagatctacgatgcaagcagtcaggccaacatgtctgtgacggcatccctgctgaatatcctcttttttctgaacttctttgcagagaacggccactacaccctgatgcgcattctgctgggctcggctgagatcctgccctttggcaccgctgtcctcggggaagcagcggcctcctacgtggcagaggtgtttttctcttccatgcttctggcggtaaagatggccctgccgatcttggctgccgaactgctgggagagctgggaatgggaattttgatgaaggctatcccacagatcaacgcctttgtcatcaacatggaactcaaggtcatcatcggactgatcctgctcttcctgttcctgactccccttagtgaattcctgctgggggcagaggcggatatgctttctggcctgagacgggggctggccgtgatggcaggctccggttagtgggaagggctctggaagagagaagaggtgatggggcttggcagacggacagaaaacggaaaaagccacaccaaaaaagcggcgtgatgagcggaaaaaaggaaatatatttttcagtaatgacgcagtctcagtagtcgtattgctggtcagcttccttgtcctcaggctgagcgccaactggatcgcggcacaaatatatgagttcctgcggtactgtatggatctcattgcgcagccatccatggaagtcccggcggagggaagcgggctgttcattcatcttctgggaacgtttgtcaaggctgcggtcccactgatggctgcggctgcagtagcaggggtggtggccactttttttcagacaaagctgctggtttcaggggagtccctgaggccgaagctgagccggatcagccctctgcagggagtgaaacggctgttttccctgcgcagtgttgtggaggcgctgaaaggactgctgaagatcgcagttcttctgatactgattttccggtatatcaccaacgtgctggacctgtttaccaaatatctttacaccgatcttttggcggcctgtgcccatctgtttgaggagagcttcctgctgtccatgcagatcggggcggccttcgcggtgctggctgcggcagatatcttttatcagtggtgggactatgagcggcagatccggatgtccaaacaggagatcaaggaggagttcaagcagacagagggagatccgaaaatcaagggaaagatcaaggagacccagcggaaaatggctcagtccagaatgatgcagcaggtgccaaaggcggacgtggtgatccggaaccccacccatttcgcggtggctctgcgctaccagccggatcgggacccggcgcccatcgtgctggcgaaggggcaggacgaactggcggccaggatcgtgcgtaccgcagaggagcacaaggtggccgtggtggagaacgtgccgctggcccgggcgctgtatgcctccacagacctcaaccaagtgatcccgcctgagctgtataacgcagtggcggaggtattggtttatctgtatcggatggatcagaagattccatgagaaagtaggctccaggaagagatatgagacgaatactcaacaatgcaatatccctgatcgtggtggtcatcgttctgttcctggtgatcccgctgcatcccagtgtgctggatgtgctgctgatccttaatatctcgctgtccatcatgatcctgatgatcaccatgaatatttccgagccgctggaattttccatttttccctccctgctgctcattacgactctattccggctgggattaaatgtgtcctccacccgtctgatcctcaagaacgggggaaacgccggtgtggtcattaaggcgttcggggatctgatcacccagggaaatatcgtcatcgggatactgatctttttgatcattgtactggtccagttcattgtcatcaccaagggggcggaacgggtctccgaggtagctgcccggttcaccctggacgctatgccgggaaaacagatggctattgacgcggatctgagctctggcctgatcaatgagaaagaggcccgtctgcgcaggcagaagatccagcgggaggcggacttttatggcgccatggatggcgccaccaagatcgtcaagggggacgccgtaatgtccctgatcatcacggtcatcaacttcgtagccgggctgatcattggaatcgtacagggcgggggagacctgagcacggtcctaagtgtatattccatcgctaccattggcgatggcctggtgtctcagcttccggctctgatgatctccactgccactggaatgatcgtgactcgctccgtatcggacgggagcctgaataccgatgtgatcagccagttcaaggcccagcccagagctattatggcgaccggcatgatccttctgatgctggggctttttccagggactccgaccctgccccttctgttggtgggagccgtcctttccgtaggcggatactggagcgatcacaaaatggcccttgccagacagatggaggaagcggagagcgcaagggccggtgaggcggtgccagagctccaggcggccagcgaggcggactactacaaggacatcaacaatgtctactccctgttgactgtggagcccattgagatggaattcggatacagcctgatccctctggtggacgaagccagcggcggaaagctgatcagccggatcgtcattttccggcggcagtatgctcaggacatgggatttgtgatcccgtccatccggctccatgacggcgcatccctgggaaccaaccaatacatcatcaagatccggggagaggaagtggcacggggagagatcctggtggactactatctggctctggaaccctccaatcccacaggagaaatcgacgggatcgagacagtggagcctgcctacggtattccctcacgctggattctgccagaaaacaaggagatggcggaaatctacggctatactgtgatcacaccgctgacggtgatgctgacccacctgtctgagaccatcaaaaagcatacttacgagctgttgaatcgttcggagaccatacagctggtcgagcacttgaaacagacagagccagagctggtggcggacgccattcctaatgtggtttcttatgcaaatctggagaagatcctgaaaagcctgctccgggagggcatcccgatcaaagatctcgcaactatcctggaggcagtggtggaggccagcggcgggacccgtgacattgatatgatcacggaacaggtgcgcagtgcgctgagccggacgattacccggcgcttctgtgaaaatggacagctgagggtggtgacgttggacgctgaggtggaaaagaaagtgctggctgccctgacgaaaaacgatcacggggtgtatctggccctgagcccggatatcatgcagcagatcattgcgcagctgggagagctgagaaagaagttcaacgacctgtcccagacacccatcgtcctgaccagccagattatccgggtctacctcagccgaatgatcgcccagttttatcctgatgtctatgtgctctccttccacgagataaccagcagcgtgcagattcaggcgatcggcaacattacacttcagcagcagaatcagccttcataggtaaggggcgacacggatggaaaagtgcagagaaaaagttgagactgccgcccagcagactgaattgctttcagaggaagcagtggagcagatgagcaaccaagagctgctgtttctgtacagggaaagcggagatgaggaactgaaatggaagctggtactccgcatgacaggcatggtgcgggccattgccgcccaggtgtgggggatctacagcagctttgcccagctggatgatattgtggaagaggggatcctggtgctgctcagcgcggtggacaagttcgacccctcaaaggacgtgaaattcgagacctatgtctccaagcgcctgcggggcatgatcgtagacctggccagacaccaggactggctgccgcgtcaagtgcggcagaagtctatccgtctgaaccgggccagagaggagctgtccatgcagatggggcgcacgcccagcagcgcggaaatggcggaccatctgggcgtgacaagagaggaatatggagctatgctctctgagacagcggtgtccggcctgctttcctttgaggcgctgctggatacccagggcaggggagcacggcagaggatctcgggggaaagcgggaacccgcccgaagagctgtgcgaggagcaggagctgcatgagacgctcaagcaggggatctcatccctgcgggagaaggagcagctggtcctttccctgtattatgagaaggagctgagcatgaaggaaattgcacaggtgctgaatgtgagcgcccccaggatatcacagatccacagccgggcaatcgagcatctgaggcagtacatgaagcaatacatggaagcgcagtaagtggaaaggcggagcggtaacatgacaaaaggcttttacaatttgacctccggcatgctctcccaaagccggaggctggatgtggtctccaataacatgataaatttgaccaccccaggctataaggcggaacagtacacggacagcacctttcaggaagtgctgatcagccgcataggcaacaagaacaaaagcggtgcacaggaaattggagaagagagctatatcctggcacccagtcagctttacataaactttgcccaggggactccggaggagacggggctcaatctggattttgcgatccagggagagggtttttttgccattcagacggagaacggcacagaatatacccggggagggagctttgcgctggatcaggagggctatctctcccttccggcccatggcagggtgctgggaccggacggacagcctctccaactgacaacggatgatatccgggccgatgagttcggccggatctataccgaagatggagatgcatacctgggacagatcggcgtattcgcctttgcggataatggacagctgactaagaatgagagcgggctgttcggggccggcggtcaggcagctgagccagtacagccgtccattcagtggcggtgggtcgagagctccaacgtggatatgatccgggagatgagtaccatgatgactgcagagcgggcgctacagagcgcggcccaagtactcaaactctacgacggcctgctgacgaaggcggccaatgagctggcgcggatgtaaacggagagggggagagcttatgattcaggcattttacagcgctgcggtgggcgcacagcagcagatgcagaagatgaacgtgcaggcaaacaatatcgccaatgtcaatacctgcgggttcaaggcagaaaagccagcctttcaggcgctgatgtacggcatggtcaatgggatcggaggggatcagcttccgaaggggagcgggacgcgcatggtatccaccgcgacagacttcagtcaggcacctgttgaggagactggaaggaaacaggactacgccattgcgggagacggcttttttgccctcttcgacccatccaaaaacgagatatcgttcacccgggacggctcctttgcggccgcaggctttcaggagcaggatgaggagggagaatggcacgaagtctactatctgacggacggtgcggggcgccaggtcctgaactccagcggctacccaatccagatggaaaattttgaggaagagcagcctgtgggcgtgtttatcgtgcaataccaggatggactgcagcacctggacggagggcgcttcctggcaacggaaaaaagcggaaatgtttggatgggcagttcagcagtccggcagggatttttagagacatccaacacggatctggccactgagatcggaaaggtgatcgaggcacagcgctcctacagctatgcgctgaaaatgatgatcacggcggatgaggtggagacgactgtgaacaacctggcgaatggataagacgggggaattgtcttgaaaaattttgatgagctgaatgttttggaactggacaccatccgggagatcgggagcatcggcacgggaaacgcagctaccgcactgtccagcatgctggggtgcgaggtgcgtatcgacgtgccggaggtccgaatcatgggctacaacgaggccattgactggatcggcggccctgaggtaattacggccggcgttgtagtgcgcatgggaggcgaagtgaatgggatcatgctctcggtgcagcagatagagtttgtcaatctggtgttggggcatatggtaggcagggagatcgaagattacagtcagctcacagagctggaccgttccgccttggtggaagtaggcaacatcatgatctccacgttcatcaacgctctgtccggtttagcggacctcaccatccaggtaacggtgcccgccttcgcggtggacatgcagggggcgattttgaccgttcccatggcggaatttggcggtcagtcagattacattatgacgatcggcgcaaattttatctgcaatcgcaggatcgtaccctgccgcctgctgctctcaccggatatccgctctctaaattttttgttgaagaagctgggtgttttggatgagtgataagttggtggtggggatcgcggatatgaaaatggcccagtatgaagggatgctggtgacatatgcccttgggtcgtgcatcgggatctgtctctatgaccccggcctgagactggcggcgctggtccatgtgatgctgccgctgaacatggagaccgggcggagatcaccgatgaagtatgcggacacgggaattcgggagaccctgcggcagatggaggcgagaggggcaaggcgcagccgcatggtggccaaaattgcgggaggcgcccgtatgtttgaggtggcgggcggcggaagcctgggaaatatcgggcagcggaatattgaaagcgtgcatatgacgttgaaaagggaaggcatcaagctcctgcgggaggatgtgggcggtacagtggcaaggacgctgctgttcgacgcagaatccggagaggcatgcatccgcagctatggaagaccggaactgattttctagctaaaattttaaatgagatcagaaatgggggatcagcatggcagagcgaggcaaccacgagatattactggaaacagggacaaatgagatcgaaattatggagtttaccattgacgggaatctctatgggatcaatgtggcaaaggtgcgggagatcctgatgtccgcacctgtacatcccatgccccattcccatcccgcagtggagggcatcttcaagcccagagacatagtgatcacagtggtggacttgcccaaatatctgagtggacgggaggaagaaaaggggaacaaggacctgttcatcatcaccaatttcaatcagatgcatatcgcgtttcgtgttcatacagtggttgggatcagcaggatctcctggcaggatatacagaagccggataagaccgtctctgggggaccagagggtgtggccaccggtatcgcgcagtgcggtgaggaactggtcactattttggactttgaaaagatcgtggcggagatcgcgcctgagacagggatccagctctctgaggtggaccggctggggccgagaagccggaacgagactcctatctgggtggctgaggactctatcctgctcacacagatgatccgcagcgctttggtcaaggccggatatgtaaacctaaatatgtatccaaacggcggtgaactatgggacgccctccagcagtggaagggagcgccggatctgcgagaacatgtggcgctgatcatcacggacttggagatgccgcagatggatggacaccgcctgacaaagctgatcaaatgcgatccggagttcagccgtatcccggtggtgatcttctcctccctgatcacggaggagatgcgccggaagggaaaagaggtgggcgcggatgaacagctgagcaagcctgaaattgggcatctgatcgggatcatcgatcagctgatcgcccgtggagagtgacggaagcaggagggaagtctatgaacagcaaatatatcgtccgccagccgatcaaggatgcagaaaaccggatcatcggctatgagatccagtactatggtgagaatcaggcattcagcgggggagatggtcctggcgccagcgatttcgccgcagcagacaccatctacaatttcctgacgctgaatacagacaagctgcttcgggggtccctgaattttatgacctttaccactactctgctgatgaaaaagacccccaggctgtttgacaagtcggaactggtcattcaaatcgatgacagtgtgattattcatcctctggctatgcggatggtacagcagtacgcgaaggaagggtaccagatcgcggtcaatgagtttcaatttgcgccgcggtatctggggattctggatggcatcgactacatcaagctgaattttcagagcacaccagagctcacactgaaaaatatcattgaaattgcccgcagcatgaagaaaaagtgcattgcggtgggaatagaccgggaggagctctaccagaaggcgctgaaactgaaggtggatgcgctggagggcacttatgtggcggagaagctccggacaaagacacacagcagcggctacctgcaaagcaatttcttccgcctgatggtggcggtgaccagggatgagcctgatgtggaggagatcgagcagatcatttcggtggatgctactttgacctatggcctgctgaagatggcaaattcctgctattttgccctgagacacaaggtggctactgtgcgtcaggccatcatgaccatgggactgagcgaactgaagcagtgggtctatctgctgagcgcaagcaatgcagaaaaccagatggaagagggagcagaggaattcctgcgcttgtcctttatgagagcaagcttctgcagcaacctgatgaactatgcgaaagacatgcccatctccaagccggaggcatatctgatggggatgttttctactctgaactatctgatcgacgcaccgctggaagagatcctggagcagatccccctgtgcgcagaggcgaaggaggggcttttgcatcacacagggcggtgcggtatgctctatgatctggcactgtcctacgagcgagccaactgggcaagaattgacgaactcgcggaggggctgggtatcccgaccaacctgctgaccagcctttatttcagctgtatggaggaagtaaaccgggtgtggaacgaaatcacacgtccggagcccagccagctggaggcgggcctggcggaggagcgcgggacctgacaggactgggacggctgacagagaacaggggggtcagccgtcccggttttttgctgcagtggaaagtcgagtgtgagggtgaagagacatgataccagtttgggagcactttgaggacctggaagagatcctctatgtggcggatgtagagacctatgagctggtgtacctgaaccggtacggccgctccgtatttagaatcgaggatgaggacaactacgcaggaaaaaagtgttatgaggttttgcagggaaggagagagccatgtccattctgtacaaattcacagctgaaggaaggtaaattcattgaatggacctatcgaaatcctctgctcaaagccccctatcggatcaaggacaccatcgttgagtacgagggcagacagtaccgcatggaatttgccatggatgtggagaaggaaaagcaggaagcgcagaagctggatcttgccgcggtgcgtcattatgaagagctgatcaatgagtgctttctgaaggtgcgtgccgtcacagacatggatgaggcattaagcttcatgctccattatctcgggacccatatttcctgcaatgcagtgatgatctacgagagcagggagcgaaaatggctgctcaacacctatagctggagcaggacggagaaggcgccggagaaaaaactgctggagctgagtgtcgcggaacccgtgacaaagtggtatgaaacattttttcataacgagccgctgttgctgacagatatggaaaagctgtgccgggatatgccggcgctgtctaaggtgctgtctccagagcaggtccggcgtatgatcctgatcccgcttctggccaaagcggaggtagtcggctttgtgcgcatagacgacccaccagagaaacagatgagcgcagtggcggagatgtgcaagatcctgtctcattttattgtctctctcatacagcagagggacctgatccggaatctggagcagatcagctttcgtgatcagatgactggcgcgatgaatcggtacgcgctcaattcctacttagccagagcacatctggagcgggacatggggctgatctactgtgatctgatcggcctgaagcgggtcaatgaccggtttgggcatgccagcggggaccgaacgatcatacaagcctatcaggtcttaggagggatgtttcctgaggaccagatcttccgcatgggcggggacgagtttctggtggtgcgggaaggggtaggcagggagaagtttcaggagagtgtggagcagctgaaagcggcggcggtatccagccgctgctggctgtccatcggaagcgcttggtgtcaggccggcggaaaaagcttcaatgacctgatgaatgaggcggacgaaaatatgtacgagaataaacggacatattaccgcctgtgcggcctgacagatggactggaagagcaccgggtggagcatgatgacagggagcttgtgcagagtcaggatgcgctccatgcctttgtgagggactgctattttgatgtgacctcctttttgaaatcgctgaccatgacgggctcttccttctatatctatttcggagatatgaggaaaaatctatattatatttccgacaatttaaaggaggacttctgcttcccggggaatattgttcccaattttgtgtcgctgctggagcagcgcatctatgggccggaccagcagatgcatgtcgaggatacgagggccatgctcagggaaaagcgggagagtcacagcgtccgctatcgaatctatgacaaaaatggagagctgacctggctgcactgccgggggatcatgaagtggaatgaggataagacagagccgctgtttttctccgggagcatggtcagcctgaaaaatgagtcggaggtggatccgatcaccggactgctcaacctttcccttgccctgaagcggatctcggagttcaacaggcttgggatcgagacaatgctgatgtgcatcgtgctccgaaaattttccgatgttaaccacgtctttggccgggacattggagacgcggtgatgaaagagatcggctggcagctggagcggaatctgggcgtgcagttctatttttatcggatagacggagcgcgttttttggcagtctctcaaacggtgctggagccggaaggggcggtggcatcgatccaaaagatcataaaagacatattcagaaaatataagatccatgttgtttccccctgtgccattggggtgctccacagcgcagcgggacagagagaggcccaggagctggtcgacaatgtgatcacggcagcccatacagcaaaagcgttcccagatttggattatcttgaattttcgtcccatatgacaaagacctatcaggagcataccgacatgagcatggctctgaatgcatgcattgaacatgggttccaaggcttccgcattgtgatccagccccaggtagagacaaaaaacggacggatgttcggcggtgaggtgctgctgcgctggaagaacgaggggaaagagatatcaccttccaaatttgtcccgatactggagcagacgggaatgattgctccggtagggaaatggattctggaggagaccatgcggaaagggaaggagatcctgaagtatcagccggatttccggctctcggtcaatgtcagctatctccagatcatggatcaaaagtttttcccttttttagaagataccatggagcgcttccagataccggcggaaaatctgctgatcgagctgacagagacccattttgacgagatgccggagcatcttcagcgctttatccggcagtgcaagcagatcgggatacggtttgctctggacgattttggaagtgcctactccgggctgcagcttcttctgcagtatccggctgacctgatcaagctggaccggactctgatgcgggagatcactacctccaaggaaaagatgaggtttatcatgagcgtggtctacgcctgccatcagttcggaaaggaagtctgtgtagagggcgtagagacaaaagaggagctggatatcgtccgccagacagagtgcgactttatccagggattttatttctacaagcctctggagtgggaagaaatgcgtcaggttttggagtcgcagaaaaaagaagatattctgagttggaaataggaaaatggaaggtgagaggctatgagccccaaatatgaagaggacctctccagtgctttgggcgcgatatgcgaggtgctgacccgggaaaatcatcttctctttgtggggaggatacaggaatacgacagggcaggcggccggctctgtgcagagctgcgtaaaggggagggaactcccgggggtgttttataccatgaaccggtaaaggtacacatctatatgggacaggagcagggcaaggtgatgatcgcctatggacaggtggagcggaacgcagcggaccactggtggatcgaactggagaacgttgtatctgggccggagaggcgagagaacttccgacagatggtgagaggccgcggcattttgactgaccgggaggggagaaagcagccctgcaatttggtcgatataagcatcagcggggtgaaattttacagtcagggccggtatatagagggggaagtgctggagctgtctggatttcggttgaggcaggagggggagctctataccctgctttgcctggtgcggagggtggagcggatagatgccggaaagggctggtattcttatgggtgcagcttttatgacctgcgtccggggcaggaggaccagctgtgcagggatatctttaacctgcaggcaaggtctatcaaccggaagagctgagagcgcctgaggccccccgccaatatggcggggggcctcagtttgtcaaaaaagcgctcctgcggaggtccggcgcccacaggcggcggataacgtttgatgctgccctaaaagtgactccgccacttttaggcagtcgcaggccccaccaatatggcggggcctgctgtgtcaatgacgcgggttgtcccggatcagcttgactgcattgctgagggcggcgagcacatctgtgcggttctgagagtcacaattcttcagcttgaccatcatacgcccggtatccgtcaccacatactgcggaggcagatggttcagcgcataggcgatcacatcagatttacagatgtcgcagcagcagcagccgtccgcctccaagatcctatctacatgctgcagcacgatatcctccatcagattatggtaattcaagcccatttccacattccccttcttttgagaagcgatcatattcttcatgatccatatcctctgtagactagagggaggatcgatctgtaggccggaaaaagcgaggatcgctggggaaataaaaattttctgtcagcgagagccggcgggcaggatatgccggggggagtccatcacagatttgcaggcccagatgatctgcctggtgatctcgctgtcataccgggcccggtacacactgagcttggtggggagcagatctggcggaaacacggcatattgggccgggagccgggtgagagccagtgcctcggcgtccgccagacagcggggacagctgcaaagaccaaacagctttacataacgttccagcttttccgccaccaagagctgcatcacattgaagagctctgcgccgtctgacagctctgtggatgcctgctccggcacggaaggagagggagcgggagcagaaggagtggggggcggagtgtccaaaacctggggagaagcctctccctccgctgcggaagcgggagatgcaggagggaccggagagggggcggcagtctgctccgaggaggccagctcctcctgaagtgcggattccagcgcagtgtggatgctctctgacagcgcagcattgttgctgcgggccacctccaaaatgggcggggagagacggcgcgcagcagaggacggagcctccggcacggacatgtctgaagcagggggggcaggctccaaaggggcggggggaggtgcttccctggggggcggcaccgcgtccggctttacctccggcgtgccgccggaaagaagattcagcacatgggccgttttgctgcttcggctgtttttgcccgccatcacacatccctcccgggcccatcctgatgggtcctgcggggaaaggcggcgccggccagctcatcacacagacactcataatcctgggagggcttggagtggggagagtaatctacgatgctgatcccgtgagccggggccgccgccaccgagacgctgttacggatcttagtctggaatactctggtatccagctgttccgccatctgctgggagagctccagcatttcccgattgagattcagccggggattaaaacgagtgagcagaatgcccatgacccgcaggcgggaattataatactcccgcacactgtcaatggtctctttgatctgggagacgcccagcaggctgagtacctccggcgccatgggaatgatcaggccgtcagtggcgacataggcgttgacggtcagaatattaagggcgggaggagtgtcgatgatgatgaaatcatatcggtcctggagctttgacagggcggttttcagcagaaattcccgccccggcttctgaaattccagttcggctgcggagagaagaatattggctggaagaagatcgcaggtatctgtaggggagacggcctgttcaggggaagcggtcccgcggaatacatcgtagatcgtgacgcagtgctcaatatcaagaccgaggctgaagctcagactcccctgcgggtccagatccacgcccaggaccttggccccgcggttatgcagggaggacagaagggcgcaggcagttgttgtctttccgacgccgcctttctgattggtgatcgagataatagttggtgacatacccctttacttctcctttcgtcagttccggaaaagcctgtgcgcagtctggcataagggcgccgcaagaaaatgcggtatcagctcttaatttttgacgattccggacgatataaaaagcgaggtagtaaggagtaaaaacgatgtgcaaattgattttactcaaaataaactggattgtcaatctattacagtgctgtcctggggggacagccgtgtcaaaggagtgaaggaaacatggcatcgatcggaagcttgactggcagcacctccagcggaagcatttatggaaacagaaattccaacatcatctccggactggccagcggactggacacggaatccatgatcgagggaatggtccagggctaccagcagaaaatttcgggactggagcagaaccgcacggtgctccagtggcagcagcaggcgtaccagagcatttccaacaaactggtggaattcgcacggaaatatgcctcttatacctccagcacaaacctgctcagttccagctttttcaacaatgcggtggtgaccaccccaaatgggacgttttccaatctggtgactgcctctggaaagaccagcagcaatgtggtgctcaatgcggtggcccagcttgccaccgccgcccgctatacggtcaacaactctctgggcgcgagtgcgaaggacggtcagatcaccgtagcgggtgaggagatcgatctggggaaggagatacaggtcagcaccatgagcggatcgctcacgctgacttatggaaatcagaacatcactctggacttcggggagctggaggatttttccggaaaagacggaaagctggacttggataagtttaaggaagcggtagagaaaaagctggccgaccagaaaatcaccacttccagtggaaatgtggtctctgcctctgaggtgatcggagtagaagtgggacctcatgggatcgggttcagcgacaaatccggtgccgggaacagcatctatatcagcggagcttccggggacttcaaggacatggtgatggagctggaggataccatcagcggcaaatcaagcagcatccggctggatactgacaaagccgtgaccgaacgcgtatccacaacagagtatctccgggacaagccccttaccatcacccttaacgggcagaccaagcagatcaaagtgggcgaggtgacaccgcagaatggtgaaacctatatcaaggcatttgcacgcactctgaatgagtccattgcggacgcctttggcgccggaaagatcaccgtgggaacgacagatgcgaacaacgccctcacgttccaggtggccaatggaaacaccctgtccgtcaattcctcggtcaacgagctgctgggcctgggggagaatggcctgacctcatatctggataccagccggacgctgggtgatctgctgggagaggatatgaagggtctgactgccctgagaggcgagggactggacggtggaaacaagcccatcgaaaaggatgggaaatattatgacacagcgggaaatctggtggatcaggatggcaaccggatcgacagcgagggaaacaagctctattccatgaaaatcaacggggtggagattgggacctataccaaggacaccgcgctggaaactgtgatcaacggcatcaacagcaatacagaggcgggggtcaacgtcagctattccaaactcaccaaccagttcgtctttacagccaaagagacgggcgagggcggtaagatcgaatatgggactgtggatggacagggaaacgcaacggatctggcggccgccctgttcggcggtgcagtaaatgagaatgctcccgggtatgtgaaaggacaggacgccatattccaggccaccatcaacggtgagaccatgacattcacacgcagttccaacacctttgaggcggatggaatgaatatcaccttcagcggaacgtttaatgccgcagatggtgtgggaaaggaccccattaccagcgaggagctgaagaataaaaagccggaggacctcttcaaaacagacggtgagggcgttacctttaccagcaagacgaatgcggacaccattgtggatgcgatcaaatccatggtggaagattacaacgccattgtctccgaggtgaagaaggcgtactctgacatgccgctggaacagtccgacggctccaagtacaagcccctgaccgacaaggacaaagaggggatgacggagagtgagatcaaggcctatgaggaaaaggccaagaccgggatcctctttatggaccgggacctgtcctctctgtataacgcactgcgcagcgctgttgcgccaggcggtgcagatggctcctttctgcgctccatcgggatcaagaccagctatgaggacggactgactaccatcagcctggatgagactgcgctgcgggaggctctggagaccaacccggaccaggtgcgggatgccttcaccaagagcaaggacaacggagcggccacagatggtctcatgacgatgattcagaaggtgacggaccgctatgctgccacgactggagatgtaaagggcatcctgatcgaaaaggcgggatcgcagtactctcccacagcggcactggacaatacacttttgaatcagatgaaagagatcgatgaacagatcgaaaaatggcaggataagatgtccaacaaagtggactattataccaacaagttcactcagttggaggtcctgatccagcagatgaactcccagagctccacactttccggtttaatgggaggctattgagccggataggagagaaaggattccaacacctatggatatgagaggataccaacgctaccgggaggactcgttaagcaccatgacccagggagagctcctgctcctgctctttgacgagctggtgaagcggctgacccaggcagagctcgaactggagcgggagcattatcctgcttttgaagcggcagtagacagaagtgtaaagatcatccggtacttggatgacacgctggaccgccagtatccgatcagccagaacctggaccgcctgtatgaatatttctgttatgagctcagccgggtcaaaaatggaaggaaccagaaggagctttcccgggtcaaaggaatggcggcggagctgagggacagcttccgacaggcggataaaagtcagacggaccgctgaaggagagacagaagatgctgagcaaacaggagcttgacgcagccttggcggcagaacgggcaatgtatcgggccctgtccgaggtgcaggatatcacccgggagctgctggatgcggtagaccgccaggatcaggtatcggtgcggctgtttttgagcatgcgtcaggagcagatcaaccagcttagagatcagaaggaactgctgaaaaagcaatgtggcggactgcccaaggaagagggcgatctgctgcgacagatcctgtccggaaaaaagccggcgggagtggagggagaggccctgtccctccaggtggaacggaaccgcgcgctgttagagcggacgcttcaggcggacaaggctctgagcaggcggctggcggggagagagtctttttaccaaagctgagtcaggccgctgtttggtggaaaaaagccctctgccggcatcttgccggcagagggagcttgatgtcattttagggtggagaagcgccagagcggcgcaccggaagagcggctttgggatagctccgcaaggatcacttccgggtcccacgcggccaggctgcgctcccggctgtttggatcagccaccaggatttttccatccagcgtgaccccgcgcaggagaataaagtgcccggagctggtaaagtgaccgctccccatcagagctacaaagatgtgcccggaggagagatcctgacgcagttcgccaggggagaggtccgggacggactcagcactgagcccatatgcctgggagaccccctctacgatggagagataagagccgcttccgggcgcacagtagccgtgctcataggcccacgctgccatttcctccgggttgatgtcctgatcggtcagagaggagaccagcatagacagggcggtgggaccgcacccatagccggagatcggatctggtccaaaaggccggctcgcccaaggctcctcaccctgattgtaataagtcagcgccactgtgccgccggtcaggatctccctatcggcccggacggcgaactctgtaacgttggcgtcctccatcggcggtgcctccgaaatggcaggatcaccggcaagctggctgacaggggcctcttccggtgtgagccggtccaaaagtccggcaccggcggtgcggacggtttgaaagagctgggaggcaggggctgtgatcctctgaaagagggctgggtcggcataggcgcagaccgccagctcggtcagaccgatgcacaacagggccagcaggccccagaggaccagcctgcgcctgaaatgagactttgatcgacgggacaaaaaaaccactcctctttatttgattatagcaaatccgggccctgatgtatagagaaaaaggggcgaaaaggagcgtagtatgccacagatccgcttggaacaggtgagtaaatattatcagcaggaaaagaaagcggttcccgcggtgagagagatcgaccttaccattgaacagcaggaatttgtctttgttaccggcagcagcggcgcagggaaaagcactctgctgaacctgatcgcgggggagatcactcccactgccggagcggtttatctggacaatgtgcccatagggcagcagcgcagattcgggcatcccagaaaggcgggctgcatcggctatgtgccgcagatctcccagctgatgagaaagcggaccattgaagagaatctggccatggcatccatgatagggcgggggcggagaaaggtgccgatggaggagcgcattcggaaggcgctgtgtatggtcggactgaaggatgtggagaaacggtatccggtggaactatcactgggagagtgccgccgggtggagctggcccgggccatcatcaacagcccatccgtgctggtgctggacgaacttaccgcaagtctggacgaggacactatatgggatctgtttcacttgatcggagagcttaaccgcctgggtacaacggtaatcatggccacgcacgccaaaaactttgtaaatctcatgcgaaagcgtgtgatcactctggtggacgggaggatctttggagatgtgagaaatggaaggtatggagatgtgatgtagaaagagcagagtatcgcagaactgatcgagataaatataaaatagataatagataaaggaagtagttgccatgctgaaaaatatgaaggtcaaaaaaagtctgatcctgggatatgggatcactattgtgatttctgtagcgctcattattgcctccctcatgatgatgaacaatcaaaggggccagtatgagacgcttatgaatgaagatgtggagaccaatatggccatcctgaatgcgcgggtcaatgccattacggcgggccggaactaccgtgatgcgcttctggtccccgaaagcagtgccaacgaaagcctgatcgcgcaggcggaagcggctctggaggcgatgcagacctataccaaaagcctgtatgagacatggcccagtcagatcgaggaccagtcgctgctggaaaagtatgacagcattaacagcgagtggagagcggttgcggaaaagatcatgggcctttaccagcagtatcgcagcaccgggaatgagctctatctggagcaggcaaaagagatcatttacaatgaggataccccgcttcagacagagatgggggatgcggccactgaactggatacttttttggaaaagagcatggccgaggagcggaccagaatcgagaacagcgtgaagggaactttctttgcgattattgccgctatggtggctgctaccatcggtgttctggtcctggcgtttgcgctgatccggaatgtgaccggccccacagaggaggtccgcaacgccctggtgggctttagcgagggcaacatggatatcccggtcacatttaaaagcaagaacgaattgggcgatatgtgtgaggccctgcgtaccagccagcatgttttaaaagaagtcattgcggatgagtgctatctgttggaagagatggccaacgggaattttgacgtacattccaaaaacgtggacatgtatgttggcgtactccagtccgttctcaagtctgtcagggtcatcaatggaaacctgagcgataccctgtctcagatcggtgtcagtgcggagcaggtgtctgccggttccgaacaggtgtccaatggggcccaggcgctggcgcagggcgctaccgagcaggccagcgcagtccaggagctctccgctaccatttctgatctggaccagaaagcacaggagaatgcggagactgccagagttgccaaggaaaaggcggaccaggccggcggaaagacccaggcctgcaatcagaagatgcaggagatgcgccaggccatgagcgacgtgctgaagagccagacagacattggaaagatcattgagaccattgaaaacattgccttccagaccaatattctggcgctgaatgcggcggtggaagccgcacgggccggctctgccggaaagggctttgccgtagtggcggatgaggtgcggaatctggcttccaagtcggaccaggcggccaagcagacaaagaagcagatcgaaaatgccattgctcatgtggagcggagcaacgctctggtggaagatgtggtaaagagcatggaggagactgtggaatattccggtactgccattgactatctggatcagctggcggagaattccattgcccagtccgagtcgatcgctcagctgaccacgggcgtggatcagatctctgctgtggtccagaccaactccgccaccagcgaggagtctgcggccgcgagtgaggagctctcctcccaggcggtcgtcatgaagcagatgattcagcgcttccggctgaaggaagggagtgccagaactgaggagcccgctgtcggccagtgtgagcccgccattccggtcggtgggctggagctgtcccagggagagaaccggttcagcaaatactgagtgccgggagctgtgcgaaaagaaaaaaggggcacagccaggacctgaaaaagaatatccggcagatagataaacaggcggggtggggaggttgtcttaaaagaaattttaagatggccttcccgctttcgtaagggggtaattccatggaagagaccagcagacactcggaccaggaacaggatctgatctatgcactggacattgggaccagaagcgtgatcgggctgttggcccggcaggagcaggataaaatgcgggtcctcgaagtggagaggcggccgcatgagagacgtaccatgctggatggacagatcgaagatatccggcaggtggcaaaggtagtctccgaggtgacgaagagcctggaggagcgaagcgggagaaagctggagcgggcttgtgtggctgcggccggccgagccctgagaacggagcggggagagtactgtctggagctctccgctccggagatcgtgaagggagagcggatcagccaactggagctggaggcggtggcagcggcggaacgcacccttcaggataaggagcaggagcagaggatgtttctggtggggtacactgttacacagcttcggcttgaccattaccccatgaccagcttggaaggacacacagggcaggtgctggaggcggccgtggtggctacctttctgcccagcgaagtggtggacagcctgtacgcagtgatggtggaggcgggactcgaggtggcgagcctgaccctggagccgattgcggccctgaacgcagccatcccggaggacatccgcctgctgaatctggcgctggtggatattggagccgggaccacggatatcgctctgtgccgggatggaggcgttgtgggctacacaatggctacggtggccggggatgagatcacagaggcgctgatgcgggcgtgccttgtggactaccacactgcggagcggatcaagatgcagctggggaagggggcacccatttcctttgaagacgtggtaggtgtggagcagagctgttcggacgaggaaattttttctatgatagagccggaggtccagcggctggccgatgagatcgcccgccgggtcctggaattgaatgagagaccgccttccgcgctgtttctggctggcgggggcagcaaactggcaggactgagcggacgggtagcagatgcgctgcagatggaccgaaaacgggtagctgtggccggacggtacttccagaacagcgcctgctccgatatccaggacctggacgatccggaatataccacacctttgggcatcgcggtctcagcaggattgggactgatcagcgacagctatcgggtcgtgctcaacgggaagccggcaaagttgttccggagcgggagggtgacagtgctggagcttctgatgatgaatggctttacccacagcgacctgctgggccggagcggaaagagcctgatgctctacctggatgggaaacggactgtattttatggagaacctgccctcccggcgaggcttgcgatcaatggagtggaggcaaagccctcccagatagtccatgcgggagatgtgatccagttcgagccggccaaggcgggaaaggatcaggaactgaacgcgggtcagctgagccgacagctgggagtgggaggactggcgtgccagggaaaactgctgacaccggacactcctctcagcacgggcgacagcctggaaaccgtgcaggtatctgaaaaggggccggagaaggagaaggcagctggggcgccaatacagatcgaacttaatggcagaccgctcccccttccagggaaggcggatggtacgccctactatttgatggacctgctggagcggtccggaatcgacttcaaacatgcagagcggccggtgcggcttacagtgaacggtgcggactgcacctttcagcagcggctgaatgatggggatagagtggagatccaatatgagtgatcggatggaacaaggaagctggagaaatctggcgggaggcgtactgacgctgtgcctgaccctgacgggatgcggcggaggagccgagccgcccgacaattatgggatcggatcagatgcactgcccgcgttgaccaagctggtggccctgggcagcgaaatgacctgttcggtgcaggagaatacacaggccggcggggaccaggacacagatgaggcccagggacagccgacctatgaatactctgggctcgagtccggaaaccaggtcgcggcagaatatgtgcagatgttggaggacaattatgactgctccattctgggcagcagagacgccccaaaggaggagcctgactttcaggcggagaggggggaggtgacggtaggaacaaagtgtgcagaaggggacggaatctttgccctggagatcagatggcagacacagtcctgttctatcacgcctgttctgctggaaggggcggaagaggaggcagagtcccttacagttgaggaggcggtgcactttctggaagagatgcctccggagaggctgggactgagcggcagtgatatgagttcctatctgttgttcccggaggaggggatcgtgatggtggacgggatgccctgctactgtatcaatgcttacggaagagaggatcaccagatcctggatacctacctggtatcagaggatgggagcggattgtaccggcttgaccgcggggaggatgcagtctcagcgctgacataagggggcggaaggactgcctgaaagcgggatagaagttcaggagaaaagtgatgcgttgggctgatgccctttttccgcagtgggtccgcagaacatcagtaaaatttgatcgcgaagaatttcgatgcatggacagcgtgatagaaaagatgctggtcagttttggcactgacgcaggggacggcgggcactgttcaaggcggtcgatgttcagactgcctgggaaattatttttcggcagaagaaagtgcaggctgtcggacaggcatttataaaagaggaaaaactgggtgggacgatatggatcatcagatacaatatccggggaatatggcggaaggcactttgatgccgcaaaatgatgcagtcaaactgacaccagagctcattgacagcttcgaggcatacatgaaaaataagggaatggatcagggctccattaaaagctacagacaggctgtggagatgctgtatcagtggctgccggaagagaaagtgatggaccgggatacactgaggcaatggagcgagaaccttcaaaaggaatcgtatgcggtccgcacgataaaccgattcctctctgtgggaaataccctggcggatttcctggggcacagggaatttcagatcaagaccctgatggtggatgcggacgaggtgctgccggagctgacgcgcaacgaatatttgcgtatgctgcagacggcaaaggcgttgaagaacgagcgggtctattttttgataaaggtatttgctaatgttgatcttccggtgcagcaggcatccaagctgacagtggaggccgcagaagagggaaaactggtgataaacagaggcggcgggagagagatcatccgtctcccaaagtgcctgtgtcaggagctcttgtcctatgcaaagcggagtgggatcacaacaggccccctgttcctgaccagacagaaaaaaccgatgcggaggacacagatttccgacagcatccgaagaatgtgtctggaggctaaaataccagaaggaaaaggaaatcccaggtgtctgcggaagctgtataaagagaccatgcggtctatttatgccaatatggatttcctatttgcgaaagcctacgagcagattctagatcaagaacaattgatatacggatgggaagagagtgtttgaatcggggagcaagtgtacggacaggacaaaaggcaccttgggcaggatgatacgaaggtttaaacggagtggcgcggtgtgagcgagccactcctgttttccatattaggaacaggctttccctgcataagcatcaaatgagggaccgcccagcctttccaggggctggacggcccctcatttgacgcttaggatctgcaatcttcattttgacagatatttgataccctctgcaccctgaggggatagtgctgttggatataaaaagtaatatggacaggctgcccctgaatagctataagacacaagcgaacagaaaggttgtgccgagattgagtgaatatgaattggatgcgctccaacaaattgaccttgctgctttggaggctgtggatgtccaaacagtatcccctgatgatctggtcgatttgaaggatatccaaatcgacccttcccttccgaaggaggagcggatcgcatcttttatccgacaggttaaaaatccctattgctacaaatgcggaaagatcgtggtgaaggtggggtttgaggaaggaacgaccctggaggaacagctgaagacgatcttctctactatgatctagccagctccgccttgaggtacagctttttggatctgtctgttgccgaaacctgaaatttaagctggacgccgcgaggcggtgttataatgtgtctggagcggatcagaaaatacagcacgcataaaggtttctgcgaattggatggtccattgggaggaaacctttatgagtgctttttttgcatcatcaactgcatcacatggacagatctgggatgtagatatctatgtgcgcgcatcccgcgaggacggcgacaaggaacagagcgaaaccattagcaaccagatcactatgctgaccgattttgtccatgggaggccggagctccggctgcacgagatccgcaaagatgacggtatttccggtgtgacctttgaccgtccgggctttcatgcagtcatggacgatgtgcgatccggcgcagcaaattgtgtggtagtcaaggacctctcccggttcggacgggactatatcgaaaccggtaaatacctggaagaaatttttccctttatgggggtccgcttcattgctgtcaatgacaattacgacagcatggcggaacgctccgccgcagacgatgtggtgctgccctttaaaaacctggtgaacgacacctatgccaaggatatctccatcaaggtccgcagcagcaaggctgtaaagcgcagaaatggcgattttgtcggtccctttgctgcctatggctactgtaaggacccggagaataaaaaccagctcatcattgacgaaggagccgccgaaactgttcgacagattttcagctggaagctggatggtatgagcgcccaggctatcgcggaccagctcaacagcaagggcgtactgtctcccatggagtataagaaatccattgggttgaacttcaaaaccagcttcaagctcaacaaaatggcgaaatggaccgctgtggcggtgctccgcatcctgaaaaacgaactctatattgggacaatggttcaaggcagagaaacgacgcccaattacaaggtcaagacccgtatttaccagcctccggaaaagtggagccgtattgcaaacgcccatgagccgatcatatctccaatgatctttgcccgcgtccaatactgcctttccctggatacccgttccgccccccacagtaagcaggtctatctattttccgggctcctggtctgcgcggactgtggtcagccgatgatccggcatccggttcagagaaagggaaaagagtacatctactatgtctgttcctcggccaaatgtggaaaaaagtgtgagaaccacaatatccgggaggagtatctgaaggaaagtgtgctggtctccattcaggcgcgcatccgcagtgtgatcgacctggaaagcttggttcgctatgtggatgcacttcccttacagcagcgggagatcatcaggctccaggcccagctcgcccaaaagcaggaggaagcagagcggtacaagaggctttttcgctccctttatgaacggctttcagaaggcattttgacccagaatgaatttttagagttcaaagcagtctatgcccatcgttgcgacgaggcagagcgggcggctggcgcgcttcaaagggaaatcaaggcggcaacagcgggaaccagtggaacctttcggtggatcgaagacttcagggaacatcgaaacctgacgaaactcaccagaaaagtggttgtcatgctgataaagcagatcaaggtctacaaagatcagcgcatccacatccaattctaccaagaaaacgaatgccgctgcctggctgagcggatcatgtcagccgccgacggccagcctgcggctgattacaggaagggggataaggatggcgaggaccagccgtaaacagatacatcagcagacagaccttgctcaggcccctaaaacctatctgggcggcgcttatcgccgcctttctgtggaagatgaccgccaccgggaccgccactctctggaaaaccaggaaaacattattctggactttttaaaaacccatcctgatatccgtcttgtggaggtctacaccgataacggagagaccggaaccaagtttgaccggccggattttcaaaggatgatggaggatgtgcgttccgggaagatcaactgcatcatcgtcaaggacctctcccgctttgccagggacttccgggaggctgggcactatctggaacagatctttccctttttgggagtccgctttatctctatcaacgatcactatgattccagtgatccgaagcctgataaggaaggaatcgccattcccgcaacgaacttgatcaatgagctgtatgcccgtgatatttcccaaaaggtcaaaagcggcctgaaaacgctgcgaagtgcggggaaatttgtgggtgccctggcgccttatgggtataacaaatccccccaggataagcaccagcttgtggtggaccctcctgcagcagaggtcattcggaatattttccaatggctcctggatggctggagcgactgccagatcgtgtatcatctgaaccagcaggggatcccctcgccaggacaataccgctatgagcagggccttctaaagcatgagcgatatgagaactgtggtccttggaaccggaccgcgatcaaaagactggtccggaaccgtgtctatgctggagatatggtacaagggaaacggagcagctcctatttcagccgccctgggccaaggccggaaagcgattgggatatcgtagaggacacccatgaagcgatcgtgagcagggagacctttgatgcggtccaaaatcttctgaaggaccggacggacttgtttaaaaagcgggccgagaaaaataagggactgactttccatcaaaatcttctgcgtggcgtggtgtactgcggtggctgcggccgtcctatggagcgcctttattatcgctccggcagacacaagaaaggagaacgccgtgtctattactatacctgccagacctttaccaagcgatccaaaagtctgtgtgccagaaatatggtttcggagaaagagctgcgggaggcggccctttctacgatccaggctcagatccgcattgccgccgacttgaaaaggatagtaacggaggtgtgggattcgggggaaaccaaagaccaaatcgcggatatggatgccgagatccggacccttcgacaaaagctcgcccgcagcagcaccctaaaacgcggcatctatgagaactacatagaaggcgtcttaagcaagagccagtatctctctgccaaggaagaatacacaaagacggaggcggcattccagcagcagatcgacgccctcctgagtcagaaacgctgcatggccgaacacctgatgctcaataacagatggctgaaagacttcctgaacgatgagaggggtatggagctttctcaaaaaatgctggccggtcttgtgcagcggatcgatatatttgagaaaaaacgggtgcggatcacgctgaaatttcaggatggataccatctgcttactgatcatttgacggagagagctcatagcagagagaaggtggcgggatgaatgaactgtttgctcccccggaaagcggccttttgatctcctatcttcgagtgtctttggaggatgaaaacacaggggaatcggagagcatttccaatcagcgggatttgatcggctgctatctgaagcagcatccggaatttacagcctacaaggtcatggaagtggtggatgatggacacagtgggaccaactttgaccgtccaggcatcaaacgcgtgttggagctggtacggcagcggaaagtcgcggccattcttgtcaaagattattgtgcgataataggactaaatcagaaagaccttgaaaatcaaggcattctggcttagtcccttctttttttgaccgaaaacaaagggctttcacaataatcaagcaagccggagggtgctgctgcacacttccggcagaaggaggatatagtgggtactatcaaagtcttcttgaaggaggttctgcttccaatcgcgcttgcgttctgcctcgcgtcatttctcaagccgatttatatgcctgacggcgtatgtgactacttccttatgtggatctgcgtcggcttgccattcggcatccggaggatgtgcctctggctcgttcccagcggctacggtatctccggctcagtcggcatcttcgcattgaacttaatcataggcggtcttatcggaggacttgccttcttcatcgggctgctgctcggtgtcattcataccatccgagaaatcatctgaactacatcgtaaacgaagagggtttgtttcttctcctatttggagtaagaagcaaaccctctttttttgttgcccaaaagccggaatatttgctggcgatgcggcgaaggaaaggagttttttaagcatgaaacgcatgacagccggtgatctgcaagcactggaattgctgatgcagaccacacccggctttgagcattttgacagcggcgcggatggcattctccctgagtgccgaagctgccgctttcaccgtcccttctggaaatatcagtcctgcgtgtttgcagagtgtccctactgctgcaatcccgtttctaccctcaaaaatcaaggtggcacatctgctgccggaaaggaaacctgtcatggataacaaaatcgaagtcttcaaaaatgaacagtttggtgaggtgcgaacgatcctcgaaggggaaacactcctgttctgcggttcagatattgcgaaagcacttggatatgcccgacccggaaaggcaattattgatcactgcaagggtgtcctaaaacgggacacccttacaagcggtggtacgcagtccctttcctatataccggagggcgatgtttaccgactgattgttcacagcaaactccctgctgctgagaagtttgaacactggctgttcgatgaagttgtccccaccatccgcaagaccggcggctacatgacggactcccttctggaacgcattcagaaggaaccggcggtcatcatggagttcgctcaggcgttgattcgagaaaagaatcgtgtaaaggctcttgaggttgagctgaacactgcaaagcccaaagccgattactacgatgcctttatcaatccggatgactgtaccaatattagaacaacggcgaaggaactgaaaatcccggagcgcaagttcgtccagttccttcttagagaaaagtacctattccgctctccctccggtcagcttcttccctacaacaaggacagcaatgccggactgttcatcgtccgtgattttgtgacgtactgctacaccggttctcagacctacttcacgccgaagggcaaggatgtcatccgaatgaagttccagaaaaagtgcggcgaagagctgcttcccaagatggcaaggtgattttatggcagttttcagagtccccaagatcgagaacttcacgatgatgagcaatcaccatcttcgcaacaagaagctctccctcaaggctgttgggctgatgtcgaaaatcctcagccttccggatgaatgggactactccctcaaggggcttgccaagctcaacgcggacggcatcgacggcgttcgctctgctgtgcaggaattggaggatgccggttatatcatcaggcgtcagcgtagggacaaaaacggcagaatggcgcaaagcaagtatcttgtctttgaaataccggagttgtcaaaaccggcgttggattcaccgtcatcggaaaagccgataccggtaaaaccggcaacggatgtcccgacatcgggaaacccaatgcaaataaatacgaaccaagtaattacacaccaagaaaatactcacttgaacaatactccatctatcaatcactcaggcacaggacgcagaaatgatgggactgattggatggatgagcgagagcgatatagagaaatcatcgaagagaacatcgaatacgagattatgaaagaccgccctgacggagaccgcctcggtgaaattgtcgagatcatgctggatgccgtttgctcaactgctcctaccatccgcatcaatggcgaagatatgccgcagcaagtggtcaagtcccgctttctcaagctggacagcagccacatcgagtatgttttccacgcaatgaaggaatgtccgtccaacattcggaacatcagggcatatctcctgaccacactctataacgctccggcaacgatggacaatttctactccgcaaaggtcaatcatgatttcaacggctggtaaaccgcaagcgaaacgctggcggctatttttatgcctgaaaggagggctttacatggtcatattcattcatctgccgggtgtgccgccttagctgaggcagcattccctcaatcatttcaaggaaaggaggtatcactgcaatgcaggatgaagtcaacaccaaagttgttgcaatcatgatcaagggcggcaaaatctctgccgaggtactgaaaaaggcgctggacaagttcgttcaggagatcgagaaggcgcagaagcagatgcagcagcccaaaacctatcgcggcaagcagtccatcaagcatctgatgagccagaacgccgccatctccaacatcgaagtgacggacggcaacatcaaatcctttgagcggaccgccagcaaatacggtctggacttcgcgctcaagaaagacgtttccgttgagccgcccagctatcttgtctttttcaagggacgggacgttgatgtgatgaccgccgccttcaaggagttctccgcaaaaaccgtcaagcagaaggaacagccgtctatccggcacaagctggatcaggagaaagcccagagcaaggcgcagcacaaagagaaagctaaggtcaagaccaaggatcggggtgtggagctgtgaacaaacccgatgtgaagaagctcattcttctgaaccttccgtatgtcttcgccttctactttgcggataagattgccgccgtgtttcgtctcgctcccggcacggagttcatcgacaagctgacaaacgggtttgctgtattcggcactgcctttgcaaatccgcttcccagctttcatcccgtcgatctgcttatcgggctgattgccggtgcgctgctcaagctggcggtctacgtcaagggcaagaatcgtaagaagttccggcagggcgaagaatacggatctgcccgctggggcaagccggaggacatcaagccgtacacggatccggagttcacgaacaacgtcatcttgacgcaaacggagttcctgaccatgaacagccgcccgaagcagccgaaatacgcccgcaacaaaaatatccttgtcatcggcggttccggctcaggtaagacacgcttcttcgtgaagccgaacctgatgcagatgcacagttcatacgttgtcaccgacccgaagggtacggtgctggtggaatgcggcaagatgcttgaaaagggcggctacgttattaagtcgctgaacaccatcaatttccggaaatccatgcactacaacccgttcgcgtacatccgcagcgagaaggacatcctcaagctggtcaatacgatcatcgtcaacacgaagggagacggcgataagtccggcgaagatttttgggtgaaggcggagaagctgtactatacagccctcatcggctacatctggtatgaggcacccgatcacgagaaaaactttactaccctgctcgaaatgatcaatgcctcggaagccagagaggacgatgagaccttcaagaaccctgtggatgtcatgttcgacgagctggaagcccgcgaccctgaccactttgcggtcaagcaataccgcaaatacaagctggcggcgggcaaaaccgccaagtcgatcctgatttcctgcggcgcaaggcttgcgcccttcgacatcgcagagctgcgggagctgatgagctacgatgagatggagctggacaccatcggagaccgtaagacggcgctgttcgtcatcatttccgacaccgatgacaccttcaacttcattgtggcaatcatgtattcccagctcttcaaccttctctgcgacaaggcagatgacgtttacaacggacggcttcccgtccatgtgcgctgtctgctggatgagtttgcgaacatcggtcaaatcccgaagtttgataagctcatcgcaaccatccgaagccgggaaatttcggcgtcaatcatcttgcagtcccagtctcagctcaagaccatctacaaggatgcggctgacaccatcacgggcaactgtgactgcacacttttcctcggcggcaaggagaaatccacgctcaaggaaatcagcgaggtgctgggcaaggagacaatcgacctttacaacacctcagaaacccgttccaacaacaactcctatggcttgaattatcagaaaaccggcaaggaactgatgtctcaggatgagatcgccgtcatggacggagccaagtgtattttgcagcttcgaggcgtgagaccttttctcagtaacaaatacgacattacgaagcatccaaagtaccggcagctctccgactatgacaagcggaacgcctttgacatcgagaaataccggcagcacaagctggtggtcaagcccgatgacacattcgacctctatgatatgggcgaggtcgatgcggattaaagccccgtcgctgcactgcgcagtgggtaaagcctgatggctcatcccaaagcagaacagcgacggggcttctttttttatgcccattttcaaaaatacacaaccaatctttttcaaatcaaggaggaaaatctatggctttcatcaatcaggctgtcacggttcttcagacgctcgttatcgccctcggtgccggtctcgcagtgtggggtgttgtcaacctcatggaaggctacggcaacgacaaccccggcgccaagtctcagggcatcaagcagctcatggctggcggcggtgtggtgctgatcggcacgaccctcatccccctgctctccggtttgttcggctaatccacggcaagcccagcttaaccgaagggtggtgaaatattgggcagcattttagaaaagatcgaacaagctctcaaggatatgctgatcggatggatcgagagcaacctgaccaatatgttcaccgatgtcaatgagaaggtaggaacgattgccgccgaagttgggcaaacaccgtccggctggaacggcggcgtgtaccagatgatccggggactatccgaaaacgtgatagtccccatcgctggtatcatcatcaccttcgttttgtgctacgagctgatttccatgatcaccgagaaaaacaaccttcacgacatggacacttggatgttcttcaagtggtttttcaaggcggctgtggcgatctacctcgtgacgcatacgtttgacatcgtgatggcagtattcgacatcgggcagaacgtggtttccggtgcagccggagtcatccacggcaacaccagtattgatattgattcgacgattgcgcagatgcgtaccggcatggagaacatgggcgtcggagaactgctcggactgtcgatagaaactcttctgatcagcttgtgcctcaaaatcatggcgatcctcattacggtcattctctacgggcgcatgattgagatttactgcaccgtgagcattgcgcctattcccatcgcaaccatgagcaaccgcgaatggggcagcatcggcacgaactatctgaaaggcttgttcgctctggcatttcagggctttctcatcatggtctgcgtcggcatctatgcagtgctgatcaacggcatgatcatcgcagacaacattcattcggctctgttctctgtggcagcgtacacggtcattctgtgcttctcgctgttcaagaccggaagcctcgcaaaatccatcttccatgcgcactaaggaggtcggcagcatgaagaagtacagcatcatctacgccgatcccccttgggcgtatcggacatattcaaagaagggacaggggcggtcagcggaaagccactatccgacgatgagcattgaagacatcaaggcgcttccggttggtgaactggcagcgaaggactgcactctgtttctctggatcacgttcccgtgcctctgtgaagcactcgaagtgctgacggcatggggcttttcctataagaccgtggcttttgtatgggtgaagcaaaaccgcaagaacgatgacctcttcaccggcatggggtattggacaagggcaaacgccgaaatctgcatccttgctacgaagggacatccgaagcgtgttgacgccggtgtgcgtcaggtcatcctcagccatatcgaagagcattccaaaaaaccggatgaagcgcgggagcgcattgttcggctcatgggagaccttccccgcgtagagctttttgcccgtcagtctcccgaaggctgggacgtttggggcaatgaggtcgaatgcacggcgcatcttccaatggaggaatcaccatgctgcggctaaaacctatctctcttcgagacgccaacgagtacgtccggcagcatcaccggcatcacaagcccgttgccggtcacaagttttccattggctgcgaagcggacggtgagctggtcggcgtaatcattgccgggcgtcccgtcagccggtatctggatgacggcttcacattggaggttacaaggctatgcaccaacggagagaagaacgcttgcagctttctctacggagcggcggcacgagctgctgcggctatgggctataagcgcatcatcacctacacgctggaaagcgaaaacggtgcaagcctccgtgcttccggttgggtctgtcaaggcaaagcgggtggacttcgctggacaggcaagcgtcaaccgaaggaagatcaatatcccgcacaaatgaagctgcgctatgaaaagcagctcggaaaggaggctttaagaaatggcatttgttccggtcccgaaggatcttaaccgcgtcaaaacgaaggtcatgttcaacctgaccaagcggcagctcatttgtttttccatcgctgcggcggtcggcgttccgatcttctttctgacgaaagcacatctcgacttgtctacggcagcaatgctgatggtggtgatcatgctcccgttcattttctttgcgctctatgaaaaggacggtcagcccgccgaaaagtatctgtatcacatcgtacagtccatgtttatccgtgacaaggtgcgtccctatcgcacaaacaatctctacgctgaaattcagcagaaaatcaaagaacaggaggaattgcagattgaacaaccgcacagcaaaggcaaagcctaagatgacggtcaaaaacggcgtcgtttacggcgacgccctttccgctcaggagaagaagcggatcgtcatgcagaagaaaaaggacaggaaggcaaagaaagtccgcaagtccgcccagcagaccatcccctatgtggagatgtgccgcgacggtatctgcaaggtaaacagccgcctctacacgaagtccatcgcctttgaggacatcaactaccagcttgcgcagaacgaggacaaaactgccatctttgagaactggtgcgactttctgaactactttgatagctcgattttcgtccagctctccttcatcaatcagaaggcaagcctcaatgagttccgcaagcgcatcaacattccggcacaggaggacgccttcaacgacatccgctccgagtattccggaatgctgcaaagccagctcaccaagggcaacaacgggctgatcaagaagaagtacatcaccttcggcattgaggcggactccctccgcacggcaaagccgaagctcgaacgcattgaaaccgacatcctcaacaacttcaaaactctcggcgtgaaaaccgagccgctgtccggctacgaacggctgaaagtgcttcatgatgtgttcaatatggacagcaatgagccgttccgcttttccttcgatatggttgcccggacggggctttccagcaaggacttcatcgctcccacttcctttgacttccgtgaaggcaagtgcttcaagatgggcaaaaccatcggtgcggtgagcttcctgcaaatcctcgcgccggaactcaatgaccgtatgcttgccgacttccttgagatggacagcaacattacggtcaattttcatatccggacgattgaccaggcgaaggcaatcaagagcatcaaatcgaagattaccgacctcgacaagatgaagatcgaagaacagaaaaaggcagtccgctccggctacgatatggacatcatcccgtccgatcttgccaccttcggcggtgaggcaaagcgtctgttgcaggatctccagacccgcaatgagagactattccttgtgaccatcctcatcatgaatacggcaaccaaccgccagaagctcgaaaacgcggtgttccagaccgccgccattgcccaaaagtataactgtgcgctcaagcgtcttgacttccagcaggaagaagggctgatgtcctctttgcctatcggcgtcaatcaggtggagatcgaacgaggactgaccacttccagcacagcggttttcgtgccgttcaccacacaggagctttttcagggcggcgaagctctctactacgggctgaatgcgctgtccaacaacatgatcatggtggaccgcaagcagctcaagaaccccaacgggctgatcttgggtacgcccggttccggtaagtccttctccgccaagcgtgaaatgacgaacgccttcctcatcacagaggatgacatcatcgtctgcgaccccgaggccgagtattttccccttgtgcagaagctcggtggtcaggtcatccgcatctcgccggtcagcacggattacatcaatcctctggacatcaacacgaactactccgaagaggaaaacccgctgacgctgaaatccgactttatcctctccatgtgtgagctgattgtcggcggcaaggacggcttgcagccggttgagaagaccatcattgaccgcagtgtccgcatggtttatcaggagttccttgcagaccccaaaccggagaaaatgccgatcctcgaagacctttacaacattttgagaaatcagaaggaaccggaggcacagcgcatcgcaactgcccttgaaatctatgttcacggctctctgaacgtcttcaatcacagaacgaatgtggatgtcaacaaccgcttcgtctgctatgacatccgcgaactcggcaagcagctcaaaaagctcggtatgctgattgtgcaggatcaggtgtggaacagagttaccatcaaccgcgcccagcacaaggcaacgcgctactacatggacgagtttcaccttttgctgaaagaggaacagaccgctgcgtacagcgtggaaatctggaagcgtttcagaaagtggggcggcatcccaaccggcattacccagaacgtcaaggatctgcttgcgtcccgcgaggtagagaacatctttgaaaactcggattttgtctaccttctgaatcaggcatccggcgaccggcagattctctcgaaggcactgaacatctcgcccagccagcagaactacatcaccaactccaatgccggtgaggggctgatcttctatggctcgaccatcgttcccttcaaggacgttttcccgaaggacacccagctttaccgcatcatgaccacccgcttagaagaaaccgtacagaactaaggaggattttgaatatgaacaacaagatgattaccattccctacgcggacgctatcgaatacggagagaacacctccgcgctgtttaaggctctgtgggagctgaccgatctgatccgactggaaagcgacctcaagaagcatcaccgcgcctacctccatgtgagggaggacatcgacgaaaaggtcaaggaggcgcgtcagattatgaccaaggtatctgtggatatgatcggtttctacttcaaggttgatgttcccaagtgcagcaacagcgatgagaatacccctttcgctgacgcggcggatgatgaaaccgtatctatccccaaggatgagtatgagctgatgatcgacgatctgctcacgatgtccgaaatcattcagtgcgtcgcagatatgcgcacgcaggatgtgaaggcaatccgcgagtttggtaagttcgttcctgctttcgctgcctttgagaagaaccgcctgagcctctatcgtgaggcggcgaaggaagccgaggaaatcttcgaccgttgggcagacgagattgacgatctcgacgaggacttcatggaagatgaggactatgagccggacgagtattactccgactgatgcccattgaaatgttgtcgggtttcacagccaacatttcaatggaaacacaaatccaacagaacaggaggtacaccaccatacaacttgacatcattcataccggcgattgccttgaaatcctgaaaactctgcccgatgatagcgttcattgctgtgtgacgtcccctccgtattacgcactccgcgattacggcatggaggctcagatcggcagagagacaacgccgaaggaatatatctcgcgcctgacggaagtgtttaccgaagtcaggcgcgttttgcgtccggatggaacgctctggctgaacatctcggacacctacgccgggaagggcaatcagggtgattttattgacccgaagaaccccaacggcagaaacggtcaggctgtggctctcaacaacaaggttgagggctgcaagccgaaggacatgatcggtattccgtggatgctggcgtttgccctccgtgataccggctggtatctgcgcaacgacatcatctggatgaaggataaccccatgccggagagcgtgaaagaccgcctatcccgctgctatgagcatattttcctgttctccaagtcgaggaagtatttcttcgactacaaggcaatctccgagccgattgcccctgcaacggcagaacgcctcaagcgcggcatgaagggcggtaacaaatacggcaagcccgttcccggtcagcctcagccgcagtccatcaaccgccctcgtgagcatggcgagatcaaggattgtgacatcaatccgctccgcaacaagcgcgatgtctggaagatcaacaccgtccccttcaagggcgggcactacgccgcctaccctccgaaactggttgaaacctgtctgcttgccggttgtccagaaggcggcattgtgcttgacccctttatgggaagcggcacaaccggcatggttgcctcacagatggggcgtcatttcgtgggcatagagctgaaccctgaatacaccgagcttgcctacaagcggattggaggtgaaatctgatgtccaaggaaccggaactcaaagcccgcgacaaggtggtcgtgcggatgacgcgggaaggcgcggttgaggaaaacctgacggctggcaccgagcagcgtgtgtcaaagaggctggaagatgcggagctggtgaagcccggtgagacagtcgagccttccgaagctctttccccagaggaacagaaaaaggtgcagatgcgccgccagcagcgtcagtttcaggcggaacacgccgaggataaagacacacagccgccctcggaaacgtccgtcacagaagagaaaaggacagaaaatccaccccagaatgcacctgaaccgctgccctcatcggaaacgccgttcaagccccccgttttggagcagcacggcgtttcttcgcataccggcacggtgattgccgaaacggttgtcacccacaagctgcgcaagacctctgcggttgaagccgttgatgcagatgccgttctcactcaagcggcggagactgcctctgcaaagccgctctcggacgatgccgtcccgcccacgaagcggatgcagaagctcgaaaggaagtctgagaaggcacatgagcgtctggatgctgcccgtgaaaagctgcccacgcacaaggttctcaagaaagagcgtgtctttgaagaagagaccggaaagggcaaaacccgccttcattttgaggatgagctgaaaaagcccaagagcaaaggcaagctgcaatttgaggcagataaaaccgtccgcaaggtcggtgacacccttgcttccggcattcacggcaaaatccatgaggtcgagcaggaaaactcggcggttgaggcggcgcataaaacagagattgccgctgagaccgctgcgaggcatttccgtcatcatcgggaaagcagcgtcaacaagccttatgagaaggtttccaagctggaacacaaggcggatgtagctgacgccaggctccaatatgagagaaatcagcaggagcatcctgagatgaagaagcagaacatgaacaagcactaccagaagcagagcatcaagaaggaatatgccgccgctcgaaatgccggttctcagaccgccgggactgccacaaagaataccggcaagaagctcggcgaaaaggtgtccgacaagatcaaggagttctttgagaagaacaagaaggtcttcatctggatcggcgtcggaattgcccttctcgttttgctcggtgctggaattagctcgtgttcgatgctcacctctaccggctcgacggttatcgcttcctcctatctcagcgaggatgacgcgatgctgggcgcggaggcgcagtattgccaaatggagcaagagctgcaacgttatctcgacacctacgaaagcactcacaactatgatgaataccacttcgatctggacgatattgatcatgacccctatgtgctgatctccattctctcggctctccatgagggtgagttcacgctggatgaggtgcagggtacgctccaaatgctgtttgaaaagcagtacatcctcaccgaagaggttatcgtcgaaaccagataccgcacggaaaccgacacatggacggacgcagacggcaacacgcacacggaaacctatcgcgtcccgtatgactactacatctgcaacgtgaagctcgaaaacttcaatctctcccacgtcccggtctacatcatgtctcaggaacagctttccatgtacgcaacgtatatgtcggtgctgggcaaccgcgaggatctgttcggtgactctccctatgtggacaagtacatcaccaatcctcccgccgactacgatgtcaacccggaatacctgaacgacgagaagtttgcaacgctaattaccgaggcggaaaagtatctcggctatccgtatgtgtggggcggctccaatcccgacacatcctttgactgctccggctttgtcagctatgttctcacgaacagcggtcttgtgaataccggacggcttggcgcacaagggctttacaacgtctgtacgccggtttcaaaggcgaatgcacagcccggtgatctcatctttttcgtcgggacgtatgacactcccggtgtgtcccacgtcggcatctacgtcggggatggtgtcatgatccactgcggcgatcccattcagtacacatccatcaattcttcctactggcagtctcatttctatgccttcggaagacccgcttattaagagaaaggagttttgcatgaatcccaagtatcagaaagtcctctccgacatcgagaaggctgagaagaaaaagtccgaaatcgaagggcagctcaaggagctgtacgacaagaagacagagctggaaaaccttgaaatcatcaataccgtgcgctctatggtgatggacaaggatcagatcatggcgttcctgtcttccatgaagggcggcaccatgcccgctgaaaatacggaggtaatcgacaatgcgtaagaagtttcgttttctgaccgtccttgcggtctgcgtcatggttctgtcctgcttctcggtgacggcgtttgcctacgccgatgataccgagcagaaccttcccgtcaccgaggcaacccagccggaacagcagcccgcagtcactcccgcccctgaaaagccgaagggtgagccgattgacgatgagggcaacgcctacacccgtgacttgctctatgacaaggcaaccaacaagcagttcatcactgtccagacgaaaagcggcaacaccttcttcattgtcatcgactacgatgcgcccatcaacgaggatgaggaacagtatcagacgtacttcctcaacatggtcgatgagagcgatctgcttgcgcttttggatgaggacactgcggctgcgctgaccacctgtaactgcaaagaaaaatgcgctgccggtcaggtcaacaccgactgcccggtctgcaagaccaacatgagcgaatgcaccggcacagcccccgttacgcctgagccagacaaggatgcggaaaccgatgtccccgcccctaaacccgaaaagaaatccaacatcggcatgatcctcgtcatcttcgttcttgctggtgctgcgggtgcagcttattactacatcaagttcgtcaagggcagaaagcccaaggatgaagatatggacttctttgatgatgaaggctacgaagaagagccgtacatcaacgaggatgatgagccgcagattgcggaggatgctgaaacggatggtgatgaagattgattttagtcattgctgaaaagcccagcgttgcccagtccatcgcaaaggttctgggcgcaacgtcacgaaaggacggctacatggaaggcggcaattacatcgtttcgtggtgcttcggtcatctggtggagctggcagacgccagctcctacgatgagcggtatgccaagtggcggtatgacgatctgcccattgtcccggaaagctggatgtttgaggtcacaaaggacaaatcccagcagttcaaggtgctgtccactctcatgaaggacaagcgcgtcaccgagctggtctgcgcaaccgatgcaggacgcgagggtgagttgatcttccggctggtctacaacaaagccggatgcaccaagcccttcaagcgtctgtggatcagctcgttggaggactccgccatccgcgaaggcttcaaccatctccgggacggcaaggaatatgaccgtctctatgaagcggcactcagccgctcgaaggcagactggattgtcggtatcaacggcacccgcctgttcaccacgctctatcacaagaagctggtggtcgggcgcgtccagacgccgacccttgcaatgctggtggagcgtgacgggaaaatctccacgttccagaaggagaagtatttcaacgtccatgtcggcaagggcgatctgaccgccgatctggaaaaggtcaaaaccgaagaggaagcaaagagaattgcggcggcttgcgagaaaaagcaagccgtcgtttcttctctcaagcgggagacgaaaaccgtcaatcctccgaagctctacgatctgaccaccttgcagcgcgaggctaaccgatactacggcttcaccgcccagcagacgctcgatctcgttcagacgctctacgaaaagaagctcctgacctatccgcgcacggacagtcagtttatcacggacgatatggaggacactgcccgtcaggtcatttccatcgtctgccaccagcttccgcttttctccggcgtttcggtcactccggacatttcccgcgtaaccgacaacagcaaggtcacagatcaccatgccattctcccgaccgtccagcttgaaaagcaggatgtttccgctctccctcagtcggaacagaaaatcctcaatcttgtcgggatgcgccttctgtgtgcaaccggcgagaagcacacctacgcggaaacgcagatcacgctctcctgcgagggctacgagttcaaaaccaaggggaagaccgtcgttcaaaacggatggaaagccatcgaagagctgttcaaggcttccctcaagacgaaggaaaaggacgatcccatgaagtccctgcccgaagtccatgagggtgatgttctggatagtgtgtccgccagcgttacggaacactttacgacgcctccgaagcaatacacggaagacacgctcctgtctgcaatggagactgccggaaacgatcagtttgacgatgacaccgagaagaaaggtcttggcacacccgcgacccgtgccggtatcattgaaaagctggtgaaatccggctttgcagagcgcaaaggcaaatccctcattcccacgaaggacggttgcaaccttgtctgtgttctgccggaacagatcacctctcccgcaatgactgcggaatgggaaaacacgctcatggagatcgaacgcggcaatgcggatgcagacgccttcctcagcggcattgtccagatgaccggggatctcgtgaaagcctacccgttcctctccgatgccgaagcccagcgtttcggcacgggcaaggaggaaatcggcaaatgtccccgctgcggctctccggtctatgtcggcaagggcaacttctactgctcaaacagggaatgctccttctgcctgtgggaagacaataagttcttttccagtaagaaaaagaagctgaccaagaagattgcaaaggagctgctgggcaagggctggtgccgagtgaccgggctttacacgccgaagaagcctcaactctatgatgcggtgatccgtctggatgacagcggcggcaaatacgtcagcttcaagatggagtttgaccgatgactcgcccgaagtatgttgcctcttgcagcggaggcaaagacagcgtagcgacgctcctgctggctgcacagcacaatgagccgctggacgaggcagttttcagcgaggtcatgtttgataaggacacaagcggcgaaatccctgaacacagggacttcatctatgaccggctcaagcccttctgtgaaaaagagctgggcgtcaagttcaccattctccatgcagacaagacctacgatgaggtgttccatcatgtcatcacccgcggaccgcacaagggcgaggttcgcggctttgcatgggctggtatgtgtgcagtcaatcgtgactgcaaaatcccgccagtccgcaagtacaatgccgcactctcgccggacactgtgagctatgtcggcatcgcggaggatgagccaaaacgccttgctcgtctggatggaataacgaaggtcagtctgcttgccaaatacggtatgaccgaggcggacgcctacaagctctgtcaggaaaacgggctgctttccccaatctacgctcactgccgaagaaacggctgctggttctgtcccaacgccagtgactcggagctgctgcacatggtcacaaagcacccggatatgtttgaccggctgattgaatgggagaacgaggataacatcttccatcgtcggatgacgcgcaaagaaaccccgtctgaggtaaaggctcgtttattaagcaaatcccagatggggttttcttcgcccaaaagcaaataagaaatggaggtttgagatggctgaaaacaaaaatgcacagcaagtccgtgaaatcacggacaagctggaacagggcatcaaggagctttttgaatccgagcggttcaaggaatatctccgcacgatgtccaagttctacaactattccttcaataacacgctgctcattgcgatgcagaagccggaggcaacctatgttgccggttatacctcgtggcagcgcaactttgaccgtcaggtcatgaagggcgaaaagggaatcaagattcttgcacccgcaccgtacaaggcgcaggaagagcgcgagaagattgaccctatgacgcagaagcctgtgatcggcgcagatggaaaaactgtcacggaaacggtcgaagtcctgcgtcctgccttcaaggtggtaagtgtctttgatgtttcccagacggacggcaaggagcttccggacattatcgtcgatgagctgaaaggcaccgtcgaaaactacgaggcgttcttcgacgcgctcaggcaggaatctcccgtccctatctcctttgaggacattccgggcggtgcaaagggattcttctcgccggttgaaagccgcattgccattcaggagggcatgagcgaaatccagacggtcaaaaccgccattcacgagatcgcccacgcaaagctccacgccgtcaagccggatgagaaagccgcgccagaagataagaaggatcggcacaccaaggaggttgaagcggaaagcgttgcctacaccgtctgccaacggtacggcattgaaacctcggactactccttcggttacatcgccggttggtcatccggcaaggaaaccaaggaactgaaaagctctctggacaccatccgcaagacggcggctgagatgatcgagggcattgacgccaagctcaaggtgctgctggcagagaaagcacagtccgaagagaaggcagccgaggcacccgtggaagcggtgccggaagtccccatttaccacgagacagcgaattacgcctatgaagccggtgagctggagtcatatcgtgcttctctcgctgcaaacgtggaatgccgccgtgcgattgaagcggcaatcagctccaactacggagataaccggctggatgcggatgctgccgtgaagagcgtccttgagcagttctcttcggaacgcatccgatacgttcttgcaaacaccattcagcagaaagactttgacgggcgcattccgcagcccctcaaggaatgggcaaagagcgttgaggtctgcccggagaatgcctcccgcttccttgtggataaacccaatcccggactgacggcgcttttcgtcgatgcgttccgccagcagaccgaagctcaaaaggatgtcacttctgagaaggcaacggaaagagacccggaggtcgttgcatgggagaacgatgagattacctctatcgaggtaaaaaccgtggaggtcaagtctccctttgcctccatgccggaggaagcaccgaaagcacaccgtctgactgccgaagagaaggagatcaaagccgccgtcatggacacgctcaaggggcagatcgcctataacaacgacggaatgcgggcgtcctatcgcgcctctaaccactccttcaatctgctggcgcggaacggcgtcaggatcgagggcaacacggtcacgcagaacggtgagccgctgttcaaaattcatcgccgtcatgcggcgcggaaaacacagggctgttaccgtgagctgatgccgacgctggaatatgtcaggcaggagcagaagcaggaaaagccctccatccgcgatcagctcaggactgccgcaaaacagcagccggagaagaagcctcccgtcaaatccaaaacacacgacatggagttgtgagaaaggagacgcatgaagaaatacacagacgttgacatctttgcggagctgcagaagctcgtggacagtcatgtggacagctacaaggaagacttcgacatcgacaagcgcatcatccaccgcgctgccgaaagccagaatcccgaagacaagacgctgatgtggttctgccgtccgcacggaacgcactgcctcaatgagaatcaggtctttattcagggaacgcgggatcacaacaccttccgtttttacgccgaacagacctacgacgagtgcgttgcccgcgtcattgtcccgaaaaccgtcaagcgcggcaaggtcttcggagatgtctttgagatcaactaccgggaacaggctgcaaatgtggcacagaactcggttgcgccggatcatgaccggctgacctttgcagatggctttgtgctggacgcaccctgccgcagcagcttcgatgcagcaatggctctggtcggtgagcatggcggtgtacaaacccaccagacgctcccgaaggacgcggatgctctggcggaagtgctgtccaagcagaaaggccgccgtgacagactgccggatgcagaaaaaacagaggtgctttcgcctctgtccgttggagaacttcggaagtatgaggcagtcaaaaaggcgcatcccgacgcgctggtttgctttgcccagaacggctattttgagctgtacggcaaggacgcggaaaaagctgtgccgcttctcggcacaaagctccttgagaagaaggtacgcggcaagccctccttgccggtgactggcttccgtgaaactgcgtgggtagccggttctcataagctctggaagtccggcgcagatgtctttctcagcaaggacggcgagacattcaaggaactcaaagccgcagattacattcctgtcggcgcgacgctgaatgtggatggcatcaaatgcagaatcgacgcggttgattttaccgctgatgaagtccggctgacgaacatcgaggacaagaaccgccccatccgcttttctgaaagcatccagtatgtccgctcctatgtggaggatgccggaactgccatctacgacaccatcccgaagaagcccgctgcccgtgaatccatccgcgacaagctgaaatccgcacagaaagcccagccgccccgcacaccgaagccgcagaaattgaaaggaaaggatatggaactctgatatgaaaaactttaccgtggaagaaatcaacctgatgtgctgcttcaacacgtccagccggaggcggctgatcgacgatatgaagagcgtcaccctgaacgacatggacggcgagatcgcagagctgatgtataagaccatccagaagctcgaatccatgaccgacgcggagtttgaggaactgtatatcatgccggacggcatggtggatgactgaaaggaggatgcctatgcccgtattagacggtaattttgaagccttcgtcacgaaccttggcaagtacaacgagggtatgctggtcggtgagtgggtgaagttcccgacaaccgaagaagcgatgcagaaggtctttgagcgcatcgggatcggcaagcaggatgagttcggtcagccctatgaagagtggtttatcaccgactacgaatgcccgatctacggcgtccagaagatgcttggcgagtacgagagtcttgataagctcaactaccttgctgctttgattgacgagctttccctgagcgatcaggaaaagctcgttgccgttatggaggctggctgcgatgaggtcagcgacatcgacgatctcatcaacctgacgttcaatctggactgctacgacatcatgcccggtatcaacgacgaatccgacctcggctattattacgcccacgaagccggtatttactccgaaaaggatctcggtcctctggcaaattacatcgactatgaacgctatgggcgcgatattgcgatggatgagcagggacgcttcaccgatgaaggctatgtccgcgttgcaagcgaacgctgggacaggcagtttgacggggagcttgatgacattcccgatgaataccggatcaccggctcaggggaagccgtcgagcgtgacagcaccatcgccgttctcgtcgttgagccgggaaaggagccttatgtgaaggagattgactcggatctaaagtccttgcagcatgaggtcggcggctacatcgaggcaatttacccctacgaagaccctgttgccttagtctgcaatgaggaaggcaagctggaaggtttgcctctgaaccgcgctctgcgggatgaggacggtgacatctacgacgttgttgccggaacattcttggtagttggcttgacggatgacagcttcggctctctgaccgtagagcagatgcagaagttctctgaccacttcaaagtgccggagcagtttgttaagttgggcgataagattgttgcgatccccatgatctcgaaggagcagcagaagcaggaagctaccgagcagaaggactttgagatgaacgccgatacctccgggctgacggttgccggtcacatcgggacgtggcacaccattgaccagcacgaggtcggcggtcacagcttttacctgatggagcatgacacctacggtgatgaggcggcttgcatcatcgtcgatgagcgcggcaagctcgtccttgatgatgtctacaacagctttgacgatgacacgctccgccttctcgaccttgaggtcaaggaagtgccggaaatgcctgatcctgcgctctctgttcaggatatgaaggactacggctacgcatgggctggcgttcttcccgccggtcaggaggcggctgagaaggctttggagaaggggtgcgaggtttaccgtctatattccgataacaccgagggcttgtgcgtggatgccaaggagattgccgatcatgcggcaaagggcggaatgctcggtatcagcaaggaaagctggatggcagctcttgagaaggaaaactacctcaaggcagcagagatgtcgatggaggatgactacggcatgattgatgggatcatcaacaacggtccgaaggaggacaagaccgcagaggtcaaagcccccgaaaggggcgagaagtcctccatcatggacaggctcaagtctgcaaaggctgaaaagcagaaggaatgctgccctcccaaaaagcacaaaggagagattgagctgtgagcagaagtcagaaatggagacaggagtggtcgttcttcatcggggacagcggacgccggaagtataaccgcttctgcgtccgctgcgtccatagctgcaagcagagcttccgcgcggatctcatcgcctgtccgcacttctcccggaagggggcgcagagtagacaattaggggtcgaaaaagcctgtgattgcaagcctcagagcggcgcaaattgaccaacctaagtgattgtattccctgcgcggtttcttctttagcgcggaaataagtgtcgatttcggcacttgtttgaatgcccagaaaacgaaccaaaagcctctgtcgatgcccgttttgggtatcggcagaggctctttttttgtatcttgtatgcaaatccgcgcgatattcgttcgctaatccatagtatcgctgttagcgtttctgtattactgtgcctctaatccatataattatcatgagcgttatagaaaaggtgtaggtacgcgctatgattgacaagcgaataggaaaacgagtaaagcaatgcagagaacggctcggtctttcgcaggaagagtttgcggaaaagactggactgacagcaaattatatttccacggttgaacgcggtatgtcattccctcgctgcgagaagttgattatccttctcaacggacttgaggtttcggctgacgcgatcttttgtgatgttctggatcactcaacgagctacaaggcgtctgaactttccgagaaacttgactcgctgcccccacaagcacaaaaacgtatcttgcagatgcttgagctgatgattcagcaggaaacctcggataatggctaagttcgccaatgactgcgtgtttttgcacgcagtcttatttttttgccatttttcgaccgatttctgcatatctccatgctatactgtgtattagagacatagagacaatctttaatacacagaaggagatggagaacaaccatgaaaacttgcgcctttaccggacatcgcccgcagcacctcccgttcggaatgaacgagaatgacgaacgctgtatcaagctcaaggaggaactgaaagaacaaattatcaatcttatcgaggcagaaaatgtcacgcactttataaccggcatggctctcggtgttgatctttacgcggctgagatcgtgcttgatttgaaggctcgttatcccagcattacacttgagagtgccattccctgcgaaactcaggcggtcaagtggtcggcagcacagcgagaacgctattatgatattgccgcgcagtgcgacaaagaaaccatgctccaatgccactattcgcctgattgcatggacaagagaaatcggtatatggtagatcacgccgattatattctcgcagtatggaatggatgccccagcggtaccgggaacaccgtgagatatgctcacaaaaagggcaagtccatcatcgtcatcaatccggattcccttgatgtcacgcgggaataaggcaaaaaaatcccttttgaatcaagcattgtgaaaaccgtaaagtatttcccgataacgaatacacattacactactcaacttttcctaactaattttgtttagaaattattctctgccgagtatgtaaatcctttgattatttgatatatccatattatcctacctatataagctaatgttatcattttgttatcggtattgataacacttgctcagtagctgtggataatagctatatgctatggcttaaattataagcgagtttttttgtttttttaattctatacccaccagtacaacagatagcacaaacgctgaaaaatcagcaacaggccccgctagcaatactcccataattccgaaacgaagcgggagcagcagggtaagcggaatcaacacaaaggtctgccttgttaatgccaacagagcaccttttaacgattttcctattgcggtaaaaaaactggaagaaagcaactgcacaccatttaccaacaccatgaaaagataggtacgcatgaacaaaacagcaaattcaaaatacagctcgtccccatctccgaatagcgaaatgatagattgcgggaaaaattgaaatgcgatgaaagcaattgtggaaacaacaaggttccattttaccgcaagcaggtaagcctcccgtacacgatggtattgccttgccccatagttgaagccgataatcggctgtgttccctgcgagattcctacaacaatcgcaaggattatggcatttgttttcataacgattccgcaagcagctaagggaatatctgttccatattttgttaatgcgccgtaataagtcaacgaattgtactgaatgatttgaatcacggtaactgcaatctgatttgagctgctgcttatccccatgctgcaaattttcaggctttctttaatgtcaaataaaaacgactctttttcaaaatggattgtttggaaacgccatagataacggagtgcgagtatgaaagaaaaaatttgcccaataaccgttgcccaagctccgccggcaattccccaatcgcaaacaaaaataaaaatggggtcaagaatggtattgataatagctcccacaaccatgcagaccattgaatactttggttttccatctgctcgaatcaaattgctcataccattcgttacaatgagaaacggcattccaatcaatgttatgctggcatactgctttgcatatggaaatacatctgtcgttgccccaaatgcctttaggagcaaagacagaaaagtttctccaaccagcaaataaataattccgaaaattcccatcagaacaataccatttcccgctgctttggcggcagctttcggctctttgcgtccaagacagagggaaacacgggaagcactgccaattccgaccagtagtgcaatggcaaggcagatggtagaaaacgggtaggcaacattggttgctgcatttcccaaataaccgaccccttgaccaataaaaatctgatccacaatattgtagattgagccgacaagagccgccacaatactgggaacagcaaaatttttcaacagctttgaaattttttcatagcccagaggattttcagtcattgaactcctccccctttttctctatatggagttccgatgtgatatttctgcccgcctgtattaagaaatccataaaaaggttctgctcggattcgctcataccctgcaataaaagagcttctgtcttttcgcatatcatctgtatctcgtcaataatagacaatgctctttctgtaggatacaatttacatgtccgcttatccttatcattgggagaacgtgtaatcattccctgcttttccaatgtcgcaaccgtccgtacaatgttgcttggatgaacatagaacatattcaacaaagaatcttgtagaataccgggcgaacgacagattttgattaagaacatatattgagtgttgttgattccataggtggcaagttgcttgtccaaatagattttgtaaaatcggtctgttacggaaagccattttaatagtttcatagatatattcctcctaatcgccagtattataacacaatatgcgtgcgcacgcaactacttttaacattatatctgccgctttgtcctcctaaacacaaatcaattctactcagtgattatcggaaacgtgtacggcgtatgctgcccagtgaacatctccacgggacacatcgaattttcacggcttcgcaaaacggaaagtgtcaccttatgaacagtcccttgccgagagaaaaataaatcgctggaaacgggaacgcccccggcactgtgcgtctggcacagtgtcgggggcgtttttccgtgtcttagttatgagccagttcatttaggagctgctttcgatagtccacatccaagacgcagcgatggaagtccatcagacggtgttcgtcgaacagcttttcacagagcttggtcagcggatgattcatcagcttagcagaaatcccgacctcgttgaaaaaccttgcccatgtgaagacctcttctaaatcctcctgctcaagtgtggtggggatgatggcgttgcagagacggacaatagggctgcccgcaaatcgctctgccacttcctccggtgtgcattcatagcggtcacagtcaaaggaaagcgcatcctcaattttaagataattttcggtttcatcccgcgtcaaggttatggtgtagtctcccataccggacggcacatcaatattctccatgacatcaagctcgtaacgggagccgccgatgatcgcctcaaaggagaaagactggcagattactgctgggtttttgtctatcttgtcctcatttagaaatgacagcggattatactccgtcagttcccagtcgatttttcctctctctgtttgctcggcaatctgctggatcagatgttgttcttcttcgtgcagattttcattgtacaacatgatacacctccgttttctgattctcgttttttggggggctactctatgtttccgaagagactgccgttggtatcatcattcgctggctgagggcagaccttcgtaaaacttcctcagttcgtccaaactgcttgtccgatttttgataggcagggagtcccatgtgatgtcatggtagcgttctggcgggtcatcccgcagtcttcgatcaatgatacagacgataccggtatcagtgaaattgcggatcaatcgcccgataccttgcttgagcttgatgatcatttcgggaacgcggacatccatcaaggcatcttgggcaacggaacacttatactcaatgattgggtcaggcacaggaaacggaagccggaaaatgatgacattggagaggctttttccttcgatgctgatgccttcccaatatgcgcccgtccccagtagcacggagttcatatcttccttaaactcaagcaacaccttgtcctgcgacgatcccggctgctgcatcaggattttgtatggaaggttcttctcgctgagaatggagtagacctcttccatgtcggtcttcgccgtaaacagcacaagtgcctttccattggaaatactcagaatctcaagcagccgctcaacacccttttcaatgaaggcttcatgttctttggtcgggtgtgggagatcatcacagtagtagatcatggcgtgtttgtcatatggatatggagaaggcttcggctcggataagcagccgcgctcaccaaccggaaagccggtattgctgataaagtaagaatactgctcttccagcgttccatttgtggcatttgttagtgtggcagaagtcaggatagttctttcatcgccgttgaagtatagacggctcacaatgtcctttgtgtttttggggcagtagacaagttccgtattgctgccgtgctgctcaatccagatcagcatatcgtctatccgttcaagtagttctgaaagggattcgctgacggcatccagatcatcagatgcagcaaaggaacggttgttccggaaatccatgctggaataaatctggatgctggacgaaaggttatgaatggcggcattcatttcggtaagcagctcaatcacactgccgttttggtcgaagaaaaagcggtcagcatagcgcatatcctgatcagcctcattgatctgcttttgaacttgtgctttcaggcagttatagaaggcgatgactgcactctctgcttctcgcttttctctggacacgttgctttggtcagaggatcgcagctcatagaatgcgttttttatcagcccgaagagcataccctgcccgaaacgctctgttgttgcactccgcaccttatcgtccaagttgtgtgcttcgtccacgacaagcagatcagcggcagcgttaattagtccctcttgtccgcgccggagcttcattagatgctgtgtaagaaaatcttgattgcacagcacaacaccatctgtgaactttaatgctgcacgaactttgtaatacttgcatttcttttcgcatgagccacaattcttcatgctgaaccgttgcacgttcaccttgtcccagacaccttgcggcaaaacctccgggaaatccttgcgttcctcataaccttgctctatcccttccttgagagaatccggcacggatgctttcggatcacacacaaagtcatttgcgcgtttatagcagagataatgtgtttgcccttttgcgaggaagacatctctatgcagcccaaggaggggcattatcgtgtggacatcgcgccagagctgttcttgaagcgcgatggttgaggttgcgatgataacaggtttgttaatgcgcttgctgtacagcagcaccggcacaagataaccaaaggacttgccaataccgacgccagcttcaatcgcaaagtgttgatcgtttatgagagaatccacaatctcaaaggacatatcctgctgcccctcacgcatttctaatccatgctgcggggcttcgtcccaaaagaaggtgctgacttgctcactcatggagtacagctctgcttttctgcgttttttccgttcttctgctgtattgaatccaaaatagaatctgttgtccatccacattcctcccggaacagaaaccaaggctatccgcgtttcagttcaatgctgacgtttccgttctcgtcgatggtcagcgtcatgtgtttgatgtgcttttcatagaattgacgccgttctgccggagacatttcaattcgagtgttcctcagcgcggcatcaaacatatcgttgacgttcaggtgaacggagttgtcaatccagcggtacatctccttgaacagtgcgtttttcttgatgtcctcgctgttgccggagtagaagtcatccagatagcagtagaatatcccggattctgcaagtgccgccttcatatccggcccgcatttttcccgctcaatcatgacaaggaatctggcgtccggcaaggaagagatcagcccccagtagtcggaatcgcttgagacaatgacgaaggaatccacttgcttctggtaatgttcctgacaggctcttgcggtgagtttgatgtctaccagtgatttgttctgcttaatccgctcaatcatgatatgttcaacggggatgcgggtgtagttttcaagaatccgccatgccgtagcggtatgtacgtcatcaaagagaatgatcgccgtaatcttctgtatgacctcataatcaaggtttttgagcgtggcgcacagcttgtacgggtcagagttttcgcagtccactaccaatacggtcttctcactgtcatctatgaagtcgtagatattgttttttacaaaagcccctgcatcggagactttactgtattccgtgaaggcgtcgcaatgccattgataaagcagggtagcaaacttcttgtcattatagaggacattaccctcgtccatcggtacccagttgatatacatttgataggggtagtaggagagacttgcgtaatagatgtccgcagcatctttcgttccgtcctctgtcaagccgtttggcatgatgaacagctcttttatgtacgcccagttaatccagattggaaagaggcttttgcagttgttaatgcggtctgaaatcagccggttgatctcgataatgtggtggcagagctttgtactcgactttttgataaagctgattccgtcgtttgagagctgctgcatactggaagccggaatgatctccggcattgaaagcagcccacggtattccatccgcatgatgtcatttattttccggtagttgcgctcgatggcggtgcggatgatacatagatttcggataattcgggcatttttatcctgctcaagccggttgtatatctctatcttcggcggctcgtgttcattttgaaaaatacggagcgggacgccgatcaggtaggcaaccttcgatacaagctcgtaggtgttgtctttgtaggcaatctgttctccggcatattcgacgccattcaacatgactgaattgcccatgatctactcctttctcgtaggggagttaagcggtcattacattgtctgtccacatctcacactggctcatgacagtctggacagcatcatccataccctcaggcggatatttgtgttttttcagcagccttttgacaagacggcgcattcctgctcttgcgctctctttcttttgccagtctattgtctggtttttgcgaagcaaatctgtcagttctttcgtgatagcaataagctcatcatgctcgtaaaagtccttgattgcttgcggcttcgtcagagcatcatagaaagcaagttcgtccgctgtcaatccgagtttttcaccctcggcggcagcagcggcaatgtctttcgccagcttgagtaattcttgaatgacttcctcgttggtcagcattccgttcaaatagcggttcattgcgctctgaatgatttcggagaacttctcagacttgacgatatttgttcggcggtaaacagagacctgttcggaaatcagttttttcaggagttcgactgcaagattcttctccttcatgtttgccacttcttcaaggaacttcggatcgaacaacgaaaactcagtctggacatcagagaaaaggttgataacgccttcgcttttgatactgtgcttcaaaagctcgttaatgcgctcatttacttccggaagcgtaaacttctttccggtaccgcctgaaaccaagcgcacggtcattgttcttacggactcgaagaaagctgcctccatgcgagtttgctcgtctaccaagctgctgcacagcgaaagtgcctgcttgagaagcagggcttctttgataaacacattctgtgtcttctcatggtcgggaagctcgtactctgcaacactcttgccgagtatgaagttcactccgccgctgatgagcttcgccctgtcaaggtcgcttccggtcatgaatttctcataactgaatccgtggaacaaatctctgcaaatagagagcttttcaaggaacttcggatatgcagccttgcttacatctgtatcaccatagttcttcttgtctctggcagtatagtcgttcattgcctgtttcagtgcagccgcaataccaacgtaatcgacaaccaaaccgccttctttatctttgaagacacgattgacgcgggcgatagcttgcatcaggttgtgtccagccatcggcttatagacatacatcgtagcaagggagggaacatcaaagccggtcagccacatatccacgacgatggcgattttcagcggagagttgttgtctttgaatttccgcgccatatcgtccttatgagctttgttgccgataatctcacgccattcttcgggatcgttattgccttgcgtcatgaccactgcaatcttttccgtccacgctgggcgtagctcaagaatgcgcttataaatcttcattgctatgggacgcgaataagcaacgatcatcgccttgccggtcaggatattctcacggtaattctcgtaatgatcaagaatgtcatttaccaaggaattgatcgtctggtcggcaccgaggattgcttccatctgaccaagttcctttttgctcttttcaatgacatacggatcggcgttgtcagccataatatcatactcattatcgatcagatggagggtgttctcgtcgagtttcaggtgaatcacacggctctcgtaatagacgggtcttgtagctccgtcttcaactgcctgtgtcatatcatagatgtcgatgtaatcaccgaagacttctcgtgtgctgcgatcttttgtggagatcggtgttccggtgaatccaatgtaggtcgcattaggaagcgtgtctcttataatgcgggcagtgccgataacggttttcgcctcgacttcgccgttgtccttctgcttgaccacaaccttctcattgagaccatattgcccacgatgcgcttcatcagccatcacgataatgttccggcgttccgaaagagcttcgttgctttcttcaaacttctgcatggtcgtgaagattatgccgtttgcctgtctgtttgcaagcagttctttcagattcttgcggctctcagcgtgctgcggcgtttgccggaggaagtccttgcagcgggcgaattgtccgtaaagctggtcgtccagatcgttacggtcggtaatgacaacgatagtggggctttctaacgcttcttgcagataatgagcatagaagaccatagacaacgattttccgctgccctgtgtatgccagaagacgccgcccttgccgtctgtcacagtcgcgtgcttcgtagactcaatcgcctttttgactgcaaaatactgatgatacccagcgagtatcttgaatgtattctgtccatccacattaaagcagatgaagtttttcacgatgtcaaggaagcgggtcttctcaaacagtcctacaaagaatgtgtcaaatgatgcgtgttgcgtattctcatagctgccgtctgttgttttccactccataaagcggtcttcgccggacgtgattgtaccagcctttgaagtggtcaagtcgctcatgacacataccgcattataaatgaacatagaggggatctcatacatatagttccggagctggcggtatgctgcggaagcgtcggtttcttcgcgggacggagacttcaactccacaatgacgagcgggagaccattgacaaagagaatcacatctggtcttttttcggagttctcaatgaaagtccattgattcgcaactgtgaactcgttactggcaggatttttgaagtctacaaggtaaacaagggtagagcgttcttcacccttgtcatagtattttaccgggactccgttttggaggtagtccataaagaccatgttcttctgcaagagcgttccagtttcaaagttcttgagcttatagattgcctccgtcagagcgtccataggcaggctcttgttgatccgctgcaaggaaggcagcagaacatcctcataaagcggcgagtgataatcgcgctccacgtccggtccatagatatagttatagcccagttcttcattaagaagctgcaagacagcgttctcgtaatttgattctgtaaaatatcctgccatagtttgtcactcccttttacgccagactcgccccgaactgatccagcgtgttttctgcatctctgtcagtgacgggcttattcatcgctttttcaattaggtttagaaggctttttgctctgtcgatgaaatagccattgaagtcatctgccttcaattctgcatagttgataaagtgcgattccacccgtgcttgcaactcattctcggtcagtccatcaaccttctttagaattgcccccagatactcactcggcgcatttccgccaatcgagcggttggtggctggaagaatcggggtcttgttaatgatggaattataccgttcgcgcttgatgcccattttctcgcaatatgcttcggggaatatatggtgaatatccggagactcaagcatactgtttacaatgtcaatcgtcgtgttgttcataaagtcacgacacttctccttgtaaagaagagccattatacctttatatgccgcgctcaagcgagtttgaagggttagcagccgcgtagaagaaaagactgcgctgttaatcgtgtgcattgcattcggacgtccattgacctcttcaaccatgtcctcaatgtcataggcatagcgggtttcgttcgcaccgccatacatctcacccaaaatcccgcaccaataccaccgagaaagagttttgattgtgtttggctcattgcatttggattttccgagaacagcgcagattgccgcaagtggaatcaactgcgttgtatagggcaaatctctttgacggaaaacgcactgatcccgaagaagaaactcctttgcgattttgaacccagacagcactgcatcccggttcgctatgtacgattcataaggaagtcccagaacatctttctttttgcaggagattgtgtttgtctttccagactgcttgttcaaatagcttgtatagagacaaaccgttgtcaggaaggtagtctcatcaatcccatcgaacaggtctgttctcagcgtgtcaccgaaaccgcaaattgtatttcgacactgcacccagtcttttctcaggtcaaagtctcttgtggcataagttgcggtaacaagctcaaacaccgtgagaggaacaccaccggtattgacgttctcaaacaccttgcacactgcctctcgcggcgtggacttgtccagcgtaatcacaggcagcttatacccggaaattgtattcagcacatccacctgaaaacgcttgaactcgtccattgcctccggcttcattccatagtgcgtcatgtagcccatgaaccagtccataacggcgttgctatcgaacacaatattgaccgggaacagcttattctcgtattcatattctctggttgagaggtcgagcttcacatcacggtcaaagttttctttgatcttgcggtcttccggaatagacaagactgcatcaaaacgatcctcatcatcgtcaaggcacttctccattgagagatagtaataacgcttaatagccttgcctttttctgttttggtcgagaccggctctttagaggatgttgcctgatagatggaagtaagtcgctgctgtccatcaagaatcaaatgctccggctttactgagacgccttttacgcccgtaattgtgcggtatttgaattgaatgtccggattaccgtattgtagccgcataatggcacccatagggtagccttgcgacaaactggcgataattcctctaattcggttatcatcccaagtccagtcgcgctgaaactccggcaactgcattgagccggacttaacctccgctaaaagctgacttaggtttgtatcaagagattgtggtgaaataatcacgtctgcgcctccttcattgagttttactgatcggacgagcccagtctgctttccaaatctgaaatatcgctgcggatggaagagatgtccgactcaatatcgtcaacccgctcggataaagaagcctgctgactttgaatgtactccatttgtgagtatagacctcgcactgccagaatcaattctaccatcagccccttatcatcgagggagagaagacggtctttttcagcctgtatcttttccgcctcctgttgaagccgctctttctcacgaactgcttctgctgcggctttctcaagacgaacccgttccttttcaagacgctttttctggcgctcgtctttgctttttttcaagctctcctgaactttatcaaacatggtacaacctccaaatcaggtaaacgataatttagcggcttagagctggatgtcagagacatcgatctcgccgctcatcagcttgggtaacaatgcattgcgcaggtcggcaagtttttttgattgagcatcgtttccctgcatggctctatacataggtgcaaccaacgattcaaattcttcaaggacagttgcaggaggaatggcgatttccattgcatttaggatgtctgttgtcatgcttggaacagcagagccagcattcatagctgcaaggtctttggcttttacaaagtgatatacgaacttagccacatcgggcagtcgcatttcggtgtagaacatagtatcaacagaccagaaaggctgattaacatacatcacattgttcagagtgccttttcttggtataagaactgactccttatcatataaagggcgctcaacatgacgcataatgcctcctgagccatatactggataaatgccatcagccagctttttatggtctttgccatatctaacgattacgaaatcagacaaatggccttgtttccatgttggttcagcattatcaacgaacatcgaagcataaatggcttgcgcttgctgctgtaaattatcgtttatctgctcgttgcaggtgatcttatcttcgaggcattgcatcgtttgtacgataacttcttgtacagcaagcgaaggaacgggtatggtcaaattggcaacttcggaaaatgtaatctgagggaatgtgccagatcgcgtttcagctaacagttgaagttctgcaactgtggaactattcttcaagaaatagtataggtacttaggagataccacatccttttttgcacgaattaccatcagtttagttgaagcgatatagtctatgggcgaaaaatccacataggcaaaccgcctgttctgtggacggatctcgctatataaaatatcgtctcgctgaaaagtcttcttgaactgccctttcaaattggagtttggaactcgttcgtggttgagaactctaccctctaaaacgtccgaggtattgataagcgtcaccatattctttttttcgcgataagtgtccgaaatagacgaacaaacttcaccaacgggcatatatattgttccattcatactacccaccatcctaaccgatgtattttctatgtgccagcttcacattctgctgtttcaccattgcatagtgcatggtggtgtcgattttctgatgccctaagagctgctggacttgctctatgggcattcctttgtctatggcagttgtagccagtgtacgcctgaacttgtgagggtgaaccttcgggatattcagacgctttcccagctcccgaaggcgtgtctccactccgccaatcatcaatcggtcaaagggagctttcagggaaacaaacaaagctgggttttcatccgttcgcccctcaaggtagttttgaaggtggattttcgtccttgcgtcgaaatagaccaatcgttctttattacccttgccgataacaacgcattcgcgctcattgaagttgatgtcttcgcggtttagtgtgaccagctcaccaacacgcattccagaggaagccagaagatcaatcatcgccaagtctcgtgctgttgtgcagttgtcacgcatcagctctaacacttcatcggtgtaggtgtccttgaccacctttgcagtcttaactttgtgaatacggcgtaccgggcttttcacaatgaaatcctcatcttcaagccatgagaagaagctggacagtatccggcggatgttgtctatggtcactttgctcgacctgcgctgaacttgatagtttgtcagatagcggcgcaaatcatctgtggtgatctgtcgcacagcctttccaactccggcaattagagcctcaatcgtcttccggtagtagctcagggttttctccgaacagccttcgatccgctttgccgtgataaatgcttcgactgcatctgcttcgtctgctggaattgagccactatcataggtgatcgttgccccttccaatgtctcagccattgcatcccgaaggtgcatgagttgttcgttgttaagatacggcagcatttttcgctgtatctccgtgatgagttgttctgtcattgtcgtgtctcctttcgaggtaagagaacgacattcagtggcagtcccttttgtaaaactctcgccactggtgagagttattcagacggtaaacgataatttagagcagcaagctcaatcctattttcaagaattatttgttgataatgctgatccagaatgggctatcggaacaattagcgatcttggtactgttgttggaggcagtacaccttcaaaagctaaacctgagtattacacggagtccggtatagcatggataaccccgaaagatttatctatcaacaagtcgaagttcgtttctcatggtgagaatgacataactgaacttggtttgaagaacagcagcgcagcaatcatgccagaaggaacagtgttgttctcatctcgtgcgccaataggttatattgctatcgccgctggtgaagtaacaacaaatcaaggtttcaaatcggttgtgcctaagccggaaattggaacaccatttgtttacttctttttgaaaaacactctcccggtcattgaaggcatggcatccgggtcaacattcaaagaagtatctggcagcactatgaaaaatgtcccggcggttattcctgacgctgaaactcttgccaaattcagcgacttttgcgctcctatctttgcacagcaacgtattttggaagagcagaatcaatcgcttgcgacattgagagataatttgctgcccaaactgatgtctggcgagatcgatgtgtctgctgtccagctctaagctgctaaattatcgtttagctcttgattgttcacaatctttttttggattgtggaaataatctcgacaacacatttctgaatacttaattcaggcaatacgacctcaatctgttgaaaggtcgaagatggtctcgccaatgcagggacgccaacctgtgaggcattgcttagaagtttatgctgtcctattggagtgtggaagtaatagacaaggtattcgggcaaaaccttgtcgttgcatcgcaccctaaactgagattgcgaaatcacataccggtcatattttgaatcttgaggaataaacactatttgcccaagcgttcctctgtgtgttattacaatatccccgcgatgtgcatttgccttgttaagagagtcagcttttttccttgtgacatagcggaatgtcttttcggatagagaaaagccctcaagattactaccatttaggacaggtacgccactatccacaaaacacgagactttaatatttgatccgaatggacccatcgcaatttcatcaattaggtcagcaatacgatacgtttcatagtccatatccaatcgcccccagtcgttctttgatctgcgtctcaagttcatgggactttgcgaaaagctcagaaagttcagaagtcaaacgccccattttctcttcaaacggctcgccgtcatcttcctgttcctcaataccaacatagcgtcccggagtgagaatgtaatcctgctttgcaatgtcctgtgtagtgacaacagcacagaagcccttttcatcttcgagtgttccatcaacgaaggcattataagtgtcggcaattttcttgatgtcttcatccgtcagttcgcgcagcttccgcgtaaccatagtgccgagtttccgtgcgtcgatgaacagcgttttgcctttttgcttcttgttctttgcaaggaaccagagcgataccgggatctgcgtcgtgtagaatagctgcgtcggcattgcaacgatacagtccacaaggtcagcattgataatgttcttgcggatttcaccttcaccgccggactgcgaagaaagcgaaccatttgcaagcaccataccgatacgtccattcggagcgagatgccagatcatgtgctgcaaccacgcgaagtttgcatttccagcaggaggcgtaccatactgccaacggacatcatcaacgagtttatctgcaccccagccagaaagattgaagggaggattcgccataataaagtctgccttgagctgcgggtgacaatcgttaaagaatgtgtccgcattaaacttgccgaggtcggcttcaataccgcgaatggcaagattcatctgcgccatcttccatgtggtcgggttagagtcctgaccaaaaacagaaatcttgttgatgttgccgccgtgattttcgatgaactttgcggactgaacaaacataccgccagagccgcagcacgggtcataaacacgcccattaaacggctgcaacacttcaacaagggtacgcacaacgcaagagggagtatagaactcaccggcaagtttgccttcttgctcggcaaacttggagaggcaatattcgtatgtgcgaccaagaatgtccttgctgtttccatgctcgatcatctgaatattggtgaagagatcaaccacttcaccaagacgccgcttgtccagctctggacgggcgaagttcttaggaagaatatctttgagacgcttgttttctttctcaatactgcgcattgcatcatcaatcaccgtgccaatttccggcgtatgagcggcagcagcaatcgcgctccatcgtgcattctcagggacaaagaagatgttttcggcagtgtattcgtcctggtcttcttcaaatccatcgccttcttcaaccagctccttgtactttgcctcaaagcgatctgaaatgtatttcaggaaaatcagtccgagaacgaccgacttatattcggatgcgtcgatgtttccgcgcaggacgcaagccgcgtcccagatttgtttttcaaagccgatattgcttgtgttattttcagccatttcagcaacctccaaagttatagtttcacacttactattctacaaaaagagctgtacgaaaaatcggactcagttcttgtccgttcgcacagcctcacatatatctccgatgtcacagttcaagtaatcacaaatgcgcagcaaaatagagagggacacttcttcccccttattcagttttgtccatgttccggcagacagccctacttcatgtcgtagagaagccttctttatgtcgcgttccagaagaagcatccatagtttcttatagcttatgcgcacggcaaccatcctttcgcttgcttgcattcaacatcgtttataatattatactggatttcattctcaaaagcaatccgttgatgcagaaattaaagaaaaagtttcaatttctcgaaccttctctcaaggatgcagggcatctcctgttgatcggagatgccctgcttttgacgagattattcgcgctgtgtgctgcgcagatgatcacggtcatggtcagcagaaggagcgagaaacgtatcaacattagacttgatcgtctctatttgttttacttcttttttgagcttcgcacgttcatcatagagccgctgttgctcatcgagaagtcgctgctgttgcgcttgcagcgtcttcaagctcggcagtttttcatcgccctgcatggcaagcagcgtactccgtgccgcctcgaagatcacaagctctgcctcatgctttgccttgaaacccggcttatcttttgccttctggaaagcgtcatatacaggttttaggcgctggtagttggagatgtttttgataagcggctggacttcccgcagccgcgcttcaacgcctttcagttccttgccggtacgatcataggagctgtgaacatcctcgaccttcttctcaagatcggcgtattggagcaagttgttgtctgtgagatagttgagcgtccgtgccgcttccttgaggatagtgagctttgctttatgctcataacccttgctgtcgataagcctgatccgctcctgaatatctccgatgagagagatgcccttcggcgtggtctgtctctgacttcttcggggcgtccgtccggcaatccgctccttgatgcgttcctcggtgtagttctctccgatggtcttagaacgggtaaaccgctcctgaccttcagcgcggaaggagatgtatttgccgggtttgatttcataaccggcttcctgcatgagccgcagaaaatcatcgtagtccttcgctgtgatgacaagccggtcgatggtctgcttgagtttttgcttccagctcgtgccgcgtttggcttcggtgtactccttgtagctcatgcctttgttctgagagggagggataacagagagaccgttttccttacagagccggtcgctgacctcacgcatatcatagtaaatccgcttgtagctcttgtaggcgtggtagtccacaaagtcaaccgcattgaaaatcagatggttatgaacatggtccttgtcaatgtgcgtggtcagcacatactcgtattttccaccgaggatttcatccgcaaattgcttgccgatctcgtgggcaagctccggcgtgacctctccaatttcaaaggactggatcacatgacgggctatgatcctgaccggattcatccctttttgctcggctattctccgcgtccattcaaattcccgcgctgcggtctcgctggcacagccgtaggacgagaccagcagcttctcgtcggtcttttcgggattcagaatgtacgcgattgccttgctcaaagttcctcggattgctttgattttagtaactgccataccgcgtccatcttttctttcagctcgtcaatatcgtcctgatagaatcgtcccgtcgagttgatcctgcggcagacggtattgatgttcacgccgatcttgttgatttcggcggcgagctttttctgctctgtgtagtctacgacaatgatgtagccgtcaatcagcatcttccttgcatacgcaccgaagttctccgtgccgatcatctccatcttctttgcaatcgtccgttcttcctgtggtgtcagccaaatcttcttctgaatgtctcgtgttcttcgtaccatgctgcgccctccgtcgtaaagattagaagggtttgggactatcccaacaagcaaaaatctgatgttaagggcagggtctccttaactgatttttctccggtgggtactcaccggatttgcttgctaatctcccaaaatcgtattccccgaagattcctccgtgaaatgtcccttcactttacaacggacacaataagagcgtttgttgagtaccggatttcaaaaaagtcaaaaaatcattggatttcccatgtgaaagccacggtgtccgacacgtcaatatcgtccggctcgatctctggcgcagagcatttactcatcgccataagaggctgaatgcagtcttcgacctcatagcttgttctggaatacacattgagttcgccccagttgtagtcgatattgagtagctgcccaagcgtactgcctgatgctttgcaaagaatctccgccttcgctctggcattctccgtcgcgctgatcagcagcttttcgctgaccgctgatgggtttcttacagtgaatgcaatactgagttccggctttgcaccgcaatccgcaatcgcagaaatgacctttgcaagctgtttgctgtcaaagtcaaatgcaagtttcaagcgatagctgcaagcatatccgacaaactctcgcttgtaatttccttgccgatccttgacgttctcgtatcttgtctggacatcaaagctcgtggttttcaagtcttctttgcgatacccaacgcagactgcggcaccttgcagtctttcgattctctcggcagcttccgacattgcacggtcataggttttagataaggtttcaatgttcaaggagaggatgatgtaatccggtcttgcggagacatttcctgtcccttttacggtgatcgttctcattgctttctcccgtcctttctggaattgaagtcctcatcaatacgctttttccaattcgtacccagtggtacgctgcatcggacagcagaaaccgcttcgctcagaacttcatagttgagctgcgttccctcatggtcagagtggtagttgaccgctcggtctgcaccaattccgaaatgccttgccgtctcaaccgcgtcgatgtttgcaccgaggaacaaaaactcccagccatacttttccttctgacgctcaatcattttcttgaccttctcgctgtcataacggcggcttgcattctccatgccatccgttgtgatgacgaacagtgtgtgttcagggacatcctcttttcttgcgtacttatggacattcccaatgtgatgaatcgctccgccgatagcatccagaagcgcggtgcagccgcgaacggaatagtccctgtcggtcatcggctccaccttctgaaccggcacacggtcatggataacctcgctcacgttgtcaaagagaacggtagagatcaatgcctcgccattctcttttttctgcttttcaatcatggagttgaatcctccgatggtgtctgtttccagtccgctcatagagccgctgcgatcaaggatgaatacgatctccgtcaagttctttctcatgttttgtacctccgtatataaaaatatgactgcttggtgtctcaccttacagtcatattgtacttcggtattcacttcatttggtcgcatggcaagcgacattattctaaggacaagaacagctctccgtcaatgcttaggatgtcatccatcggaatcttcgtgccgtcctgcatggtaatcaggcgctcaaagtcatcaacctttatgactgcgccggttgcagttacatactcaccgccagctttgcgctcatcaggtttgaagtaggttatttcaacctccggctcttcatcaagggcatccatgagaagctgatacctcatgttcaaagcggtcaaggctccctcatcaagctcaatcctttcgtcggtcagacgtccggtttccttgattgcagaatcatagccggtgagggcggcaaagggcgcaaactgcgctgcacgatctgacatcggcatttgtgatcgcgttttggagacgtggtgaggaagccccatgatctcgttgtattttctgttcacgccttatgccctccaatctgcgcattgcggtctttcgcggttgcaccttcttcaagattcattgccttgaggatggcgttctttccatacttctttttgattgcaagcgtggcggcttgtattttccgctcacgctccaaggcggcattctcagctttctgttttttctcttcggcggcatagtcggtaaagagatcgaactggacagcaccgtcatttttcttcggcgcgtccgcttccggcaggacatgatttgctacaacatacatacggcggacaagcagattcttgtccacgatccggtcgaagagttctgacacagcgcacattattttgcgggtagatgatgtgtgaccgtcgaggttgatagagccgtgcgcctgtttgggaatctcccgcccgtaggggtctttctccactgcaccgtgatactttgcccgtcgtgccggatcggtaaggttctcaatgtcatagccgacggtgagaaccatctggtcggtgacaagtcccttgtccaccaagtccagcacaagcaagtccgtcatttcccggacaaccagcttcgccttctgcggctcgtagggacagtgcaatacctgaccggagctgatgctgttggagctgggacggtatgccttgattgcctcaatggtcgtaggctcccagccccacgcatggtcgatgagcaattccgcgttcttgccgaacagcttataaagcaagtcctcattccgctccgagcaaagggcaacatcacccattgtgaacatcccattctgctcaagtttcttcgcaatacctcgacccacgcgccagaaatccgtgagaggctggtgcgcccaaagctcacgccggaacttcatttcatccagttcggctattcggacgccgttcttgtcggctgggatgtgcttcgctacaatgtccattgccactttgcagagaaagaggttcgtcccgatcccagcggttgccgtgatgccggttgtctcaagcacgtcgaggataatcttcatggcgagatcatgtgccgagagcttgtaggtattcaggtagtccgtcacgtccatgaacacctcgtcgatggagtagaccacgatgtcctccggggcaatatatttgagataaacctgatagatgcgggtgctatactccatgtagtacgccatccgaggcggcgcgatgatgaagtcaatcgccagatacgggtttgcttgcagctcagagtagaagtgtgatgtgccgtccaatctgtgtcccggcgcgtcgtgctgccgtccggcattcgcttccttcacgcgctgtttgacttcaaatagccgcccgcgtccggagataccgtagctcttgagggagggcgtgacggcaaggcagatggtcttatcggtacggctttcatccgcaacaacaaggtttgtgtccagaggatctaagccgcgctcccggcactccacggaggcgtagaaggatttcaggtcgattgcgatgtaagtgtgttgtttcaccttctttgcctccgctttcttcttagatcagccctaatgacatttcattggagcttttaatgttgaatacgatacgccattcaatatcaccctccaccggctcaaagtgtagagaggaacaaactgcatgaagtttttcttttgagctgtctccacacacgattgcgattggaccgtccgctccgccgataatgccgatacaagcaatatcgtttcgtgcctctggtgcatagcggtcagagcatggcgcaatttccaaaggcttgtccccctcagcgcaatcacagatcgtatcatcgctgtcaggttcaggagaaagtgtatagctcatagcagtaaaatgcgtaggataaaaccagcggtcagaaccgtaacgcttttcggaaattgtctgctgctctaattcctgtacagtcaatgtgtatttttttccactgaccggatggaggaaagaaaacgaatcaccgggagcgtgtgccttgaaatgtggtcccgggacacgacacgactgctgctccattgtaagggagagggcttttatttcaggacggcgtttgcttgtccacggaaaagctgcccgaaaaatcatccatccataggatgtatccaaatcatagtgttccaatgcccactttgcttccgcttcattgatcactccgtctggcaaacatggattaaagaccacggaacagccgtgggaggtcagcattgttttcccgttcaattccaaacgaggaataaagtcaaggcaaagtggattgtctaaatctatctgcatttgctgctcctgcgtgaagtattcgcaggagtcgttttcggggtgtaaatcccatttagttatgaacttgcgaatgtcttcttccggggtacgcatacaaaagtccatgacgagtcccttgctgcaagaatacgccgcaggaataacccaatgatgcctcgcccagtcaaattgcttattcaaccggatttccgttccggcatggtcttttcccgaatgtccccagaagtttccatcaaagtagaccttccactcaggcatggtcggttctgcttctgggttcatatcaacatcataatagtcctcggtgtacttgatcttactataatcaaaagatgcttgcagctttttgatgtatacccacggctgttccataggcgtcaatttcattttctcagcaagctctgatagcgttctttgctgatcctgcgttggagggttgtcctgcaaaaaggcttcaaactgggctttatcccacatccacgcctgttccagcgctgccgaatcactgcaagcaaggagcaacctcagaaagtcttcaaaatcgtttgccagcggatgaacaaaatccggagccgagttcatgggactgacggaaaataccataccgccaaagtctcgaacaaagcagaagtggatgccgtccacacccgcccagccaaaaatagatgcaccttttggcgtgcaaaagtatgggttgttatcttcacgacgctccacccctacgggcgaaaggtcaataccacttcgcaaaaatttctgaaacactttatccatagaccttatgctcctattaaactttggtcgaaggcaaacagagcctcgttgatctcaaagacattatagttcccatgctccacgaaatactccacgatgatgtcaaacttgttggagtgggagagcgcaaagccagccttcatgagcatatccttcatttcaacaagcggcagctcaagggcaatggcaaacgcaatgaccgtgggcttggaaggcttataagacttgtccgagcggatcttcgagaagagcttccggtcaatattcgccttcttatagcactgcgcgtccgtcatgccgcgctcatcaatctttcgcagaagcatctcggaaaaactctcgtcgatctgtcccagcgcgtcatcaagggttgccgcctttttgggggcagccgccgcagagacgggaggcatgagctgttcgattgcctcttcacaaacggatgcctcgcaaggcatgggttcttccatccggaaggcgttcatcctgcgcagacgctcggaacgattatcagtatgctcatccacatagcggtcatctatgtacgctgcaatatcggcaaacagcttgccgctgatctgataggctttgcggtcaaaaatgacgatgtacaccgtcatttcattttcgagaaggaaactgctaatggtgtcaatcgccactttgagagcctgatccttcggatagccgaaaatgccggaggaaatcagagggaacgcagccgattcgcagccgtattccttcgccagcatgagcgatgtccgataacaggatgtcagtagttcgcgctcaccatgccgtccgtcataccagcgcggaccgacagcatgaatgacatatttgcagggcagcttgtagcccttcgtgatttttgcgctcccggttttgcagccgtggagcgtttcacattccgtcagcagctccggtcctgcagcacgatgaatgcagccgtccacaccgccgccacccagcagcgactcgttggcagcgttgacgatggcgtccaccttcattttcgtgatgtcatttctgacgatttgaagcggcatgattctatcctccgtcctatcaaagcggcatcggtgtccgggcgatcagaatgaccgccagaatcgcgcccacaaatgccgctgcccctacgaccgccaacacctttttgtcgagcttcttcttcgctgccttgccaatcagcgcagcgcaagccatgcagacagccgcagcaacaagcgcaatgcccagcgtttcccatagccaagaaagttcatgtaggattttcatgcgatcatcatctcctgttcgttaaactggaatttatagtcctctcaaaaccaatttgctttttcttctcgaaatacgggaatatcactatctcgatatggattgtaattatgaagattgcaaccaaactcttttaatgattttattttgttatcctgtgtccatacaattaaagatattccgtcaaattcttcaacatttccattattcattttgtttttaaaataccactccacgattgtttgattgccttgatgaaaaaattgcttaatctcccagacaagaacacttccgcgtgtattccattcgtcaaaccagtgctttaccgttttgcggttttcatatttaggactccaactctcagtatatacaacatcatctgtaaaaatattgtcaattcctaaatctgctttcttaatccacatatcaaaccataatcggataattttttctctctcgttcataaagcacctccacaacttccgatttgtctgccccttaaagtccaagtccttcaacccacgccgcaagctcctgatgcccgacgttgcccttgaaaactttgccgtccatcagctttgcgcctttgcagctcggcgcaaggcgttcgttcgtcttgccaatgccgcttccgccggaggttgcaaacgggatgatcgttttgccgctcaggtcataactctcaaggaacgtattgataatcgtcggcgcaacgtaccaccagattgggaagcccacaaagattgtatcgtagtccttcatgttgtcccgcttcacggcaatttccggtcgtgaagcgggatcgttcatttcaatcgtgctgcgggcgttcttttccatccagttcagatcagcttccgtgtaaggcactttcggctcaatctcaaagatgtccgcgccgattgcctcagccagcgtctcggctacctttgcagtcacgccggacgcagaaaaatatgctacaagtttattactcattgtgttcttcctcatcaatcttttcatttccttcattcagcatgaagtatagcagagcttccagcaatgttgccatataatgaagcgaccagttttcttccggctcttttgtcatcttatcaagcacggctcgaaaagccgtggtacggtcaatccttgtttcctcatcaatgcggtcaagtatgcccttcattttcagggcgagttctttttcctcgtcagaaagctccggtatgccaagtaactcagatagtttcttgtcctgcataatagcatcgtattcgatgtatgacttgtgttcggctgacatcaattcttcaaagtagttgataaaaatatgaacgcgaatgccaccttcttcgtccggggagaagcagacggtttgcgatttttctgcaatttctttcaaaaatgcaaggtcttctgagtcatcgaactccgcaaacggaagaaacatattgatttccgcgtgccaacgatgatagtccacgattcccttgatatacccgcggtgttgcttgacaaacgcatcacagcgttccagaagatactcgtagttcttcttgtcctccggtacaatgatctttggtatcttgtccattgcttcggagtacgctttcagcataccacaattaactgcgcggtcaaacacctcatcgcaccatttatcgtattcggcagactcggtttcccggtaatccttctcaaagataatatcgtccattgcgttacccctttatgattttctcaagctgcattttggtcgcgttaggcagacgtgattgcagatgttttaggatacgttctttagattcctgcgggtctcaatgatattactcattgctcatacctcttcttcctcgataattccgtagtcaatcaggacgttctcttcggcgtacttcgggtagacaatacccatcatctcataccggtaacgcctcaccctgcgaaacgacttaaccggttccggtacataggcggcagtctcgcagtgcgcatactccggcatttccgcaagatcatcccgaacggcacggataagcgcatctgccacatcatcaatgcttttgccggtctccacggcaaccagttcgtgcttccggaccgccttgtccagatcaccgggggagcgaaacagcttatatttcatatcattgcccgtcctttctctctatcgttctgtctattcttcctgaaatctgttctttagggacgcaatcatcgcttgtgcggcaatgcttagatacaaaactccaatttcatagataaagtcgcggtcgatcacgataaagtattctctaacgtgtgtaaaaaccagttccagcaagtccttgtacagtggatcatcaaagggcttgaaccgcgtaaacttgcttttggcagcgtcccatgtcatagacgcctcgccctcagcactggtcatcgcctcgcagagaatcatgctgacgcccattttcccgttgccggtcaggagttctccttcgtaatagctgagaaggtctttcttgcgccggagcggaactacgtcgcagttgtcatccagctcaaatgcaatcagctccgccgcgagttcccgccagaccgcatatccggcgttaatggttccgtcctcttcgcggctgatggtatcgtccatgcaatatcgttcatagaagttgtctccgccaagctcgttgcgggtgcagaagatatgcgccagctcatgcagaagaatgtgcttcaactctgccggatgacgcgctatgtctgtccgcagcaggatcccgtccacgccatcttctttgccaacgaaagcggaagcgtgaaagtcaaaatagccgtcctctttatattgatctgtcaggcgatccgggaaatactgcttgcagaactgctcaaagacttcctgctggttttccgtctgaaagcagcgcagcacaagattgtccactccgaactccgttcccaagcgttcgttaaagatggaagcggcatagaaaagggcttctttatagtcgttgttgttcatctaattgctatccttcatcctcattcagccctccggtctgacatttttcaggaagtcagagtgcggtacataaggcaagttgagctgccagcccatgcggttcagttcgttgagcttgatcagcatcaggttgatgtttgttcccattgcagccgagagctgcaccacatcgtagtcctgcttcatcaggtcaatcagctcatcatcgtcaatgatcaggtgtgaggcaaacgcattcgcctcatattcgtgttttgtgcgcatatcgaacagcacgaactccgggagcggttcgtttcctttggcaagatcacggtgaaaggtatcatgcccgatctcgtgaccgcaaaccatttgcatgatcagatactccatgttggagttcagaagaatatgccgctctttatggcggtaggtgtacattccgagcagatcgttcagattgtcaagaaaatggagatgaatgcccagctcacgggcaatcttcaaggtatctcttgttccacagcttttgacaatgctgttcgcctttttgtatatttcctcggagcgaattatcacgggaccttcacccctttcatgttgaaaacagtcaaagtaaatccgtcaagaaaccgagacgcagacagttattcctctgcgtccgtaccggtcttcttgtatttcttcggcgtgtatttctcaacattccgggctttggattcccaatatatatcctgcaacgccttcatcaccgcatccttgtcctgctcagacagcgtaccgcccgcaaacaaaccggacatcccttcaatcaggtcctttgcctgtttcatgccacgggagccgtactgctcggatgcctgaaccacaaactcttcgtcctcggtcagcagatagttcacatccaccttgaagtattccgcgatttttctgtaagcgtccttggtacggggaaaggaaatgccgttctcgtaccgggtaatcatacgtctgttgattcccagtgcatcggctacttcctgctgggtcagcttccgcttctcccgttcagccttgaatttctctccaaacgtcattttggtaatcactcctgttcacaaaaagtttgcgacatcaaattgcgcaagtctattgacaaaggcacttgaagtgcgtataataatgactgagcaatccaactactcatagtatatcctgaattgctcatcctgtcaaggggcatgagtagttgtacacgaaaaagttacatcttttgagcagttcaaatggacaggcatttatgctgccgaagatcatccgtaccggcatacaccggtatgagggaacaggagtgagaaaaacagaaatggctacacagtacagaaaagcatacgtctcggttacgctggatgtggacaaggagggggcaatcctccctcgccttatctggtgggacaacggtgtaatctttcaaatcgaccagattctttacaaatgccgcgccacatccaagaaggttgggggcggaggcatccgttacacagttcagattcgcggaaaggagtcatttctttttcacgaaggagacaagtggtttgtcgaagcaaaggaggacaactgctcatgattttatcccagcgccaacttgaagaaattgcagcctcaacaacaaaggacttcaatcggttctttttcggggatgaggcggacaagcccgaccgatcagctttgccaacacccattgatcagtttgcaaagaattatctcggtcttcgcgtatcattcgcccgtctctcgccggatggaagcatctgcggtgtcactgcctatgccgacactgagtacaagatcacggaacttggtattacgcgcacactggctttgaagcgtaatcaggtcatcttggacgagagcttcattcgatccggcaacgtgcagcggctctgcgccaagcgcagatttacccttgcccacgagtgcgcccatcagattctcttccaactggactcggaagaggtaaaggcatcctgcgagatgagatattccgcacggactgcttatacgccgcgagagctaaaaacccgtgaggactggaacgagtggcaagcaaatgtcttgggcgcggcgatcctgcttcctcaaaaagaggttgacctggcaatgcgtcggtttgcagaaacgccgctgatcaattacgaggggaggtattcgtatggtgatcacttaacgctgcgccttttctgccggttgttcggtgtctccaagacaacggcgtctatccgccttcgtcagctcggctacatggtagatcgtccattcagtgagtatgttgacccattggaggtgtggtaatgaagagagcatccattcgggttcaggaaccgacgccggagctgatcgaaaaaatccgcagggcaagagttgccatttcccagcagaagccccgatacctgaaatgtccgtattgtcagcataatgccattgctgtctacgaggacacgaggggtcatgtagaatccaagtgcaagaaatgcgggcggatcacagtctttgatgtgctgaatatgagaagactgcgaccgcgtaccaagtaagaaccggaggacaagcctctgttctaaaataaaatatatgtcatagctgagctgtggagccgcctgataggtgaagtcatcctaatgccgcatgagacagagtttaattgctctgttttatcggcatgggattcaaacctcaccgtcatgcggctctttttctgtcttcacccttcccgctgctcccgcgcagcggaaaggatgaacaatgaaaatccctaaaacccctatcgcgttcgattacgatctctggactacggaggacggcaagtgcatggtgcgcgtgaaacgaaccggcgaagtttccgaggttgaccgcaaggttatgagaatccttcgcgcagaggaaaagcggatcagacgctcgtatggctctgacaacacctctgaggatgaggacggcgcagagaaaatttctgataccgtgctgtcccttgacgctatgccggaggacgatgtgaagtccgctgcatggctggcagactcccgcgactgcatggaggaactgatcaccgccctcaaagagaaggagcttctttccattctgaccgagaagcagcgcgaattgtatcttgcgatgactcgtgaaggactgactcttcgagagtttgcccgaaggaaaggcatcggcatcagagctgcatttgacctcaaagcagcggtgcagaaaaaatttcaaagaattttttgagcggtactcaacaaacggcaaaaagatgtccgttgtaaagtgaaagggtcaatcagaccacttcactgctccttgaaaactgaatagttcagtgctgcggatctttccgcttctgcgaagcaacacagcttccgacgccaagacctcccgaaagggagtgagcgacctccggagagctataacagtcgtgtggtgcggctgcttgcgacgatgcagatgccgggtataatgatacttccgtcttttctttgaatgggcggctcggagcgttcctcggaggggtgagagtcccatgataccgattgaccattggtagtccgcagcattcccggaactgcaaagttcttctggcaggggcgcgagctgcaaatatgccggacaatgaaacaaacccaaaagaaacttactatatagtttcaggatgaaaactatgtggcagggtatcttcacaagatgctctgccatatccttttgtcctgaatattttcacgaaacaggaggtgcttagaatatgatgggcattgaaacaatgaaaagcgtcagcccgaaaacggttgaccgtagcacactcgttcaaagaagcagcatccggcttgatcctgcggcaccgcaagaggtcaggctgagggagttcatcaagcagatcagaaatccctattgttatctggacgggaaaactgtggtgaagatcagcttcgccgagacggacacgacaatggaagattgtctggaacactatctgagaggtctttgatttatgaacagtctgaatcttttcgcccggttctatggacaagcgattgagcctgtggtataatgaaatcggtcaaaaaaagaagaatacggattaagccgcttgccctgatggtcatgtggcgctttcgtgtttctcttcataagagttgaagcaagccttcgtctttctgatttgatgtaccacaccaaacagaaaaacggaggttatttttatgccagataaggtttaccgcacggcgatctactgccgtctgtcccgtgaggatggagacaaagtagaaagcaactccatcgccagccagagagccatctgcgaggactatatcgcaaggcacgacgatttggagctggtctgtgagccgtttgttgatgacgggtacagcggcgtttccttcaatcgtcctcagttcaaaaagctggaagaggcaatccgcaagggtgcgcttgactgcattgtggttaaggatctcagccgcttctcaagaaactatatcgacggcggacgctatattgagaagatttttcctcagctcggcattcgcttcatcgcaatcaatgatgcgtatgacagtctgaccggtgatccgcagtccgactcctttgtcatcccgttcaaaaatctgattaacgattcttactgcaaggacatctccatgaaaatccgaagcagtctggaagtcaagcagaagagcggtgagttcgtcggctcgttctccccttacggctacatgaaatcgccggagaacaaaaaccagctcatcgtggatgaagcggtcagcgaatatgtgcagatgatcttttccatgtacaaggacggcttctccattgggcgcattgcaaagcgtctgaaccagatgggcgtcctgtccccaatggaatacaagcattccgccggtgtaaagttcgataccgtcttcaaaaccggcgataccgcaaaatggacatacaaagccgtccagcgtattctcaccaacgaggtttatatcggcgttctggcgcaaggcaagcgcggcactcccaactacaaagtccgcgttgtgaaaagcaaggatgaatccgagtgggtcaaggtagaaaatgcgcatgaagctcttgtgtcctacgaggacttcatggcagtcaaggtcatgatgcagcgggatatgcgctgttcgcccgatcaggacgaagcgcatctgttttccggcttcctgttctgcggagactgtcagcagccaatgatccgcaagaccgtcccgtcgaagacgaaaaagtatatctactacgtctgctccaccaataagcacacccggacgtgcagcccgcacagcatcgccgcaaaagaggttgaagagaaggtcttccgtgccattcatgaccagatcgagcttgtcatcaatctggaacacgcgcttgcgatgatagaacggcttccgtctcagagccgtaaggctttcaattacgaagctcagatcgccaaaatcgaggaagagattgaacggtaccaaaagctcaagctggggctttacgagaacttcatcggcggcgtcattgataaatcggaatacttcgagttccgcagcagctacaccaaaatcattgaggacaaacaggaggcacttctgcgggtcaaaaaagaaatgaagcagacggtgacaaccggcacgaccgaacggaactgggtaacgcttttcaagcagtatgaaaacgtcgaagaactgaaccgccgtgtgctgatgtcccttgttgaccgcattctgattcacgaaaaccatgcaatcgaaatcgtcttcaaatacagggacgaataccagcagacgattgaatacgttctcggctatgccgatgaactggatattgccgtataaaggagggatgagcaaatggcaagaaaaagcagaaagcaaattgcagtcgaagagccggttatcgaatctgtttcttccgaggtcttctcaacagccatctatgcccgtctttccgttgaaaacagcggcaagtccgaaaaggtggatgtcatcgcaaatcagattgagatttgcaagtcctacattgcagagcgtccctacctgaatctgatagatacctatgtggacaacggacgaacaggaacggtttttgatagaccggagttcaaccggctgatgaacgacatccgcaccggcaggatcaagtgccttgtagttcgtgatctcagccggttcgggcgtgactacatcgaggctggaacctatctggaacgggtctttccgcagatcgggcttcggtttatcgccatcaaagagaactacgacaactttgatacggacggctccggcgaaagcctcattatccctctgcaaaacatgatcaacaccctttactcgaaggacatctcccgcaaggtttctactgcgctcaaagcacagatggaaagtggagagttcaagaagcgcaatctcccgtatggttatcgctgggatgaagaacacagcaatatggttttcgatgaagaaaccgcaccgattgtccggaagattttccaatggaaaattgaaggactgtcccttcctgcgattgcagaccggcttgatgcaatgaacgcgcccaatccggagtttcagaagtatcaggtcggcgtccgcacaggcaatgctacggcaaagaagatttggaacaagtcttcactgactaccattctggataatccccattacgtcggagataccgttctcggacggacgctgaacgccatctacaagggcgtcaagaatcagcacattgaccgtgaggaatggattgtttttcccaatactcacgaggcgattatctcccgtgaggacttccagaaggtacgagaaatgcggaacgctgctgcaaggacaagggttgagaagatggagcgcacggaagaaatccgcgctacgctgatcaatctctttgaaggcaaaatcgtctgcgcagactgcggcaaaaagctctacttccatcgcaagcgcgttgacaagcgcaaggacggcgcatggtacgccttctatgagtgcagttcatccgtcaagcgcggcaatctctgtacgccacactatacgcggcaggacaaactcgaagccgatgtgcttgcggcgattcagcttcaagtcaaggcggctctcaattacgacaagctgcttgccaaactgagaaacagcgaaggtgaacgcagcatccgagatcagcagaatgcgctcattacaagcctgaatctgaaactcagcggtatttccaagaagcgtacccgtctctatgaggacttcacggaaggcgttctcgatgaagaggaatacgcctttgccaagaaagcctacgatgagcagtatgtcgatctttcacggcggttggatgaagcggttcagcggaaggtaaagtttgccgaggcaatgtccgaggacaataagtggctcacgctgatgaaatctgccagcggcgcagcaaaactctctcaggagttagttgacgagtccgtagagcttgtgaaagtccatgaggacggctcaatcgagctggtcatgaaatacggcgatatttacgctctgaccgttcagagtatcaaggaagtacaggaggcgatgtaaatgagcaaggaatacaacatcggcatctacatccgcctctcaatggctgatgaagataccggctatggcagcaaggcggaaagtgacagcatcggcaaccagcgtatgctcatcaatcgctttctcgacaatcatccggagttgtctcactgtcagcggtctgagtttgcggatgacggttataccggcacgaactttcaccgtcctcagttcacgcagatgatggagaaggtcaagcgcggcgaaatcgatctgatctgcgtcaaagacttttcccgcttttctcgtgactacattgaaacgggaaactatctggaatgcacttttccattcatgggcgtccgctttatttccatcaacgacggctatgacagcgacgattacaaaggcacaacgggcggtctggaagtggttatgcgcagcatcatctacgccgcatacagcaaagacctttccgtaaagaccacatcggcaaaaatccagatgatgaagcagggcaagtatgtcggtggctacgccccatacggctacgtcctgcatcccaccattcggaacaaacttgccgtagacccggaggcggctgatgtgatccgtcgtattttccgcgaggcgctggaaggcagcaacacctctcagatcgcccgcagcctgaatgatgaaggcatcccgacgccggggcaatacttcaagagcaagcatcccgacaagaagaagttcagtaacatgagcgagaaaatcagttgggaaaccgtgatggtctataacattctcaagaaccttgtttacaccggaacactggtcagccgcaaaatgaagtcctgcggtgtcggctcaaaaaagcgtgttgtcaatgagccgattatcgtagaaggaacgcatgaagctattatcagcaaggaagactttgagcttgctcagaaggtcattcgaggcggaggacggaatcccacgcgcaagcagcatgactatccgctcaagggactcgtccgctgcggtaactgtaaacgtgctatgacacgccgaaagaacaaggctggcattcgatacttccagtgcattcactcggtcaacaacggaaacacagactgtccggttggcaggagctttccggaaatggatattgagaaggttgtcttccatgcccttactcagtttcttgctttggcacagaaggaagcaatacagaaccgcgaagtcggtgatctgcggaaatctgccatcaaggaatgtgctgataaaatccgcactctgcaaaagcagaacgagcagcacaaggcgtccaagctgaggctctacgagaagtatgcagccggaagcatcacgaaggaggcgtacattcagcagaaggcggcagcggatgtgaagattgctgaaaacgatggagcaatccagcgcagtcacgagcggatgaaggagcttgactccgagaccgcctgttcagatgaaaagctggatgcggtctgcgaacagtacgccgactgcaaagctctgacctatgagctgacccacgcattcatttctgcggtctacatttacgatcttgacaacatagaaatcgtctggaaggtcaaggacttcctcactacctcagaaggagaaaccaaatgaaagtatttctttatatccgcgttgcctgtgcggatcagcttgcggcagcagaccagcgggaagagctggaacgctatgcgaaggacaaaggctatgaggtggctgctgctgtggcggcagacggcatctccggcgtccatacggaaggtatcatgaacttcctgctgaatgaagcaaagcgtcaggacatcggtacgatcctcacccgcgacacctcgcgaatcagccgggacacttcctctttcatgaggtttgagcgaaagttccgggagaacggcatccggttcgagtatctgtccaagcctgacaacgagcttccggtcactccgatgatggaggcgtttgaagcggcgtataagaaacgtcgcacaaagaacggcaaaagagcatagagaaacgcaagccgttcacgggtggttgtccacctatgaacggcttgtaaattctcaaaatttttttagtccctacttgacacaagaagatctctcccgttttggccggaattacaaagaggtcgggagctatctggaacaggtgtttccctttcttggggtccgttttatatctgtcaacgacggctatgacagcaacgaatacattggctcaaccgggggcctggacatcgcctgcaaagctctggttcacgatctttacagccgggatatttcccgaaaggtaaagagcagccgatatgcccgcctgcggcgtggcgattacttttgcagcgttgctccctacggctatgtgaaaagcagtgaagataagcatagactggtgatcgacccgccagcggccaaagtggtccggcgtattttcgatatgaccctggcgggcttttgcaccacggaaattgccagaacgcttaatctggaagatgtgccctctcccctgatctacatgaggcagaagtatccgggcaaaaagatagcggccctggaggatggtttttggaacaattttgtggtgctgtcaattctctatgaggaacgatacaccggcaaggccatcagcggtatgcgccccaatcttcgggtcggcagcaagcagcgccggaaaacaaaaagggaggactggatcatcgttcccgactgttttgaggccattgtctccgaaaacgagtttcaggaggcgcggcggtgtatcgaccatttggaaaagagaaaaatgacagcaccgccgcacttgttctataaaaagctgcactgtgcgggatgcggcagggccatgcgccgcagcaacaccacggtccgatacttttattgcaataccaggaaattccgcgattctcccaactgcatggaaggcagactgatggagcaggacctgatagacgcggtcctgcttgcgatccggcagcaggccaggatcgttgtggatacgggccagctgattcagcaggcaaagaaaaatcgcggtacacgtgtatccatactggaacagcagatcagagcgttagaaaagcggatcaaagcatcaaatcggtcccgaatagagctgtttgagcagctgaacgatggggtgatctcgactgaacagtataagacaagacgtgaccacctaagcagacagatccaagagctggaggcacagaacagacagcttactgaacagatgagggagctgctgggaaatgccacagagaatggctttgtttggctgttccgcccctgcgagcaggtcgagtctttgacccaggagatcgtagatgccctgatccgctccattcggatctacagggcggaccaaattgaaatacaatggaaatatttagatgattataaaaaatgcttggatctcttgaaagatcaaacggacaggaaggcggtgtgatcctatcagataagccccttgttgaagtatcttaaaacacgatcgcgacaatttgaaatcataaatggcagacttgtgataatatctatcataagtctgccatttatttgtcgtattggaggaagtggctttttgcttacttgacaggtgagggcccgggaataccctgagggccggtagggccagtggcaccgttaggtccagggataccctgcgggccggtggggccagtggggccggtcccgacgggcgggatgggcccggggcagataggcgggcagggagcagggccaggcccagggcagataggcgggcagggagcaggcccaggcccggggcagatgggcgggcagggactggggccgggcccgggacagacgggctggcaggaaggcgggcaggagcacgagcagcggctgcccgtaccctgggagcacatggagtcccagcgtgtcagacttctgtctgaaggaagataacggttcatttgggtctccttttcttcattcaagattgcgtggctttgccacagcccattctatgcgactgccgttcttccggtgcgcctccgcgcccggacgtcctttcccgcagccgcccctttacaatccagaacatttctgacataatggaggcaaaccaccaccattcaccaggaaaggccgtgttgttatgtctgaccgcccctatgttctcgccctggatcaaggcaccaccagcagccgatgcatcctgttcgaccggcagcagaatattgtcggcctggcccagcgggaatttggacagcactacccaaagcccggctgggtggagcatgatcccatggagatctattccagccaatacagtgtcctcaccgaggtgctggcccagagcggggtggaccccgcccaggtggcggctatcgggatcaccaaccagcgggagaccaccatcgtttgggaccgggagacaggcaggccggtgtacaacgccatcgtctggcagtgccgccgcaccgcggccctgtgcgaggagctgaaggcggatgacgagctcacctcctacatccgggaacacaccggcctgctgccggatgcctatttttccgccaccaaactgaagtgggtcctggaccacgtggagggggcaagggagcgggcccgtcggggggagctgctctttggaacggtggactcctggctcatctggaagctcaccggcggccgggtccacgtcaccgactataccaacgccagccgtaccatgctcttcgacatccagcgcctgtgctgggatgagcacatctgccggacgctggacatccccatggagatgctgcctcaggtgagggactccagcgcggtgtatggcactgtgaacctccagggagtggaggtccctatcgccggcatcgccggtgaccagcaggcggccctgttcgggcaggcctgcttctctccaggggaggccaaaaacacctatgggactggctgcttcctcctgatgaacactgggcgggagctgtgccggagcaggaacggtctgctcaccaccatcgctgtgggcctcaacggttcggtgcagtatgcactggagggctctgtcttcgtgggcggagcggtgatccagtgggtacgggacgagctgcggtttttcagcgagtcccgggatgcggagtactacgcccagaaggtgccggataccggcggggtctatctggtcccggccttcaccggcctgggagccccctattgggatatgtatgccaggggctgcctggtggggctcacccggggcacgacccgggaacacattatccgagcggcccaggagtccatcgcctaccagagctgggatctggtccgggccatggagcaggacaccggcctgcccctggccgaactccgagtggacggcggggccagccgggaccggtttttgatgcagttccaggcggatatcctggacaagccggtccgccgccccatgatccgggagaccaccgctctgggggctgcctatctggcgggccttgcggtgggggtgtgggacagtctggatgagattcgcgcccagtggaccctggacagactgtatcagccccagatggaggagcccgtccgccggtctctgctggctggatggcacaaagccgtgggccgcagcctgaattgggcagagccggagacatgataaaaagtggcgtccatccgcacactgcggatggacgcctttcgactcttatgccatgcctgtgaaccggtccaggagttgctcctcctccacagggagcacccgcctccggtccaaccacagctcacagatcccagagtcgccgcagtccacaaagtagcggaccagccgctccccttcctgacacaccactccggagcggctgtatgctccggtcccgtagcggtaggaggaccacagaatgtcgtgctccagcgcccgatccccgccgccccctagaagccgcagcccgccagtgactgcgccgtccttggtgagcgagacagggccgccgtcctccggctggaccaaggcatagcccgggggcagctccatgcggcagtagggagtctctccggcacggctctgtcccatgcccagcagggctgcccccagcagcagacccgcgcacagcagcaccgcgcggggaagttctgattttcgcctcgtcatcaacgccccccgtttgtttttttcagcctatcacactccgcctggcgccgccaccgcagggaggaaaaaagtatgtaaaacctgtatggaggtcttggccccgggcttatgatgccctgaaacggcggcgctattcgtcgtgtttcgtcgtgcgccgacaaaacaacaggatgaaaaaatatttgggaggccccttcggtcctcccaaacgattcagagctcggccagctgggcctgatagaggtcctcggtcctggcgtcaaaacagacaaaggtgacctggggcccctccggatgctcctccaggaagcggcggacagtgtccaccgcgatccgggcggcctgatccggcggatagtggtacaccccggtgctgatggcagggaaggccgcggtgcggcagcccagctccagggccagagccatggagtttcgatagcagtccgccagcagttctgcctcctcatgcccgcctccgtgccacacggggcccactgtgtggatgacgtatcgggcgggcaggcggtagcctccagtggccttggcctggccggtgggacagccgtgcagagtgcggcactcggccagcagctccggcccggccgcccggtgaatggccccgtccaccccgccgcctcccagcagggaggtattggcggcattgacgatggcgtccacctgcaatttggtgatgtcccctgtgacagcgcgcagttccatggaaagccctcctgttttctgaattttgggatgcttctagtgtaccacgcccagccccggagcacaaggaagaggcgcgtattatgtaagtctcagcggcaccatcagggcgcgggcattgactcccgacggcgcacaccgcatgccactcagagcaggtcacgttctgaacgtcacaaaagtgatcaaagctggagatgcccggagcggctgtgtcaccacttcacagcacaggggcccgcaggatgccccggtgcaagtaccgcagaaaccagcatcttcaggccgcagaggagggactcagaagcccggcagcatcggcaggcatttcagaaggacactcccatggagagcagggggctccggcagatcatccatctgcctcctcctggggctgaggatggccgccgcgccgggccaggaaaagtccggcgcacagggcggtgaagggggccacggtgaccagaccgaaggagccgatgacggtgtggatgatctccgccgccacatacttgtagttcaggatgtggtcaaccggggtgccctgggccatgaagaccatgagcagggcgatgtagccgccggagtaggcgaagagcagggtggtggtcatggtgcccatggcggcccggcccacgttgaggccggagcgggcggcctcctgccagctcaggtcgggacgcttctccaccacctcgtggacggcggaggtaatgtccacgctcaggtccatcaccgcgccggaggccccgatgaagatggaggccataaagatctgggtcaggctcaggtgggcgtagccggagtagagcaggctctcggagtaggacatcactgccccgtggatctggaacaggtcggtaaagaggatgcccagcacacaggtgaccaggatgccaagaaaggagccggataccgccgcccagcaccgccggtcaaagccgtacaccagagcgatgatcaaaatggtgagaaagagggtgatggccagcccgacccagatggggttccagcccttgaggtagagggggaccaggagcttccacaggcagagcaccgtcagtacgaaggaggcgatggcacgcaccccggtgcgcccagcgaacaggatgaggaagagggcaaagccggcggccatcagggtctcccagcccaggcggtagtggtcgctcatggtgacattggtgatggtgtccccgtcgtggctcaccaccacctgggccctgtccccgggagagaagagcttgtcctgctccagagagccgttgagcatgttgatcccggtgaccgtccttccctgaaatctgccgtccaggatctcaagctggcagcgctgctcaccagagcggaccaggccggtgtcgatgatggcggagttgtctgtctccagcacccgggcggtgcagcgctccgcctcctggtggatcagggcgccctcaaagccagtgggcaggaccagaaggagcaggatggccagcaggcataccagcacaggagcttggtaggaaaaagaatgggatctgaggcggtcgagcatggatgaaaactccttttcgcatgatttcgggggacaggaaaatgtctcattccagaacacaggggcggcccgcccccggcaaatatgccggaggcgggcccggaaggggctgtctggaccagctcaggcgatattcagcaggtcggccagcttgttgtagatgtcggtgttgtcatagtagccgttgaacatctcgctgcctgcgccctcggccaggactgccacgggcaggccggtgtggctgtaagaggtgaaggagatgccggacttgttgttgatgatgtgggtgatggtgacagagaggggctcgtaggtgccgtagagcacatactccgcttggtcgtactgactggaggcggtaccgttgatgctcttttcataggcggcccgcagctgctccatctcataggcggtgaggaccagcttgtcgccctcctcgccctgggccttcaggccaaagagcttctcaatgtcggccagcacggtcccaaaggggggcttgttggccttataggaggccacatagtcgctgtcgtacttggcgaaggagatcttttggttctccagcagatccagataagtgtcgtagtcggttccggcgaagccgatggtcaggccgccggtctcatggtcgccggtgaccaggatgagggtctcgtcagcatgctccttggcgaagtcgatggccacctgtaccgcatcggccagggcctgggtatcgtggatggaggaggcggcgtcgttggcgtggcaggcccagtcgatcttgccgccctcgcacatcataaagaagccggtgtcgttgtccagcacttcgatgcccttggctacatagtcagccagagcccacatgtcgtcggtgcggtccagctcataggccatggcgtcggagtcggccaggtcctcgtcgatgatgatggctttctctgtattggtgccgatggcgtcggcctcggcgtgggtcttggccacggtgtagccggcctcctgggccaactcatacaggtcggtctggtctccgctgctgccggtgggcttgagcagtccgccgccggcaaagtagtcgaagccagactcgaccagctccaggccgatctcatagtagctgctgcggctggcctgatgggcatagaaggcggcaggggtggcgtggttcaggttgacggaggtgatgacgccgatctcccagcccttctgggctttcagctgctcggcaatggtctcatactcgatggtgccggtctcatccacattgatagagccagagtaggtcttgtggccggtggagatggaggtggcggtggaagcggagtcgggggcgaaggagttggagtcataggtgacggcggagccggcagcctcaaagttcataaagttgaggtactcggggccgtcgaggatggcgccctggttgtcatccagactgggctgggcctgccagtagtcagcatccttcagggcacccaggtagtcggaggtggactggatctgggggtagctcatgccgtccccgatgaacaggaagacgtatttaggggacttgacggacgcggccgcagtggcagtcagagcggcggtatgcggttcctgagactcctgcgggacctgggcggcgttggcggcgcagccggccagcgtggcggcggccagggcacaggacagaagtgcggttgcgatttttttcatgtttgtttgttcctcccaatttctcttggacagtttgtgaccgctgggtcaaggctattctagcggctctgcgttaagtccaaaacagctgaagtgtgaaatctgcgttaaagaatattatcggctcagcagcccatgcccgcacagagagagcgagcggaacggcaaggaacggaatagaggaacacggcgttttgattcagattcagacaatgaagggacacaggagaatgtcatataggcatgactataatgtacaaattttgaaattgaattttgtacaggactgccaattttgtgctgagtaaagaggggagatccatcagaaggctggcacaggtggaggggggagagaaaatattttttaatccagcggaaagtgaaaagcgattcggatatttgttacaaaattgttaacgaaaaattggatgactctaccagaaatccttttaaaacaatgaaaaaataaacataaataatgaataaattagatattatgaaattgtaaaacgggtagatgcaaaaaatagatttaacttcaggcagaatgaatgataaaatagagcctcagaggacacgaagttgtctgaaactgacaagaacacatgggacaggctttcacaaaaatgaatctcatgcataaagggagcgctgtccggctagggtgttttttgtgaaacagctcaaaaatggccatgtcggacggtttaggcattaaaagcgcatcagccgctctgacaatgggctgagcgggatgaaagggaggaagttgaacgatgcatatcggaacaggagagctgatcgtcgtgctcgtggtggcgctgatcatcttcggcccgtcgaagctgcccgcgctgggcaagatggcgggcaaggcggtgggaacgctgcgtcactatgcagacagcaacaactgggacgaactgctggaggaagaggaagaggagaaaaagtccggaaagaagcaggaggagaagtctcagaagcagacggagaacgagcaggaggcggagcctgtagaggagcccgccgaagaagcagagcaggcggagcctgccgaagaagtggagcagccggagcaggccaaggagggctgagcagttccggcggcagaaattgtcaagaataaaggagagcggattgtaatgtttggaaaatttggtactgtggagatactgctgatcctggcggtggctctgctgatcttcgggcccaccaagctgccgaagctgggcaaggccattgggcagaccattggaaactttaagcggagcagcgccgccgcggagaaggctgaagagaagcacgacagcaaagagtcctgagcccatccatgagccgcgccacattagagcaggacaagaagaaaaccagagcgaaggacggtccgggcgctgaaacggatcggaaggaacgggaggaatacggagaggagacggacgagctggaggatgacgtgccccaggggggcaggatgtccctgctggcccacctgaatgagctgcgccgccggctgaccatctgcgcggtctgctttctggtgggggtggcactctgcctgagccaggcggagtggttcaccaacctgctgctctcccggggagagaacttctcctttgtgtacattgcaccggctgagctgatgatgacctacgtgcggatctccctggtggggggcgtggtgatcatcatccctgtcatcatctatcacatctggcgcttcctccagccggggctgaagcgggcggaacagatgggcttcaacctgatcatcacggtggggttgctgctgttctgcctgggtgccctgttcgccttcaccatcgtgctgcccatcctgctgggcttttttgcacggctgaatacctccgggactgtgactgccatggtgtcagtgcaggagtatgtcagctatgtcatttccaccatgctgatcttcggcgtgatcttcgagacccccattgtgctggtggccctcaccggcgtggggctggtcaagcccaagacgctgcagaagaactttaaatatgtagtgctgatcatcctgatcgtggccgccgtcatcacgccgcctgacgtgacatcccaggtcctggtggccatcccgctgatgatcctgttctacgccagcatcatcctgtgcaagatcctgttccgccgcaagctggcagagcaggaggaagatctagattgagcgtgtgcaaccaccgggacggcggagacagagcgtgaagcattgaggggacgcgccccgcccggagtgatattgcaaattgagaaatgaggaggaatacaaagtgagtggtaaaaaggagaacgtgcagagcagcggcattacccgccgagactttgtaaagggtctggccatcggggctgcgggcctggggatcgccaccattctgcccggcgggatcatcaccgcggcttccgcggcggacaccaccaccaagcagcaggtcggcaagcagggcgacggcatctatatcgatggcgtggctgagaacatgaagagcaagacctatactctggagtttgtccagcccatcaaactggtggcggtgaaggacggcaaggtgcagagcgagggcacctggcgcaccaccaataagcacctggtctctgtggacccggacggaaccaccatcatgcgggacggcgtgggcggctacgatgtggagatctcctggacattggggagcaccacctatgccgtgaccctgcacaccggccagaccgccggagcccacgccatcgaggtggatcaccccatgacccggggcgactttatgatccgcctggccaaatatttcggctggccccactacaacgccgtgatggacgacggcacggacatcaatgacaagggcgaggtcatgaccacggagcgggtgcgcaacttctatgatgtcactggcgacaatgactatgtgaaagccatcgagtccgccctggatatgggcgtgctcaccgccacctcccccgaggactgcttctatcccatgtccgagatgacccgggaggacgcggctgtgatcctggtcagcgctttcaagatgtccaagctgggtgccgattacatctccaagttcgatgacaccaacaagatcgacaagaactgctatgacgctctgaatatcctggtgggccgcaactttatgcggggccgcagcaacaccaccctgaatcccaccgatggcatcaccgacaccgaggcacgcatcatcatcgacaatatcgaccgccgtgtagtctgccccgtgtgggccatgccggtgagcaaccggaagttcgtccgtgtccgtcccgagtggttcacctccacccaggatgccgtggtccattggcgctgtaaggtggacaagtactcccaccccgagctgaacggcctgtttgtccaggaccgcggcgtgggcgtgtacgtgggcaccggctggagcgactggtatgactatatccccggctactccaccgacccctgctttggcctgaacaacaacaaggacctgccttacgacgcgacttggcttatcgtggacgtggagtgctatgccaccaagcccggcatggaggacagccctgtcaccaagttcatgtggcggatcgagcgccccgcgtggcacgactttgcctttgacaagctgcatgacgccggggagaacttccccgcggtctaccgctacttcgacaacttccaggcagcggcctactacatcgagggcagcaagatgggcatcctcttcgacggccttatgcccaccaacaccagtatttctctgatcgatcgggtgaaggaagtggcgaccaagcccttcgtcttcgtgctgggtcacaaccacggcgatcactccggcgcgatgccctatgcctacgacgccggcgtggatgtctacatgtgtgaccgtgttggccccgccggcggggattggagcatccaggtgtacaacaagaagtacaccagtgccaatgcggtgatcgactcagagaagactggtacctacactggggacaaggtgcatctgattgatgagggctatgtcttcgatttgggcaactgtaagttcgaggtagtccatctccccggccatgaggatgcatccatcctgatttatgaccgggccaacggtctgctcttctcctctgacatctacgccgtcaaccgctactgggtggcggaccagtttgccgccaagggagtgaagcaggacctgctcctgtccctgcaccagcagctgatggacatctataccaaggacggcgctcaggtcaaggagctgtacaccggccacaaccgcatcggaatgggtggcgactacctgactatctgggagcagtgcctccagaagctggtggactacggccctgacggtgtttctgatgaccgccgcggtgacggtgccattctggccattgatggaaacccctacgagaccatgaactggaccggtttcgctgaggacggcaagatgatccacgctcagtacaagggcctctatgacggcaagacctattaccgtcttgaggtggacaaccgagggaccgagaaccccttggtgtccagcaacatgtactgggattacaagacaaacgcccacctgagcaatatcactttcaaggatgccaccctggtgggccacgacttcaagtacaagaccggcttcgacactgtggatgacaagttggaggacggccgtctgaagtacgccatccccaacaagttcgtgccctatgagtatgactacgaggtaaaggtgggggcccttcagagcaccgttacctttacgcccgtggccatgtccaaccggatcaaggacctgaaggtcaacgggaagtcggtctccagccgctgcccggtgagcgtgcccgcctccggcaagaccaccatcgaggtcaccggacccgacgggagcaccaaggcgacttacaccctgacctttgttgttggctgaaccaacagaaaagagtgaataaaaagtcccggcctggcgcaaatgcgtcaggccgggacttttttagaaaattttgtgttcccctggacaaaggggggagcccgagggtctaataggcagaaaggggggaacagcgtgaacgaccaggagtactggcagggggtggaacaatgccgggaacggctgtggcgcatcgcgcggatgtggctgtccgatgacagcgcggccatggacgtggtggacgaggcggtgttccggggctggagggcctgcgggagactgcgccacccggaatattttaccacctggctcacccgcatcctgcttaacgagtgcagccgggagaaaaaacggcaggaccgggaacaggcggtggaccagctgccggagcaggcctgggaggacccggaccacctgcctctgagggcggcggtccaggcactgccggagcagctgagagcagtgatccttctgcgctatttcttcgactgtactttgcgggagacggcagagctgctgcggatgccgaggagcacggtccacacacgggagaaaaaggcgctgaagctgttgaagctggaattgagtgaggaggtctgaagatggagcgcatggaggaataccagagaatgcgggaagaggaggccggccggcccgtcccggcagagctggcctgcctggagaccagggtcagggcccgggcggcgaagcggccgaggaggagaagaggaccggtcctggcggctgtgtgcctgtgtctggtcctggggaccggcatggcctggggcatgggcggtttcgccgcgctggaccggctgctgggggaaaacgcgggacagttgatccccttctatcaggaggtgggagagacggtccgcctggaggacgggatggtggagatccagggcgtcacttttaccagccacagctgtaccgtggtctaccggctgaccgccccaaacggagaagaggcggcggaaacgcctcccttctactggaagctgatccaaggagaggcgggcccgaaggagtcccccttctcctcctttgtggagcccagccggaatgggcaggatctgggaggaaacctcggctgggaggaagtgttggagggagagaagcgggggagcacctatcaggtctttaccatcagcgtggaggaggacatgagtcaggtggaagaccccaagctccttctctacttttccagggcggtggacggggtcccctctgccgatgacgtgcccggcggcactctgctgactatcccggcggaggaggtgctggaggagcgggtggtccgggtaccgggggacggggagatccggcaggtgagagtcagcccggcgctgatctccgcccagacagctgtgcctgccgagggaaatcccgtcaacctcgaagtgctccgggaggccccggagatccggctgctctaccgggacgggacggcctgggagctggagcgggagcatgtctttcagaaagaaggacggcccgactactgtgccaacgcgggagaggacggtctgctgatcctgaactggttcctgcgggaagcccccccggatctggaggatctggaggcggtggaggtgaacgggatccgctgtcccgtcgagtaggcgcagaaatgccgcgccgcgtacagaaaagctgtacgcggcgcggtgttttatcgtttcagggtggacaggcgcccggctcacttgccaggcttgaagctgtccttcagggagaccgcccggttgaacaccagagcgccgggcttggaatctttgctgtccacgcagaagtaacccagccggaggaactggtagtgggcgggggcctgggcatcggccagagaggcctccagtttgcagccctccagcacctccagggagttggggttcaggcagtccaggaagttcttatccccggcgtccgggtcggggtcggtgaacaggttgtcgtacaggcgtacctgggcgtccacggcggtggcggcgtccacccagtgtagggtggcccctttcaccttgcggccgtcggcggggtctccgccccgggagagtggatcatactccgccagcacttccaccacgttgcccgcctcgtccttgacgcagccggtgcaggtgatgaggtaggcccccttcaggcggcactcaggcccgccggggaagagacgcttgtacttggggaccggggtctccagaaagtcatcggactccagatacaggtgacgggagaaggagactgtgcgggtgccggcgccgggatcgttggggttgttctccacctccagggtctcgctctgaccctcggggtagtttgtgatggtcagcttgatgggatggagcaccgccatggcccgctgggcatgctcgttcagatcctcccgcaggcagtgttccaaaaaggcatactccacggtggaggtggccttcgccacgccgatgcggtcgcagaaattgcggatggagacgggggtatagccccgtcggcgcaggccgcacagggtgggcatgcgggggtcgtcccaaccggagacgtagtcctcctccaccagcttgcgcagcttccgcttggacatgactgtatagttgatgcccaggcgggcaaactcgatctgccggggcttgctggggacgtcggtgttttggatgacccagtcgtacagggggcggtgagcctcatactccagggagcacagggagtgggtgatgccctccagggcatcctggatggggtgggcgaagtcgtacatggggaagatgcaccacttggtgccctggcggtggtgctcgatgtagcggatgcggtagagcaccgggtcccgcatgttgaagttgccgctctccaggtcgatcttggcccgcagggtgtacctgccctcggggaactcgccgttcttcatccgctcaaacaggtccagagactcctcgatggggcggtcacgccagggggagcgggcgggggtggtcacatcgccccggtactcccggaactgctcgggggtgagctcacaaacataggccaggcccttcttgattaggcccacagccagctcgtaagtcttttcaaagtaatcggagccatagaagaaccggtcgccccagtcgaagcccagccagtggatatcctcctggatggcgtccacgtactcggtgtcctccttggccgggttggtgtcatccatgcgcaggttgcagatgccgccaaacttctcggcagagccgaagtcgatgataagcgccttgcagtggccgatgtggagatagccgttgggctcgggcgggaaacgggtgtggacctgcatcccggcaaagcggccgccgggggcgatgtcctccgcgataaattcatggatgaaattctggctgggggcggggccttccctgctctgagtggaaataatggtttcgtcggacatatcgggtcctcctcttgcgtaaacttaactctaattttataccatatttcagaggaataatcaaccgattcccacgtaaatgggagaaaaccgggggaacatacagaaaagaggggaagagaggagacagctccgttcagttcggagaaaagcgggcgggaccggcctggcgcgccgcggaaaagcgttgcctttttgacaaaaggcaggtataataagacaaaccagaacacaggtccgggagagcacccggaggcggagaggaggcgcggccttgaactacgatgtgctggtggtgggcagcggcccggcgggcctggcggcggctgtggccgcccggggacgggacaagagcgtcctggtggtgggcaatccctggcaggagagccccctggcccgggcggagcggatcgacaactatctggggctgcccggggtcaacggacgggaactgatggagcacttcagcgcccatgcccagcgggtgggggtggagttccacaccggccgggtggtggcggtgatggcctgggaggggtttgccctcacggcgggcagcgaggtgttccaggggcgcactctggtgctggcgccaggggtggcccggctggccaagtacccgggggaggcggagctgctgggccggggggtgagctattgcgccacctgcgacgggatgctctaccggggccgggcggtcacagtggtgggccggagcaaggacgccccccaggaggccaactacctgaaaagcctgggctgtcaggtggtctatgtctccccccaggagcccaaagggctggatcgggagatcccattcgtccgggccggaaagctggaggtgcgggggaccgaccgggtgagcgccctggtggccgacggcgcggagctgccctgcgagggggtgttcatccttcgggacgccctggcccccaccgatctgctccctgatctggagctgaggaacggggccattgcggtggaccgggagatggccaccagcctgcccggcgtgttcgctgcgggggactgcaccggcggccctctccaggtggccaaggcggtgggcgagggccacaccgcgggcctgagcgcggcggagtatgtggaccggaaacgcaatgaacaccaatgagacagaagggaaggatcaaaaatgtcattgaagcattttaccagagagacctttgagaaggaactgaacggcggcgcgctgatgctggtggatttctgggcggagtggtgcggcccctgccgtatgctgggcccagtgatcgagggactggccgacgagtatgagggccgggccgtcattggcaaggtgaacgtggacgaggagggggagctggccatgcgctatggcgtgatgaacatccccaccgtgatcctcttcaagaacggcagggagatcgaccgcaaggtgggcgtgatgcccggcgcggtgttcacccaggcgctggacgagaatctgtaaaagccaaagcgggccccgcaccaccggtgcggggcccgcttttattcatgcatccggggaggcgaggagcaggtccagctcctcaagggtgtcgttgggcagaagggccaggaggcggaccacctgcccgtcctcaccggcgagggccaggacctggtaggcgttttcgtgatacgggatcagagaaaagcggaagaccgccccgtcccggccggtcagagacagggcgcgggcacgctccaggtcgtaccactggtccagcgttccctgggactgataggccagccactctgacagccagagggaggagtcctgaaagtcccgctggaacaggcgctccatctcccgggcgaaggcggggtctgaccgccggacctggccgcagacccacgcctggggggcctggatggcggcgcggatctgttcggcctgggcctcttcatagtccagctgcgcgccccgaaggccgtccagggcccggacttgggcggcgggcagctgccagcaggagcgggcgccgtccgccccctggaaggagaccgggcggacgtcctcctccccggagggggcgtggatggtgaaggtgcccagctgctcctccccccgccaggcggtgagataggacgccggcgcgggcagctcctggggagcgggggagagcgggaccatagagcccaggatctcccgcacctgtgtcaggacctccgggctgttcaggcaggggggcggggtggaggagagggtaaggtgcacaaagaagtcggcctcctccgccgtctgggcgggggcggcgggggcgctcctgccgccggacaggcgggggaggagcagggggagcgccaggaggcacagcagagcggcggccggccagagccggcggcggggcggaaattttttcatggggcacctcccggcaggtatatttgaggggcctggaacatagacttgggataccattgtatcccagaacggggaaaaagacaagctcagggagggcggaggcatgggccggggcaattctgtaaccaaattttcatcttctcgtaacgaattcgataggatatctccgccggaagatgctatactgaatacacaacaaggaagggaggttccctcaatgaagaaatggatgatcgcgctgatgatggccgcactcctgatcgtacccatgggcggtatcgcctatgccgtcggagagggagcgcccgccgccccggctgccggggaattcatacccggcgacgtgcccgcccagagcggcaccatggatgccatggtggcccctgtcaacgccctggtgatgtgcatggtggaacagggtctggcctacaacgaccaggatgacgtgttcctgtggaacagcctgtactatatgctcagcctgtgcggccagatggacgagcgggcggagctcaccgatgacatgctgatcctgcccgcggagacggtggccgactacgccggcgctctgttctccaacttcgacggactgcccgccctgccccgggagatgaacggccgggtgagctatgactggcagaacgacaccttccgtctggcccggggcgacgccggactgaccgagacccgcctgggtgagatcaccgagctgggcggcggccgtgtccaggtggccggagccctggtgagcctggaggatgagtcggtgctgtgcagcttcacggtggacctggtccgcaacaacagcatgtttggctatgcgatctccggattggatatcctctgatatgcccctcagcccagaaacgcgccgcagctgcggcgcgtttctggctgtccgccccaggctttttcccgggacggaggtatgaaatggggaggatctgcctatattggaagagataccttgctattttggggagcgcatattataataggccctgttcgcggcggagatgccgcaggatcttgaaaaactggggagaggtgcttgaaacatgaccctggagatacatgactatattcagcccgggcggaccgcccatctggtggggataggaggggtgtccatgtccccgctggcagaggtgctccacggggcgggggtgcgcatcaccggctccgacgcccacgagagcggggcggtggagcacctgcgggcgctgggggtcccggtgaccatcggccacctgccggagagcgtggagggggcggactgcgtcatccgcaccgccgccgtccatgatgacaacccggagatcgccgccgcccgccggctgggcatccccgtcttcgagcgggcccaggcgtggggagccatcatgcggcactaccacaacgccctgtgtgtggcggggacccacggaaagaccaccaccacctctatgtgcacccacatctttctggccgcagggctggaccctactgtgatgatcggcggcaccctgcccgccatcggctccggctaccgggtgggcaagggggagaccatcatcctggagtcctgtgagtactgcaactccttcctctccttcttccccaccgtagcggtgatcctgaatgtggatgcggaccacctggattttttcaaggacctggaggacgtggagcactccttccgccgcttcgctgagctggtgccggcagacaccggcgtagtggtggccgaccgagacgaccagaacaccatggagaccctggccgggctggagcgtccgctgatcaccttcggcctggaggagggggacgtccacgccgccgggctggagtgggtgaacggcttccccagctttgacatcgtcttccggggggagaaggtgacccgggtggagctccaggtgccgggggagcacaacgtgcgcaacgccctggccgccgccgccgccgcgctggccctgcgggtgccggtgcggggcatccgggaggggctgggcgccttccggggagcgggccgccgctttgagcacaaggggacataccggggggcgcaggtctatgacgactacgcccaccaccctgaggagctgcgggccctgctgaccatggcccagagcctgggatatgggcgggtgatctgcgcttttcagccccatacctattccaggacccacgagctgttttccgattttgtggaggtgctgaagctgccggaccaggtgctcctggcggagatcttcgcggcgcgggagcagaacgagctgggcatctcctcccgggacctggcagaacagatccccggcgcggagttctgccccggtgtggagcaggtggcggaacggctggcccagctggcccagccgggggacctgattttgaccgtgggagcgggagatatcttccgagccggagagctgctgctggccggacaagagaagggcccggccggaaactgaaaaagaagtttgcaggggcgcaccatgtgcgcccctgttgctgtgatgcggcccggcggaaagccgcccccacatccgtcgcggcatgcgccgtatcaccttccccgggagaaggcttttgggagcaatctctgctggaagaggcggaggatagaatgatccccacaggagcggtggggcccctgtggggatcgctgtctatttcaaactgcgcggttcagggggcctcttcctgtatcggcgttgggatggaagcggggcagcggccgttccggacgatctggacggtgtaggcgataagcatttcgtagatctggagcgccaggggggatagcttggagacgggggtgaattctttggcataagccaggtcaaaggtcagatccttctcaagagagagcttcaaaagcgactttctgaccatcctggacagctgaagaggggtgtgagagccgccgaggtggatggaggcccgcagcatagctgaaaagaggaactcgtccatccggttcagatcgatcggctcgatggcgggatcagtcaaggtaaagttggtttgactatctgacattaaaatcacctcgtcaccattataatctgattttccgataataacaacgggaattctccatataatctgtttaccagataaaaatggaggtatcccccgtgagagtcaggagggactatggagataagaattgtattggaagaaatgtggtttcgcttcgcaaggaaaaggacataaaacagaaaatactgttggcgcagctccagctgaaggggattgacatcgggcagtccagcctctccgccctggagggtcagcgccgggaggccagtgaccgagaggtgctggctctctcccagatctttcaggtgcccatggagcggctgttccagccgcctgaggagtgaggcccgtttcagagggggcggcatcccaccggatgccgccccttcggcccagggaaggccgggttttcggttgacctgccccccggattacggtacaataggagttaactgtgaaactgaagaaccgaggacagagagatatgctggatcaagaacaggaactgagattttccaaggcccgccggggggccatcgcccgggagttcgcccatctgaacccggagcagcagagggcggtgctggccaccgaggggccgctgctgctgctggccggggctggcagtggaaagaccaccgtgctcatccaccgcatcgccaacctgatgaaatacggccggggctccgacagcccggaggtgccggagcgggtgacggaggatgacctgcgcttcctggaggagtatgctgcctccggcgcgggagacagggcacggcaggaggcactgtgccgcctggagcccgccgccccctggaccatcctggccatcaccttcaccaacaaggctgccggtgagctgaaggagcggctggagcggatgctgggcccagccgccaatgacatctgggcctccaccttccactccgcctgtgtgcgcatcctgcgccgggacatcgagaagctgggcttctcctcctcctttaccatctatgacaccgacgactccctgcgggtggtgaaggactgcctgaaggacctgaatatcgacgaaaagcagttcccgccccggtccgtgctgggctacatctcccgggccaaagacgctatgaagctggcggaggagtatctggccgactgcgagcgggcgggggatttccgcctgaccaagatcgccaaggtgtacgtggagtaccagcgccggctgtgggaggccagcgccctggactttgacgacatcatcctccacacggtccgcctgctccagcagcacgaggacgtgcgggccttctatcagcggaaattccgctatgtgctcatcgacgagtatcaggacaccaacaatctccagtatctgctggcctccaccctggcggggggatatgagaacttctgcgtggtaggggacgatgaccagtccatctaccgcttccggggagccaccatcgagaacatcctctcctttgaggagcagtacaagggctgccgggtcatccggctggaggagaactaccgctccacccgccacatcctggaggcatccaacgccgtcatccgcaacaaccagggccgcaagggcaaggaactgtggacccgggcgggggagggggagaagctccagctctacaccgccatgaacgaaaatgacgaggcccagtatgtggccgcccgtatcctggaggattacagccagggccggcactggaaggaccacgccgttctctaccggatgaacgcccagtccaaccaggtggagcaggcgttcaagcgcaacggcatcccctaccgcatcatcgggggcacccgcttcttcgaccgggcggaggtcaaggacatgatcgcctatctggcggtgctgaacaacccggaggacgacctgcgcctcactaggatcatcaacaaccctccccgtggcatcggggccaagacggtggagaccgcccaggagatcgcccggcgggagggggtgtccctctttgccgtcatcgacaacgcgcggatgtaccccgaactggaccgggcggcggctaagctggcccagttctccggaatgatgggggagctggcccagcaggcccagaccatgcccctgcccgacttctatgaggagctcatcgcccgcaccggttacgccgtgatgctggagagcaagaacaccgtggaggaccggacccgtctggaaaacgtgcgggagctgctcacctccatcaacggctatctggagaatgcgggggaggagccctccctggcgggcttcctggatgagatcgccctgtacaccgacctggacagccacgacccagatcaggactgcgtggtgatgatgaccatgcactcggccaaggggctggagttcccggtggtctttgtggtgggggccgaggagggcatcttccccggtatccgggccatcggagagacggaggagatggaggaggagcgccgcctgtgctacgtggccatgacccgtgccaaggagaagctgtacctcacctgcgccaatcagcgcatgctgttcggccgcaccagctccaaccgtcccagccgctttgtggacgagattcccacggagcatctggagcgctccggccgcaccttcctggacccgggcgtgggggactgggggggcatccccagccgcacctccgggtacgggggataccagcggggggagcagagctacggcggctacgcggcccgggggagcgaggcgccccagcggcccgctccgccttcctacggcggtttcacccgggccatgggggggcgcaccggcggcgtctatcccgccgcgcccgcggccggccgtccccagcgccccctgggcggccggccggccgccgctgcagtaccggcggtgctgcctaccttccagaagggggacatggtgcgccacaaggcattcggacaggggatgatcctgtccgtgcagaagatggggggcgacgccctggtggagatcgcctttgacaacgtgggcaccaagcggctgatgctcaaatccgctgccgcccacatggagaagatatgaggaggagcggctgtggagcgaaataaaaggacggccaggacgctgacggcggcgctctgcctggcccttctggctggatgcggcgcggaaacggccggggagagcctggatgccgatgagatgcacccgggatggagcaccgtgaccaccgatccctccgcctacggcatcacctatcaggagctggaggatctgagcggcatgcccctggaccagctgacggcctactgcctgggggcggacggggtctacggggagaacggctttgaccagctgtaccaccggttcctggaggccccggataccgtgctgtcctacctagccttgatcgacagctgggaggagcgggagctgttgtgcacacacttggcttccgctgatgtgtcctggtacggcgggaccgaggcgtttggagcgattttggaccgcctggccggagagagcgggaccagtggggagctggcggagctgatccagacagagtggaaatctttgcaataaacagaaatagctgcgcgccctcccgaaaggagggcgcgcagccgttttttggataagggcctgtgggcatccatgtcacacagacagagagacggaggggacggcctgctggggcgcggcggcggggatgggcttcgtcccggcgtgagcggtgtgcagcagcagcaccccggcgccggccagcaggatctgggtcagggggacggacagccagaccccggacagccccagcccagtgcggggcaggatcagggagagggccaccagcacgacgggctggccgtagatcagcaggtcggcccgggtgatctgctcggtggcgcagaagtaggaggtcaggatgcgcactaccgacatgaacgggagatagagcaggaacaggggcaggatcacctggaacagccgggtagcggcattggatgccccgaacaggtgggggatggcggaccgccccagaaagagggcgatgccgcagagcagggcggcggcgggggcggaacggaaggtcagtgtacggacctgagccagcgcctcctgttctccggcgccgtaataccggctgagaaggggctgcgccccgtccccgatgccctggatgatgaagtggaccatgcagatggcgtagctcatgaccgcatagcaggccaccgccagggagccgccgtaggccagcgctccccggttgatgaccaccagcgtgaccgtgttcagcatggtcaggccgaagggggacagggaggtggcaagcaggcggagaacggtcctccggttcagacggaagctcaccccccggaacacccgcttcacccggaacagatagaccagccccagggcggcggacaccccctgggcgatgacggtggcagcggcggccccggcggtgccccagcggaagacggagatgaacagagcatccagcaccacattggtgaggaagccggcggtcatggagcacatggcggcgtccgccccatcataggtgcgcagcagggggaccagcccggtgcccagcacctggaagagcgagcccagcacgatgacccgggtgtagctgtcagcataggccaggacggagccctccgcgcccagcagagggagcagggggcggtagagcagggcgagcagggcggtagacagcacgccggccagcaggagcagcacggcagtggagcccagggcgcggtgctcctccgcggcgtcccggcggccgatgcacacggacagcaccacggcggcggccatgcccagcccggtgcctagggcctggaccagggcggtgaccggccaggccacattgatggcggccagcccggcatcgcccacgccctggcccacgaacatcccgtccacgatggagtagacgccggagaaggcaaaggcgatgacggaggggagcacattgcgccagaaatttctttggatcatgagaggggcctcctcaggctccgaaagaccggagcagatgtgatcagaaagagggagcggcctcgggcattttcacaaaaataagggtctttctttgtctaaaacagaaagtgcccgattccgaactatatatatagtgcggaatcgggcaaaagtcaagaaacatcttaacaaaacattaacacattttcaggggcaggaaagagcaaaattatggaatctgccagagggtgggagaggcatccgcaaatcgttccaggcgatggtggcacagggcctccatctccccccagcggggggcaaaaagggggtcaaagacccctaccacagtgaagccagcctgcctggccgcagcacagtagctgggagaatcttcgaagaggaggcaggactggggagggacgcccgaccgttccgccgccagacagtagagagccgggtcccgcttttctattcccagctcagcggtggtgtagacggcctcaaagcagtccagaaggcggtggtgctccagggcggcgcggcacaggggaggcatgcaggaggtgagcaccgccatccgtgtcccccggcggcggcaggcgtccagaaaggcgggcacgccgggcttcaggggcagagtgtgagcataggcggagcgggccatggacatccagccctccatgatctcctccggcgtctccgggagggagaagcgctccctggtgtaccgggccgcgtcgggagcgctgtggtgggtgacgtagtcggtgtagtcctcaggcaccggcgagatgccccgccggcccagaaattcaatgtcgatgtccagccagatcccgttggagtccagcagggtgccgtccagatcaaaaaagtacatggcgggacctccgtgcaggatgggggcctcctgcctggggcggggccagcccccgggttgcggccgggacggttttctggtataatagctccgtttttgacagaccggcccggcatgcttctttcctatcataccacgccgggggagactagttcaagatgggaagtgaagccatgtctccgcatgtgatgaaaaaactggccaagcccatgctgttcgcggcagccatcatctggggcacctccttctttgtaatgaagaacgccctggacgtgatcccggtgttctacctgctggcaatccgctttactgcgggcgcggtcctgctggcggcggtctgctggaagaagtgggcgggctttacccgggactatctatggcgtggggcggtgataggggctttcctgttcctggcctattcggtccagacttttggactggaccggaccacaccctccaaaaatgcatttttgacggcggtgtactgcgtgatcgtcccttttctctactgggcagccgcccggcggcgcccggaccggtacaacatcctggccgccctgctctgtgtcaccggagtgggactggtctctctggacggggacctgtctgtcaacgcaggggacgtgctcaccctgatctgcgctttcttttacgctgcccacatcgtggcagtggccaaagtgtccccggagaaggacatctacctgctcaccgtattccagtttgcctttgcggcgctgtatgcctgggcagggggagcgctgttcgagaacttccccgctcaggcgttcctggacccggcggtctgcctgcctatggcctacctgtgcgttatggccaccactgtggccctgctcttccaaaacgtggggcaggtgtggtcggacccggcctccgcgtcggtgatcctctccctggaatcggtgttcggcgtcatcagctcggtcctcttctacggggatctggtcactctccccatggcggtgggctttgcctgcatctttgtggcggtggtgtgctctgagacgaagttctctttcctgaccgccgggaggcagaaagaacgccgctgacgggcggaaagggcttccaacattttcagacgagaaaagaggattgcgcttttgaaaaaaagcgtgtagaatcaaatcaaggataagagggagaagggaacgggccgccccggcggggcgcgcgacaagaagaaggaagtggacctgatgaaaagaaaatggttgtccgcactgctgagcggggccctggcggccgctttgacggccgcgccagtctccgcggcgtcggtatttacaggcgagaccgtggatgagtgggcggtggagcgggtggagtccgccatccgactggagctgatgccggagtgcctggagggacaggacctgagggcggagatgacacgggcggaatttgctgccctgaccgtgaagctgtatgaggctatgagcgggaagctggcggaggtgccgaagcagaatcccttccgggacacccaggacccggaggtgctgaaggcctatgggctggggttcgtgacggggctgacggaggacactttcggcggcgaggagccggtgacccgagaacaggcggcggtgatgctgactgcggtgtaccagtatcggaacgaggacaacagaaaggcattcctgctgtgggtggcgctgtacggcagggacaacgacctgaacgatgactccaacctcacggagcagcaggcgtcgaatatgctggccggtatctaccataagctggatactgtcatcagctcggtgggggccaaggagttcgcggacgacggcgagatctctgactgggcgaagaacagcgtctattttatggagaagaacgggatcatcaccggcgtaggcggggaccggttcgatccccaggcggatatccaggcccaggccgccctggtcatgtcggtccagatgctccaaaagctggggtgagtgggacccccagaaaaaaggcagcaaaaagagaggcgctcggcgcctctctttttgctgcctgccgggccagtggtcaggaggaccggcgaagcgatttactggacctggtactggatcacatgccagtaggaggcgtattccccctggcccagatcgcggacaaaccgcagcgccaccttcagggaatcgccctgaaagtcctgggcagtgtcgatcttgatgtagacctggtttccgtccagggtattttcattataaagggagttgtttacattggggccgccgccattggccagggagacggtggcggggcggaggagaggtgtctcgctggcttcgtgtgtcagctggatgtcagtgacgcttccctccaaaacagcccactccacatcccactcctgatcaaaggcgtcccagtcatcgccatagccgccggtgtagccttggacagtaacagcgacggagtcacccgcctgaatggtgacaacaggggtgtcctgtgtggcatcatcataggaggtggcggtctcgtccccgatacggaccttgctcagccaggtcttcccagtgccgccctctccctggaccagagcgttggcaccggccatcacctggtcccaggtggcgttgtcggcgggctcggtccaggaggaatagggattggcctcagcccagccctccacagaggaaaggacctgaacgccggcccagtcatagtccgcaggagtcccctctgtggtgacagtgggggaggcggtgcaggggacgcctttgacctgatcgaagagccactccatgtaggaggtagggaccgaatcagagaacatgtccgatttgcagtggcctccctgctggatctccaggacaagattggtcatgcccagactggtcagggtattgaaggcgcggtaggcctcgttcaccgggatgtaggggtcctcatagccgtgccagatgtagacattgacgccagaatccgcaatggcctgcatgtcgcactgatttccccaggtggtgtggacggtagtgccggcgttgatgagaatggcagccagcagctcgggctggacggaggccagctcatagctccagcctgcgccttgcgagtggccggtagcgtagattcgatccatgtccacattgccgtagctttccgcaatggtccggatgatctcaccgaactgatagatataggccagctccgcctcatagttgacgcaggcctcataggggacggtgatattcaggacataacaggggtgctctgcctgaaatgcgtcggaggcaaaggcggagccgcgggaagcgtagccattgttggcgaaggaattggtgctgcccagcccgcccagggtagccacgagagggtagtcctctccctcctgaatatgttccgggacgtacaggcggaaacggagcaggcccaggccatcgccggcggtgcccacggtgtctatggcggggtcgatctggaatgtccaagtgtaccagtcaaaaccggactggagagcggtctcaccggcagcaaaggaggcgcggttttctgtgtccaccgagagggcaggataagcttggcggtccagcgatgcggtgcgggcggccccgtcccagctcacttggtacccgaaagtctgagccagatggtagagggggatatagagctggccgttctgaagggcagctgtggtatcccctgccgcggtaccggcgctataggtctgagaacggccgcacagcgagaaggcagcgctgtcgccgtcagctgtgcagtctaggcccagcgcctctgcgatggtgacagggaccatggtgcgggagtctgcgttgatgtaggcggaggtatccaccgtgcctccatctacctgcacagagggagctgaggcggcgctggcggggagcaccatgccggcagagagcgcggcggtcagagacagtgcggcaagcttgcggaagagcttcatgttttttctccttcctttcctgatttgagatgctgatcccctatggaaggctgtggtccagtcaaagagatgcatgtatctggtgctttgatcctatcacgaaagaaaaacgaggtcaaggacaggatattgcattttggtgtgttattttatgaaaaagggcgcggcataaaaaattccgtccgcgtttgccgcggacggaaagcgaagaggggacggtcagccgcccagataggcttttttcactgcctcgtcctccagcagctcctcgccggagccggtggtgacgatcttgcctgtctccagcacatagccccggtgggccacagacagggccatctgggcattctgctccaccaggaggatagtggtgccgtgctggttcagctcctggatgatgtcgaagatctgctccaccaggatgggggccagacccatggagggctcgtccagcatcagcaggcggggcttggacatcagggcgcggcccatggccagcatctgctgttcgccgccggacagggtgcccgccacctgtcggcggcgctccttcagccgggggaagcgctggtacacatccgcgatgccgtcatcaaactcagaagaggggcgggtgaaggctcccatctccaggttttcctccacagacatctggaggaagatctgccggccctccggcaccagagccaggcccttggtgatgatcttatgggccggggtgccccccaggcgctggcccaggaactcgatggagccggtatgggaggtgagcagacctgcgatggtcttcaggatggtggactttccggcaccgttggcgccgatgagggtgactacctccccctcatttacctgaaaggagacgtctttgatggcatggatggcgccgtaatagacgttgatgccctctaccttcagcatggcgtccatatcaggcccctcctttctttttctgactgcccagataggcctcgatgacctttggattggcctggatgtcctccgcggtgcccttggcgatgatctgtccgaagttgaggacacagatgccctcgcagatgcccatgaccaggttcatgtcgtgctcgatgagcataacggcgatctggaaggtgtcccggatcttgacgatgttctccatcagctcggcggtctcggaggggttcatgccggcggcgggctcgtccagcagaagcagggaggggttggtggccagggcccggacgatctccaggcggcgctgtgcgccgtaaggcagggagccggcctggtggtgggccaggtcctgcatgtcgaagatggagagcagctccatagcgctctctcgggccagcttctcctgcttccagaacttggggaggcggagcacgccgtcccacatggggtagcggatctggttgtgcaggccgatcttcacgttgtcctccacactcaggttggaaaacaggcggatgttctggaaggtgcgggcgatgccggcccggttgacttgggcagtgctcatgccgtgggtgtccttgccattgagcaggatggtgccccgggtgggctgatacaccttggtgagcaggttgaacaccgtggtcttgcccgcgccgttggggccgataaggccggcaatctctgtgcggccgatggtgaggttgaactcattgacagcggtcaggccgccgaagtcgatgcccaggtgctggcactccagaacggggagcttgttcacatcccgctcaggaacgatggagtggctggggacggggaccatcttgcctttcttaaattccttagccattctgagcgcctcctttctcggtgccgcggcccaatatcttccggcgcagggaggagaaaaactccttggagcgctcgttgttggtggccagcatgaccaagatgagcacgatggcgtagatcagcatccggtagtcatagaaatcacgcagcagctcgggcaggacatagagcagggcggcagcaatgaccgagccccggatgttgcccagtccacccagcaccacgtagaccaggatcaggatagaggtattgaagtcaaacttcttggcggcgatggaggagtagttcatggcatagagggcgccggcggctccagccagcacggcggaggtgacaaaggccatcagcttgtatttggtggcgctgatgcccacgctctcggcggcgatgcggttgtcccgcagggccatgatggcccggccggaacggctgttcaccaggttgaggaccacgatgagggctaccatcaccagcagaaagcctgcggtgaaggaggagagcttcacgttggccgtgactcccatgggtcccttcaggatggccttgccggtctcagacaggttgagggccgcctcactggaggtggagaagtggaggccgttctcgtctacgcccacatagaggatgttgataatgttcttgatgatctcgccgaaagccagggtgacgatggccagatagtcgccccgcaggcgcaggacggggacgcccacgatgacgccggcgatgccggcaaagaaggcgccgatgagcatggagaccagcaggcgcagggggcccatggggatcagctcctggagggagatggaggccaccacgccggagaaagcacccacgctcataaagccggcgtggcccaggctcagctcgccggagatgcccaccaccaggttcagtgccacggccatggtgacataggcacagatggggaccaactgcccctgaagggagggggagagcatcccgccggcattgagaagctgaaggatcacaaaggcggcagcaacgatacagtaggtgaggagattgccgaaaaggcgcttgcggcggagggaacgtgttttcatatcggtcacctcacactttctcgggcacatacttgcccagcagtccggagggcttgaccagcagcaccacgatcaggacggcaaagaccaccgcgtcggagatgttggtgttgaaggccttggcaaagatctcgatgatgcccagcaggatgccgcccagcatggccccagggatggagccgatgccgccgaagacggcggcggtaaaggctttgatgccgggcagggcgccggtggtgggcatgagggaggggtaggtggagcagagcagcacaccggcgatggctgccagggcggagccgatggcaaaggtcatggagatggtgctgttcacgttgatacccatgagctgggcagccgccttgtcttccgaacaggcccgcatggccttgcccatgcgggtatgtccggtgaaccaggtgagccccagcataatgacgatgcaggcggccaccgtcaccagggccacgtgggtgatggtgagctggccgtccagcagtttgatagagccggtgcccactacggaggagaaggacttgggattggaggtccagagcagcagagcgctgttctggaggaaatagctcacgccgatagcggtgatgagcacggccagggagggcgcctggcgcagcggcttataggccagccgttcgatgaccatgcccaggacggtgcacactaccatggccagcagcacgccggccagagcagggaccacggcgccggccagagagccctcctcaaagctgccggacaggccgctcatggtgaaaaaacagatatatgcccccaccataatgacgtctccgtgggcaaagttcaacattttggcaataccgtagaccatcgtatagcccagggcaatgatggcgtacacgctgcccagactgatgccgttgatgagattgttgagaatactcaagaccagtcacctctttttcttttgctgcgcagatgcgcgcgaaaaactggacagcatggcgaaaacctctgcggcaacgtctgccgcagacgttttcgccatgcgtgcaagaataagggacacgggctgccgaggggaccccggcagcccgttccatggatttcccgggaaaaaggggagttcggaaaatcagcgggcgacgtagacgccgtcctgcacctcgaagaccaggggagccttggagatctcaccggtggcggcccaggtcataccggagccagtgagtccgtctacgctgaagtcggaggaggtgaaggtggagatcagggcggcgcagatatcctcgtggctcatgtcggcggtgacaccggccttctggcaggcctcgtagatggcgtagatgcagtcatagccgtcagcggcgaactggttggggatctcattgtagcgcgtctggtactcggagacgaagctggcagtgcgctcgtcagtggcggaggcgttgaagggggtcatcagcagcaggccctccgccagggaggtgtcgaagccctcgatggccaggatgccgtccatgccgtcgccgcccatgaaagtcggctcataacccatgctcttggcctgattcaggatcagggaagcgggggtgtagtaaatgggcatgaacaccagctcagcgcccccgtccttggcggcgttcagctgcacggtgaagtcggtgttggtgtcatcggggaaggtctgctcagccacgacctccaggcccacctcggcggcctgggagatgaagccctgggcgatgccggtggagtaggcgtcgccgttgttgtagatcacagccaccttggtagccaggccattttccgccacatagttggcagcggtgacgccctggtcggggtcagtgaagcacatctggaagacgttatccttaccggcagtgacgtcggtggaggaagcggagggagtcagctgaaagtagcgctcgttgaaggtctcagcagccacggagacgcagggagtggtggtggtgcagccatagacgatctgcatgccgttgcccttcagggcgttgtaggcgttgatggccttctcagcgtcaccctcgtcatcctgaaactccagggagagctggataccgcccagggcgttgatctcgtccaccgcgatctcagccccctgcttggtggcgatgccataggtggcggcggagccagtcagggggccgatgccgccgatcttgattgcaccatccgcgccggcggtgctggaagccggggtggaagcggaggagccgccggaaggggcgctggtggtgccggaagagccgttggagcagccggccagcaggccgacacacatcgcgccggtcagggccatggcaagaaactttttcatcttcataacctcctgtcaaatggaaacagaggcgggtctggagcggcccgcagacctgaataaaataagggaattttcaggtttggagcccattatattggcaggaaggacaactgtcaatggggaaaatacacaaggcggggagcggatgggatggcttcaaatggtgatggggcgaaaaaaaggaagaaaaagaaaaaatttttcaaaaaaagccctgcactttgcggaaaaactgcaaatttgccgtcatggaacagggagaggagagaaagaatataaagtatgttacatttggaacggaaatttctttgaaatctatggcgtctcccaaagctgtgcaaaatgacggaagaaaaaacgaaacatgcaaaaaaataaggcgaaatcgaaaaagcgggctgctctccaaagagagcagcccgcagaacggccagaaaagatattacttcgcagccttggcagccttgatggcatcgatgagcaggggagtgaccttgaacaggtcgccgcagatgccgtagtccgcgacctcgaaaatgggggcggtgtcgttcttattgacggcaatgatgcactcggaatcctgcatgccggccttgtgctggatggcgccggagatgcccagagcaacatagatcttggggtgcacggtcttgccggtctggccgacctggtggtcagcagacatccagccggagtctacaacagcacgggaggcacccacgacgccgccgaggacctcggccagctcctcggccagcttgatgccgccctccacatccttgctgatgccgcggcccacggagacgaccacgtcggcaccgatcaggtccaccagcttcttggcggccttgaccacctccaccacctgggtgtccaggtcgtcggcggacagggcaaagctgggcttaataatctcgcaggcgtcagccttggcctggtcgaaagcggccttcttcattacgccgggacggacggtagccatgcagggacggaagcgggggcagatgatggtcgccatcagatggccgccgaaagcgggacgggtcatcttcaggttggtgtcttccatgtcaaacttgattttgtccacgtccaaggtggagctgttgcgcaggaagtccacataggtgtccatgtcgatgtccaggtgggtgcagtcggcggtcaggccggtgtgcaggcgggccgcgcagcggggacccaggtcacggccgatgttggtggcgccgatcagcagcacctcgggcttgaactcctccaccacgtcgcagatgaccttggtgtaggcgtcggtggtgtactccttcagcagggggtggtcacagacatacacgccgtcagcgccgtagccgcccagctcctgggcgatgccctcgatgccgtcgcccagcagcagaccgtacagcttggtgccgcgctcgtcggccagcttgcggccctcggagatcagctcgtaggaggtggacatcatcttgccctggcgctgctcgcagaagacccatacgccgccggtgaaggcagcgatatcagcactattaaaagtagacatattcttcattctcccttctatcagatgatatgcttggtggccagaatgccggccagcttatcgcaggtggccttgtcggcgccttccagcatcatgccggcacccttctggggaggagtgaaggacttgaagatgttcgtgggggagcccttcaggccgatggtggtggggtcgatgaggggatcatccttcagggtctcatagccaaagacctcatagggcttgctgtagcactcaaagatgccgggcacgctcatgtagcggggggtgttcagctccttgatgcaggtgatcaggcagggggtgttgaccttgatggtcatgtagccgtcctccagcatccgcttgatggtgagggtctcgccctccttctggatgtcggcggcgtaggagacctgggggatgcccagcttctcggcaatctggggaccgacctgagcggtgtcgccgtcgatggcctgacggccgcagaagaccacgtcgtcgtcctccaggccgatcttcttgatggcagcggccaggatctgggaggtggcgtaggtatcggaaccgccgaactcgcgggcggagaccagtaccgcgcggtcagcgccgcgggccaggatctcacgcagcatgccctctgcgggaggggggcccatggagatcacgaccacttcagcgccggtctgatccttcagagccagagcggcctcaacggcgttcaggtcgtcggggttggtgatggtggccatggaggcacgattcagggtaccatcgggattgaccgccaccttaccggaggtgtcggggacctgcttgacacaaacaatgattttcatttcgaaactgcctcctatcttatttcacgcccaggtgattggcaatgaccatccgctggacctcggaagtgccctcatagatctcggtgatcttggcatcgcgcatcatgcgctccacggggtactcacgggtgtagccgtagccgccgaacagctggacggcgcggcgggtcacatcgctggcagcctcggcggcgaacagcttggccatggctgcgtccatggagtagggctcgtggttctgcttcttcatggcagcggagtagaccagatactgggcggcctgcatgcgggtgtgcatgtcagccagctggaactgggtgttctggaactgggagatgcggcggccgaactggacgcgctccttggtgtacttgacggcctcatccacggcgccctcgcccaggccaagggcctgcgcagcgatgccgatgcggccgccgtccagggtcatcatggcgatcttaaagccctggccctccttgcccagaaggttctccttgggaacgatgcagtcctcaaagatcaggtcgcaggtggaggagccgcggatgcccatcttcttctcgtgcttgccggtggagaagccggggaaatccttctccacgatgaaagcggagatgccgtggttgcccttgctcttgtcggtcatggcaaagaccacgaaggtatcggccacgttgccgttggtgatgaagcacttggagccgttcaggacgtagtggtcgccctccagcacggccatggtctgctggccggaggcgtcggtgccggcattgggctcagtcaggccgaaggcaccgatcttcttgccggagagcaggtcaggcagatacttcatcttctgctcctcggtgccgtgctcaaagatgggggcgcagcacagggaggtgtgggcggacacgatgacggcggtggtgccgcacaccttggccaactcctccacacacatggcataggacagcacatcgccgccggcgccgccatactgcttggggaagtagatgcccatcatgcccagcttggccatcttctccacggtctccatggggaagcgctcctcctcgtccaactcctcggcgaggggcttgacctcagtttccgcgaattcgcggtacatcttgcggatcatctcttgctctttcgacagatgaaaatccattttttcgtcctcctaattttatttacttggaacaatcatggaagccctgttccgactgcgctgcccggcagccaccgtgcgcgatgtcccggagcagcagggccggaccacctagacaggacatgcaagcaagacggtgatctgaggtccgccgttttttcctcagatctccgcctcccatgggggctcagccggggcgctccgccttctttcgttagatttttaacaaaagaagaccagaaaaagcgcaacgacggatagggacccgttgttgcggcgccaatcaggctgcgatagataacttcctgtccctcaaattatatcgtttttcccatatgggcgcaagaaaaacaaatacggtaaaatgtacagtttttgcgacaaaattttgggcaaaatgatgatatttgcggatattgcttgaaagtatgcttttcttgaccttcaaaaaagaaaaaaagtaaaaaggataagaaagaattattaatttgaacaagaaagaagggattccaatacagaagtggtaaagtttttaattttgcaaatcgatatgtgacatatatctccattgctctgggccttgtgtgcctgggggtctcctcaacgccgatggggaggcagtatgacagcctgagaggggccccgggggcggtggaccagctcctgatgctggccgggatggcgctgctggacgccgcgtggaggctggagcacagcgggtacaagaagaacaaaggaaaatagaaaaacgccggggaggaaagctttccttcccgacgtttttgtcagcaggccgcttacttggagtaatcgtagaaacccttgccggtcttacggcccagcaggcctccacggaccatcttccgcagcagcagggcggcacggtacttggggtcgtgggtctcggcatacagggtatccatgatggccaggcagacgtccaggcccaccaggtcgcccagggccagggggcccatggggtggttggcacccagcttcatggcagtgtcgataccctcgggggtagccacgccggtctccaccagaccgatggcctcgttgatcatggggatcaggatcttgttgaccacgaagccgggggcttcagctacctccacggcctccttgccgatgtcggcggacagctggcagatggcgtcataggtctcctgggaggtgtggacgccccggatgacctccaccagcttcatcacagtagcgggattgaagaagtgcatcccgatgaagcggtcggcccgctgggtggcggcggcgatggcggtgatggagatggaggaggtgttggtggcaaagatggtgtctgccttgcagatgccgtccagctcctggaacaggctcttcttcacgtccaggttctccacgatggcctccagcaccaggtcggcgtcagctgcggcggccaggtcagtggtgaaggtcatgttgcccaggatctcggccctcttggcctcgtccatcttgcctctggccaccagcttatccagcgcggccaccagccggctgtgagacttctccgccagctcatcgctgatctcccggaccacgacggcatggccgctgcgagcaaaggtgtgggcgatgtccaggcccatggtgccgccgcctacaactacgatttttttcatgacatctcgatctccttgtctttcagaagtgatattgggaaagcgccctgccgctggggcggcggaacggattcagcggtttttgaaggtggtgatcttctccttgttcaggaaggcgtgcatggcgtccttctggtcctcagtggaaaagcacaggccgaaggcctctgactcaaaggcgatggcggagttgatgtcgatctgtttgccgatgcggatggcctgcttggcctggcggactgccacctgggggcgggaggcgatcaggtcggccagctccagagccttgtccagcatcacgtcggcagggtagacatgcttgaccaaaccgatctgaagggcctcttgggcgtcgatggtgcggctggtgagcaccagctccatggcggtggacatgcctacgatgcgctgaaggcgctgggtgccgccgaaaccgggagtgatgcccagcccaacctcaggcatgccgaaggttgccttttcactggctacccgaatgtcgcaggacatggccagctcacagccgccgcccagggcgaagccgttgactgcggcgatcaccgggctggggaagcgggtgatgtgcatcatggtattgtttccatgatggctgaagcgcttggcgtcgtcggcggtatagttgaccatctcgccgatgtcggcaccggccacgaaggagcgtccggcgccggtgataacgatgacgtggacatcctcctgggattctgcgcgcagcaggatatcgtccagctgttcgatgacctccaggttcagggcgttcaggacttccgggcggttgatggtgatgaggcccacgtggccgcgttgctcaaattctacaaaagccataggggtatcctcctttttacagtgtctcattcttcttccagaaaatcacggggataaagggggcgggatctctttcttaatcgtactataaacgatttcccgggcggaagcaaggcgtctggtgacaaaggtaaagatacgccagtttttggtcaattcaggcatgattctcccctggaacgagagaaatatgtgaaaaagataacgaatttcttgcaggaatggcggggcggcggcgtgaatacagtgaagggaggaccgcccgctggggcggggaggagggactggatttgctgcgtcacgatgaatggtccgctggaagcagcgccctgtttctgaccgccttggcggcggtatcacaggggctgtcgttctgttaccgggtggccctgtcccggctggtgggggcggaggtgatggggctgtatcagctgctgatgccggtgtgctcggtactgctgtccctcaccgctgtggggctgaccgcagccatgtccaacctcagctcccagtatctggccctgggaaacggaaagggagtggcgcagaccaggcggatgtgcctcaccgccctgggagtggggctcctgccggtatcggcggcagtggtggccttctatgaccccatctcggtctatctgctgggggatgcccggacccagctggggctgatcctgctgctgccctgcgtggctctcaccggggtggagaacatccacaagcactttttctatgggaccggagtggtccgcccgcctgctgtcgtggagctgatggagcagttcatccgggcggcggcggtgctggggctgctggtgctgtttctgccccagaacccagagcggacggtggggctgatcgtcaccggcatggtgatttgtgagatcttttccgccgtggcgctgacagtgctctaccgccggcggatggcgcggatcggccggacggggccgggggagcggggcgggactctggcccggcgggtgacctccatcgccgtccctgtgggggccaccgccctgctgggtaatctgatgtcggcggtgaacgccgcccttatcccacagaagcttgtggagagcggcatggaccgggcggcggccatgtcggagttcggcgtggtgtgcgggatgaccctgcccatgctggccctgcccactgtctttctgggggcgctgaatctggtgctggtccccaggctggcctactccacggcactgaaccgcccggaagaggtgaggcggcgggccgggcgggccatgctggcggtgtcggtgctcattcttccctccatggcgctgatggtggtgcttgggccggacctggcccggatgatgttcggccagccctcggcgggggaacacctgctccccctggcggcggccatggcgctgagctgctaccagtccacccttgggggtgtgctcaacggcgtgggacggccggggagccacgccatggcggacctgatctgtgacggcatacagctggccttcaccttcaccgtgggcctcccgggggtgggcatccgcggcttcgtggcggggactctggtctcagcagcggcgggggccctgctcaacggctggctggtggtgcgttacaccgggctgcggcccagcctgttccggtgggtcaccgcgccggggctggccgcactgctggcggccctgacctccaacctcctctttcggtggctgaaggacagcggcgtctccctgctggcaggcggggcggccagcctactcttcggcggagtgctgtatctggccgccctgagcgcccagggagtctatctcagccaggtgttccggctgcggaaatagggcggccgctccagaaagggccccaaacccctcccggagaactcactttagcctttttccatcctggaaagcgcggcccaccttctctcccagggccagatagtcgtgattgaccgggtcgaaggagatggggcgcagcttggcgggatcgatcttcccatcttcccccaggatgtactcctcggcgctgacgttgatgatctcccccaggagcagctccgtctcctcgtcaaagctgaggaaccggcactccagcgccattggcagttcgtcaatgaggggggcgtccacaaactggcttctggtggtgtggaggccggctcgggccagcttgtcaggcacctggttggcggacacgatacccacatagtcacactccaccacatggtcctcgtccgccatgcttacagtgaaagcctttcgggacagaatgttctgtacggtcttgtgtcccgcgcttagatacatagcgacacggttgctgtcgctgatcccgccccaggcggcgttcatggcatctggggtcccgtcctctccataggtggcgatgatcagcaccggctggggatagaggtagggcttggggccaaagtttttccgcatgatggattcctcccattatattaagatcggggatgctgtgataatactaggataacacgaaacagcggcggaggacagagggagaaaaagaaaaaacgggccccggggcattttgccctggggcccgttgacttctgttttgggaaaagcttacttcagctcgaccttggcgccggcctcttccagcttcttcttcagctcctcggcctcatccttggagacagcctccttcagagtcttgggagcgccctcgaccatagccttggcctcagccaggcccaggccggtgatctcacggacagccttgatgaccttgatcttagcggcggcgtcaaagctggccaggaccacgtcaaactcggtcttctcctcagcagcgggagcggcagcgccggcaccggcagcgggagcggccatagcggcggcggaaacgccgaactcgtcctccagggcatgcaccagctcggacagctccagaacggtcaggcccttgacttcctcaatcagagcggtaatcttctcgctagccataatgaatgtacctcctaaaagttgttttcagtcaaaatgttatgggtgccgatacttactcggcgggggcggcctcgggctcggcagcggcctctacgaagccgcccttctcctcggcaatggccttcaggacgatggccaggctggtgatgggggccagcatggtgcccaggacctgggcctgcaggacctccttggagggcagctcggccatggcgttgatctcatccaggggaaggatcttgccgtccatgaagccggccttgatgacgaacttggcgccgttgaactgcttggcgaacttgttgatgacgcgcatgggagcgatggggtcctcgtggctgatggcgagagaagtagtgccattcagggagtcggacagatcgcccaggccggcattctgagcagcaaagcgggtgagggtgttcttgacgacagcgtactccacgttgttcttgcggagctcgttgcgcagagcggtatcctcagccacggtgatgcccttgtaatccaccagcacaccgctggcggcgttctgcagcttttcggtcagttcagccacaatggctttcttctgttccagaacagatgcgttaggcattttgggttcacctccagagaatagtgggaaacgcgaaaaaacgctgttttccgcgcccaaagcgtgaaaacagcgtaaaaacacaatatggatcatgtttctggctgcatcctcggcaggacttccgcttgcgccgcctgctgtctttgaacgcagatgatagtatatccgaaaaaggaggaaaagtcaaggacttttccgaaaatttaaaaaatctgatgcacagggaagaaagcctcccccgcagtccccgggaaactgcgggggagggcaatcagatgatcacatcagcttcgcgccgttgactttgacaccggggcccatggtggaagccaccacgcagctcttgatgtactggcccttggcagcggcgggcttggcctttacgatagcgcccatgatggcgttgaagttctcggagagcttctcagcgccgaaggacaccttgccgatggggcagtggatgatattggtcttgtccaggcggtactccaccttaccggccttgatctcgttgacggccttggtcacatccatggtgacagtgccggccttgggagagggcatcaggcccttgggacccagcaccttacccagacggcccaccacgcccatcatgtcgggggtggcgaccaccacgtcgaagtcgaaccagttttccttctggatcttctccaccaggtccatctcgcccacatagtcggcgccggcggccttggcctcgtccgccttggcggccttggcgaagaccagcacgcgctgggtcttgccggtgccgtggggcagcacgatggcgccgcggacctgctggtcggcgtgacgggagtcaacgcccagcttcacatggagctcgacggtctcgtcgaacttggcgggagcggtcttgacgatcagctccatggcctcattggtatcgtacagagcagcgcggtcgatctgcttggcgctctcctgatatttcttgcctctaaacattgttcacaccctccttactcgcccacgacgacgcccatggagcgggcagtaccggcgatcatgctcatagcggcctcgatgctggcggcattcaggtcgggcatcttggtctcagcgatcttgcgcacgtcttccttgctgatggtagcgaccttggtcttgttgggcacaccggagccggactcgatgctgcaggccttcttgatgagcacggcggcggggggggtcttggtgatgaaagtgaaggaacggtcagcgtagacggtgatgatgacggggatgatcatgcccacgtcgttcttggtccgctcattgaattccttggtgaaagcggcgatgttcacgccatgctggcccagagcggggccaacagggggggccggcgtcgccttgccggcggggatctgaagttttacgtatccagttactttctgtgccacgaaagagcacctccatatgaaaaatgtggttggatatggaccagctcaggccgtgcccggcgggtccaactggcgggacggaccgttccgtccctcccacgggccgcgtctgcacgcggcaggattgtgtttcgatgggtcaggctttaacaggctccacctggtccagctccagctccacgggggtctcccgtccaaacatggacaccaccacacggaccttgctgcggtccaggtcgatctcctccactgtgcccaggaaggactccagggcgccatcggtgatcttgacgctgtctcccacctcgtagcccaccacgatctcgcgcttctccacgcccagggcggcgatgtcactctcagacagggggatgggcttgttgccggagcccaggaagccggtgacgccgcgaatgttgcgcacgatgtgccagcactcgtcggtcatgaccatcttcaccagcacatagccggggaagaccttgcgctccacctctttgggcccgttgtctgtgatctcggtgacggtctccagggggatgctgatctcgtggatcagatcctgaagaccgcggttttccacgtacttctcaatggtggccttcaccgtattttcgtatccggaataggtgtggaccacataccactgcgcgccgtcagacatattcgccacctatcagcggaacaggccgagcaggaactcgatcaaagcgccggccaccgcgtcaaagagccagatgaagatgcccaccacgatgacgcagaggatgacgatcccggtgttgttcatcgtctgcttgaagctgggccactggaccttcttcagctcgctcttcatgtccttgagccacttgccgatgcgggcgaaaatactgggcttcttctgcttttcaggcttcttgtccttcttcgccttgtcggccttttcggaagcggaggcagagccctggccctgctccatcttttcgttttcagacattcagttacccttctttcctttcagccatctggagacgcattacttcgtctcgttgtggacggtatgctttctgcagaaggggcagtacttgttcagctccagacggtcgggggtattcttcttgtttttcatggtgttgtagtttctctgcttgcactcagagcaccgcagggtgatcttgatgcgagcaccggccttgcttgccatatgttcggcacctcctttaagtattgcggagaacggccggtccgggccgccccgctgatgtgagccaacagcaaaaaaagctggatcaggctctgaaagccgaatccagccatacgagacacagcagggctgtgtctgacatgctcacggtgggatccggcgattgcctccctgtgtcccgagagatgggggaggggtgcctgcgcatacaccgtaaaaatgcgcagaacaaaaaagccccttttcacaggtagtgtcactataacacaaggaaagcgcggcgtcaagaggaaattgggcggacagggttgtttttttgcggggagtgcggtatagtacagttgacaaaaaaacgcggagcgggagaggggggagtttatgcggatcatggccatcgactacggcgatgcccataccggcatcgccatttccgaccctaccggcttcctcaccgggactaccacgactatccacagcagaaaggcggaggaagtggcaggagagatcgcccggctggtccaggagcacggtgtggaggagctggtgatggggtatccccggaacatggacggcaccgagggtccccgggcggagctgtaccgggacttcgcagccctggtggaggacaccgcggggctccggcccgtgctctgggacgaacggcggaccaccgtggacgcccaccgtatcctgtttgaggcgggaaaaaacgccagaaagcgaaaaaagacggtggatgcggtggcggcctccctgattttggagggatatctggatcacagaaggctgcggggctgaggaggcctctcagccccctatattatggacagaagaaaggagaatgattccatggcatttattctcaacgtgacctataccatgaagcccgggctgcgggcggagttcctgcgggaggtgtccgagcacggcatccagaaggcggtgctggcagaggagggatgcctccagtaccagtattttgaggctgtggacgaaccagacaagctgctgctggtggagcggtggaccgaacgaaaggcccaggaggtccatatgactcagccccatatggtccccctgaaggagatcaaggagcgctgcgtggcagacagcttggtggagaaatttgatgcctgacccgcggtaatgacgcagggagaaagacaaggaggaacagaaaatggagatgcaacgcgtgtgggcggtctatttcagcggtaccgggaccacggaaaaagtagtgacccggatggcgaagatcgcggcggaggatctgggggcggagtataagaccttctgcttcaacctgcctaaggaccgggagggggagctgtccttcgggccgggggatctggtgattttcggcaccccggtgtatgccgggcgggtgcccaatctgctgctgccctatatccgggacaaggtgaagggaaacggggccctggctgtgccggtgtctctgttcggcaaccggaattttgacgacgggctgatcgaactgcgcaacgtgctggaggcggacggctttcacaccgtggcgggcggcgctttcgtgggggagcactctttctccaggaccctgggggcgggccggcccgacgcccaggatatggcactggtagaggagctggctcacaagacggcggagaaggtgaaaggtctggagcgggccccagagatccccgcctatgtggcgggctgtgaccccatccgtccctactatacccccagggaccgccacggggagcccatcaaggactttttgaaggccaagccggtgactgactcggacaagtgcgtcaagtgcggcctgtgtgcccgtctctgccccatggcagccatcgaccccaacgacgtgtccagtgtggtggggaagtgcatcaagtgctgtgcctgcgtgaagaagtgccccaagggcgccaagtactttgaccacgagggctatctgtaccatcagcacgagctggaggagctctatgcccggcgggcggacagcgagatctttattgagatgtgacgacagcagaggagagcagaagagtgccatgctggacaagtgtgtgagtcatgctgcacagcctgcaaaaaaggcttcacagagtttgacatgtgcaggtacaaaaaatcaagtctattcggaaagtgacagcaccactttttcgacaaatcagggccggcggagcaatgctccgccggccttcctcagagatacaagaataaaaagaaataacccctgactgttgcaccctcggttcactcacagtcaggggttatttctgtccattcttgttatctaacatcaattgtttacctctctttctacagattcgcgcgaccacgttttttgctctttagcagtctccggaacactgttgcacaaccagtttcattttgcacccaacgcttcggtgctccctcatacatgaggcattgtctgttggaacgttccttttcgcttgctgagatgctttttctgtggcaacgcgtggggctcagatgtcgtgcgcgcgcttcgctgagatgctgttcttttgctgaccactgccggcatggacttcatcgcctggaaccgcttacatcaggaaaagatttgatgcatgttacgcatccccttgtctgggggagtgacatctgatcaatcagacttcttaaaacattggactcatcctttctggctataatgtaccacaaagacaggcggatgtcaagaggttttgtggaaaaaatataaaatttttcaaaaaggatgcggcccccgggggctgtcccaggggccgcgggtatcagcgggaggcatccggggctgggtcgccacggagggagagaaagtaatcgtagtagggcttgaggaagcggaagctctcctccgcctccccagccagctcgggggtgaacagggagccctcgcagttgcggtcccaggtcagggcgatgtttttccggttgtaccagggaaagagcagggggccggggtcccctttggggcgtttgtacatctcgccctccagcacaaatcggtgctgccggctgagccggcgggccagcttctccataggggccgggtcccggtcgatgcgggagcggaacttggccatggtgacgggctcggcgccgtaatagcccatccccaggctgtgatactccggcgcgatctcaaaatagaaggcggggacatgggtccacccctcctgctcgggccggatggtgaaccacaggtggtccttgtaggggccgcggccgtggagccgccgtgcatcccggtagatgcgggagacatgaaggttcagctgctcctttggataggcggcggtcatggcggcatggacctggcggcccagctcctggaggggggcgatgaccagatccagatactcctgcttgtgggcctcgaaccagctgcgctcattgttgaatcggacgccccacagaaaatccacggcgccctgagaaaaaccttgaaacataggaaacggacctcttctgtatggtaagatatgtgctcaatagccgggcggaagcttcccggcggggatctcatacccgtagtggtcctcctccggggaggactgagcggggccgtcagccgccccgtcccctgtgtcgggcgcggggatatcctccgtgggagcggaggagctgctgccggactccccggcagacgtctcgctgtcagttcctgtgccggcggcaggctcaccgccggtgcctcccccggactctgttccggtctgcgtcccagtgctggtgccggccccggtctctgccccggttccgggctgggcgccgggcttgggggggaccccgtctacccaggtggagggatcgccgtcagcgggattgtagaggatggtggtggggcgcatcttataggtgctgacccccagatcctgcttctccaccaaggtgccgtccttctcatagatgacacgccaggcgcgggcagagcggccggtgtaggcgttctgcttggcatccaccttagtggtgccctgtgggatggactcgtcggcccggtactgggtggtgggggatacaaagtcgaactgggtgcgctccggcacggcgtaccggccgtccacattggtgccgtagagcttgacagtgaggtagcgcaggccgttcttgtcgtagctctcagtgacgatcttcaccgggtagtcggtgttgtttttgaagcggaagtcggacaggccgaagtagacggtggcgtccatgccgtcagggacgtagcccacggagtacatgtgggcgtggcgctccacgatctccaaggtggtgtggaggacggcgtagtagatggtggaggaggtctggcagatgccgccgccggtctcgtccacggaggcgccgccggagtagacgggagcggggagatagcccttgtcggcggaacggcttccggtggtgttgttgtaggagaattcctcgccgggcatcaggatcacgccgttgcaggcctcagcggacagcttcacgttgaacttccggttggaggagccgctcacctggctggtaccctgccccagcaggtcggcaaagagccggtcggccagtatctcctgggtgatgtcgggctgagtgacggtgagggggacctccacggtctctccctcctgggcctgctggaacaggcgctgggcctgggcggtgtcaaagtccacccccacggtgtggggcagcacctcgcaggtatccggatcgatggctgcgttggccgcctcagcgtacagctccccgtggatggcctggaagtccggctcctgaggagcggaatccaggatggggagctggaccgtgtccgcctgaccctgggccaggagttgagcgtaggcagacttcaccgcctcctccgctccctggcggtccaccgagcggtgggtgtgcccctttaccagggtcagggtgcccgcctccaagtctgcggtgtagccatcctcgctgccgccgctgcccagggcactgtcagcggcctggagctggcgctccagctctgtacggcccgcctctgtcagttggacctgatcggcaccaaggtcctgggcagcgccgaacaggtggcgcaggtactgggcccccccggtgaagaagctgccgcgtcccacagacagggacgcctgggccagggaggcggcgtccacctgaaaggatgagccgtccagcgtaccgatatagccgtcgcagctcaggtccacggcccagccggagccagcctgctgggcgacggaaagattctcgttgatggcctgctccgcctcagcctgggtcatgccggacaggtccagtccggcggcggtgacgttgggcaggatgatgtccgaggcgctgacccagccgcacaggcccaggtaggcggcaaggaggacagccaggatggcggccgggacccagacggctgggccgggctttccgccgctttttttctgtacacgtgctccgtccatgaaaactccccttcctgtcccactcagcccaagaacccacggacaggtcaaataatttcagactatattatagcatcctacgtttcagaatgtaattacagaacagttacagttgaccgtccaaatttccccggatttcctcaattttgaaaaatatttttaggaggtttacttttcaccttcccggcagtatgatagaatggtgtatgtggaagagagagggccagacccagaagagaaattttcaaggaattttaagaaaaaatcaatgttgttttgggatgggtctggtattctatacagcagaacaccaggggaggcagaatgatggcatattacggagatcagggaaatgagaactacggcggaaaatgggagccccgcaggagctctggcggagggatgagtgacctgccgtactggatcttggcgctggtctttctgtttgccttcccgccggtgggcgtgctgatgatcgctctgaggctcttcggcggcgggaagcgccgcgtggcccgggggcgccatccctattatatgcagcgggatgggcaggcccccgtgggggcccggaccactgtcagtgagccggcacggagccaggaaaagaccggtcggagggagaaaaagcgccaggaagggaaagcggaacaggatatgtccccggtgtgcctggacgtagtggagaagatggccaagcggggccggaggctgatccaggtgggcgggatcattacggcggtcttcgccttcacggtgctggcctgcctgggtgatgcgtcctactggctcctccacggcgacgcgatctggttctgggaccagctgctgaacgccatccccctgctctgcttcctgggcggcggtgccggcgtgctgtgggccggcctgcggaaaaagaagcaggtgcgcacctaccggaactatctggccatgatcggccgccgccagaccatctccatctcgacgctggcgtccgccaccggtgcctccccggccaaggtgcgggactgcctggaggatatgctggatgacgggctgtttcccctgggtttcctggactacggcggggaccggctggtcctctccggtgaggggctgaacgacccggccccggcgcaggaggaaaagacggaggagaagaaggctgccccggtggacgaggagaacgcggtgctggccgagatccgggcggtgaacgactccatcgaagacgcggccctctcggcgcagatcgaccgcatcggggtcatcaccgccaagattttcgagtatcagaagagccacccggaaaggtctgcccagctccatgcctttctgagctattacctgcccacaaccctgaagatcctccgggcctatgcccagctggagtcccagggcgtagagggggagaacattgccgccgccatgagccggatcgaggggatgatgggcaaggtggtggaaggcttcgagaagcagctggatcagctctttcagggggatgctatggacatcaccaccgacgtggcggttctggagcagatgctccagaaggatggactgtcctcctccggcgggatgcagattggaatttgactgattcaaaggccgcggggatcttccccgcggccttcacgtttcttcttttacccgaccgaacagctcggacaggccgatgaggatgagaaagcccccaaagagctttcggagcaggtccacgtccagggctgtggcggcccatgaggccagcgcggcgcagagcaggccggcggagatggcagggaacagaagccccttttccacatatccgtttttcaggtgggcgggcagggcggtgagtccggcggggagaaagtacagcagattgatgccctgagccaggtgctggtccagtccggccagggtggtcatatagaccagcagaagggtgccgccccccacgccgaagccggacaggaccccggtagccgcccccaccagcagggggatcagccagccgctcacaacagacacctcaggccgccccagatgagcagggccccgaagccccgcttcagccacgggagccggacgcccttgaacagccgtcctccggcccagccgcccacagtgccgccgatgagatagggcagggcggcggagagatccagtccgccccggaggagatagacggctgccgacagggcgcacaggggcaggatgaccgccactgaggtggcaaaggcccgccgctgatccagtccgcacacccgggtgagcatggggaccagcaccgaaccgccgcccccgccgaaaaagccgttggtcagcccggctgccgccccggcaagcacggacttccaggtagatctatgcttcaaaaaaacgcccccttgccggtctagtgtgccaggcaggggggcgttttatccattttgcctgccgggggagcgggatctcagtcggccagcttatccagcagggcggccagctcctccagcttgggggcggggtccccgctgtccacggcctcccgcacgcagcagttcatgtgtgccttcagtaccaggcggttggcttttttcagaatggactgggtggccatcaattggttggagacgtccagacagtaccggtcctcctccaccatcttcaggataccgtcgatctggccacgggccgtcttcagcagccgggcgacctgggcatggtccgctttcactgaatggacaccacctcgtatccggcctcagtgactgcgtcggtgagggactggtcgctcaccgcaccagtgagggtgactgtggcgcacttgccctccaggtcggctttgacggaggccaccccctccagggtgcccagggctttctccacgtgggcggtgcagtgggcgcacatcatgccgttgatcatgatcttcttttccatcgtttcattcgctccttttcgttcttcctgatgttgtggttcatatgtgggctgctccgaggggtcagggacaggctggaccgggcaggtgccgctggggcagggaacaggggaggcagggacgctcttgggcttgaagaaccgaagacgcagggcgttggtcaccacgcataccgagctcaggctcatagcggcagcggcgaacatggggttgagcatgacatccgtccaccccagggcatagaacaggccggcggccagggggatgcccaggctgttgtagaaaaaggcccagaataggttctgcttgatgttgcggatggtggccttggacagttccaccgcagcggcagcgtccagcaggtccgacttcatcagcacgatgtcggcgctctcgatggccacgtcggtgccagcaccgatggccaagcccacgtcggcccgggccagcgccggggcatcgttgatgccgtcccccaccatggccaccttcttgccctgatcctggagctgcttcaccttgcgctccttgtcctgggggagcacctccgccatcacctgggagacgcccagctgtgcgccgatggcgccggcggtgcgctggttgtcgccggtgagcatgatgacgtcgatccccagccgctggaaggcggctaccgcctgggcgctggtaggcttgggggtgtcggccacagccaccaggccaagcacccggtgctcgtcggcaaagtagaggggggtcttgccctgggcggccagctcctcggcccgtgcggggaaggagcccagctccaccccggcctcctccatcatggcgcggttgccgcccatgcaggtgcggtctcccagggcggcccggacgccccggccgtggacggcggtgaacccgcccaccgaggtgatggggaggccacgccttctgctctcctccacgatagcggcggccagggggtgctccgaggggccctccaggcaggcggccaggatgagcaggccctcctcgtccatgtcctcgcccggcaggatgtcggtgaccaccggcctgccctgggtcagggtgccggtcttgtccagtaccacggtatccaccagatggagggtctccagggcctcagcggatttgatgaggatgccctgctccgctcccttcccggtgcccaccatgatggccacgggggtggccagacccagggcgcaggggcaggaaatgaccagtacggccacgcccgcggtgagggcggaggtggcgctgccagtggcgaaccaccaggccccggcagcgatggcggcgatgaccatgacggtggggacaaagacgccggccaccttgtcggccagcttggagatgggggccttggaggaggaggcttcctccaccagccggatcatctgggccagggtggtgtcctcgcccacccggctggcctcaaaaacgaagtagccggagcggttgatggaagcggcggccaccttgtccccggggcctttgtccacggggagggactcgccggtgagggcggattcgtccacggcggagctgccctccacaatgacaccgtccaccgggatggactggccggggcggacggctacccggtcgcccacccggacctcctccaccgggatctctgcctcggccccgtcccgcaggacggtagccgtcttgggggccaggtccatcaggcgggagatggcctgggaggtcttgcccttggagcgggtctccaggaacttgcccagggtgatgagggtgaggatcatgccggcagactcgaagtacaggtccatatggtactgctccacccgggccatgtccccgtggcccaggccgtagccgatctggtaaatggcaaagacgccatagatcacagccgcgatggagcccacagcgatgagagagtccatgttggggccgccgtggagcagggagcggaagccgtttttgtagtacttgtcgttgatatacaggataggcagggtgagcaggagctgggtaaaggcgaaggatatggcgttctcgtgacccaccaggaaagcggggaggggggcgcccatcatgtgccccatggagatatagaacagggggatcaggaagagaaaggagaggatgaggcagcgcttcatagaggagagctccgcttccatctgggcctccggcctcttagcggctccccgggctgggaccccagcctgggcgggcagggaggcgccgtatcctgcctggaccaccgcctggatgatgctttcgggggcaagggcggcctcgtcgtactccacattcatggagttggtcatcaggctgacctccgccctgcgtacgccctccagcttgttcaccgccttttccacatgggcggagcatgcggagcaggtcataccggtgacgtcaaatttctgtttcaagggaaacacatcctttcagaggagggctccgcccatgggcgccccagcgccccgccgccgaagcggcgcaaattcggagcggagcaaatgcgatacacccccctggggtggggtatcttcagcatagcgcgggggaagaagtttgtcaaggcttatcatggagattttttgagattttatgcaggagagcccctgttctgcgggaagcagaacaggggctctcaaaattcaaaatagaaggaaatgaggaggctcctcatagctgatggtataaaacccgtctatgtgaaacgtgattgtttcttgtatggtatcagatgggaggggtgaggtcaaggacaaacatggattttcttcccagcctcgacagcttgtgcccggttttgcagggggcttgtcctataatctcctcatatcacccggcagagaggaccgggccaaggaggaagtctgaatgaccgtagattgcgtgtccgaggggcggaccctgacagcggcggtgcggggggagctggatcaccaccgggccaaggaggtgatgacagagctggatgagcagatcgacatggctctgccccggcggctgactctggacctgtcaggcctgagctttacggacagctcgggcatcgcagtactgatccgggtcagccggcggatggagcagatcaagggcgagctgatagtgcggggcgtgcctccgcagccgtggaaggtgtttcaggcggccggcctgcacaagctgatccgatttgaacaggaggagcccgccgcggcgggggaggaggacgtacataaatgaaggtggaaaattacgccgcgctggaatttcccagccggtcagccaacgaggggtttgcccgggcggcggcggcctgctttgccgcccagctggaccccacgctggaggagattaacgacatcaaaaccgccgtgagcgaggcagtgaccaacgccatcgtccacgcctacccggaccggctgggcaaggtggccctgaagctgcgtctgaaggagggcggcatcctggagatcttggtgcgggactggggggtaggcatcgcggacgtggagcaggcccggaccccgctgtttaccaccgggagcgaggagcgctccgggatgggctttaccatcatggagagcttcatggacgtggtaaaggtgcgctctaccccggggaaggggacccaggtgaccatgcggaagcggatctccccccgcataggcggacgatgaatggcacgccaacggctccagagctgctggaggcggccagacagggggacaaccgggcctgtgagcaggtgttggaggaaaacgccggcctgatctggagcattgtgcggcggtattacggacggggcgtggagccggacgacctgtaccagctgggctgtctgggctttttgaaggcagtgcggggctttgacccatccttcgggacccagttctccacctatgcggtgcccaagatcgcgggggagatccggcgttttctccgggatgacggcactgtgaaggtgagccggggcatgaaggagcggggggccgcagtgtggggcgcccgacgccggctggtggccgagatgggacgggagcccaccctgtcagagctggcggcggagaccggcctgacgccagaggagatcgcagcggcggagaccgcctctgacgcagtggcatccctccaggcggagacaggagagggcggattgaccctggaggggatgctgggcaccggcgggatggaggaggacgtggtggagcggctgaccctccgttccgccatggaggagctgccggagcgggaacggcaagtgctgctgctgcgctattacaaaaacctcacgcagatccagtgtgccagagtcctgggggtctcccaagtccagatctcacggttggagcggcgggcggtggaccggctgcggaagatcctgtgcgaggaagaagtgttctgagacttctctgccccagaccgggcagaaaaataatgggatgcaggctgcggaaaaagtccctggaggactttttccgcagccgtaaatactccgggcccgtaccatctctggtacgggcccggagtatttacggaataattttaggaaatgatgtctggagctccagggtcaggcgagggcggagatgacggcgtccgggtcgctgacgtgaaaaaacagcaggcccaccacacggtcgttgcccttcttgatgcccatcacagcgttggcgcggctcttgccggcctcacggccgatggctgcgttgaagcagacgttgccggcaccgccgtcgcggcactccaccgcacaggtcaccttctggtcacggggcatggtcatcacgttggatttgaccacagcgatgatgcgctggtcggtgatggcatagatggtcttctgctccagcagcttcttgtccagatagggacggacggccaccgccagcgggatgccgatcatgggcaccaggccgatcaggatgatcccgatgctcttattgtccgcgatggcgaaggggaggaagacaccgaaggaaaacagggtcatgacggcggtgatgatccaggccacatactgggagacacggtcaggggaccggaggagcttcgtcttggtgggtcggccgaaccagaggaccttctcgttgtcccgcagagtcttttggaggatctgttccataaatatgttactcctttcataaataagaatgaattcttatcttgataaaagattaccacaacatttataaaaacggtataaatagggggtatattgacgttaagaaagcgaaaaaataaaaaatagaatcaaataaatgatgtaaaaaataaaagaataccgcctcccctttggcggaaggggaggcggcggatcggccgggcggtgagccggtatggggcggacgtttaggagagagaaacgcccgctccctcaccacacggagaagaaaaaccgaaccagagaaaagtgagaaaactccggccgtttaggagagatatccaagcagggattctggctgagggatgtggaagaacagcaggccggggacgccggactgggcaggactgccgcaacggacccccaaaatggcgttgtccagcattttggaggaggactggcccaccgcttcacagaagcagaggttgccgctctccccgtcccgggcttcaatggagtgggtgaggatgcggcccaggggaatatacatcaggttgttcttcaccagagccagcacccggtagttggtgatggcgtagatggtgtcatgctccaagctccacttgtccaacagggggcggatggagatcatggcggggaggaaggcagcgatcatgaggatcacggtcagatcggtgacggcctgatgagtgcggaggaaaaaggggatcagaccgcccaggatcacggccagcgccgcggaacagaggacccaggtcaggagcagagaagtacgggaggggatggacatcaatttgaaaggggagggacggccgctccagcggacaatctcaccgtccagaagcacttcctgtaatctctgttccatgatgtgggctcacttcctcaaattctcttctgtctgttattatagcctctgggctataaaatgggtgttaaactgaaacagagggtcgctaaataattgttaagaaaaaaacaggggagaaaaacagcacctccggagccttagcctccgggggtgctgatgtgtatggaaggctcagctgtcctccagcatccggtatccgatgcccagttctgtcaggatgtatttgggctcggaggggttttccttcagcttgcggcggatgttggccatgttgacccgcaggatctggttgttgctgccctcgtaggggccccagacatgcttgaggatgaagtcataggtgagcaccttgccggcatggagacagagcagctccaggatcttgaactcgttctgtgtgaagtggatctcctcgctgcccacgaagacctggtggcgtgcagtgtccacgactaggtctttgacctgatagcggtccttctgctcgccctggctgaggttgatccggtcggcccggcgcagggtggttcggatgcgggccagcagctccggaacgccgaagggcttgaccacatagtcatccgcccccatgtccagggctttgaccttctcagactcccgatcccgggcggaaatgatgatgacaggcacctcctggggcagtccgctgagttccttgagcacgtccagtccgtccatgtcgggcaggcccaggtccagaagcaccagatcgggacggtgggaaaagaataggctgagagcctccttgccggtggtggcggacatggccttgtagtcgttggcggtcagagcgcggcagatgaagttgctgatggtgcgctcatcttctacgaccaggatcaaacgtttttcactcatatgctttctcctccatgggaaggccgaagcggaagaccgctccgccctcagggtcatttccggcggcgaagaagccgccgtgggctttgatgatgctctggcagacggacaggccgatgcccatgcctcgggtggagtcgcctgacaggtcccgggggaggggacggccggactggactgcctgcatgatgtcaggagacagtccaatgccatggtcccggacctccaccaccgcccactcctcctggcggaacaggtggagctggatgtgctgagtgtccccggagtggcggaccgcgttttccagcagattgacgatgacctgcttgatgagcatgggctccatgggcaggaacaggatgtcctctgagaggtccaactgcacattggcgtccgggaaacggcggcgggtagtgagcaccgcgtcccccgccacctcctccagcatctcctcccgcttcttcaaagggacagaggcgtcctggatacgggtgatggacagcagattctccaccatggtggtgagagcttcggcgtcgtttttgatgtcgttgagcagggagacatccttctcactgcggggctcctcgctggacagcagtaccgcggccgccccggagatagcagtcagaggggtgcggaggtcgtgggagacggagcgaaggatattgctgcggatggtctcccgggcggcctccagctgaatggcattcttttcctggttcagacgctcgttcagctcatacagggccttggtgttctgctcccgctgttccgcctccagggcctggagcttgatccgggaggtgagggtgcagatgatgatggcgatggccgtcatgctcagcatggccaccgggtatccggcatagctgagagagaaggcggagtaggggtacataaaatagtagttgatacagaaagagctgaacagagaggccaggataccataaaaatatccagtggtcagccaggatacgaatgtgacggccagcacatagaccaaggcggagttgttctccacgccgaactgaaacagcagccggctgaggtagtatgccccggccatgaaaaaggcggtgatcagaaaattcatcacgccccgcgggacaatggcggtcagatcatggagcttggctttccattctttcaaaaggagccccccttccagcggccggtcagaggatgacacgactcttgtattcttagtcccattataataaggaacggcccggcctgcaagcagaaaatgagggcgtcctccttcaggaccagaggaggggaaggaggcacacatagaggacaaacagggccatacctatgactgcgttgatggcgaaggcgttgctggcgatctgggagtcctccaaagagccatactccgagatgtaggcgttgaggatgacggaaccgtgctgggagatcaaggtaaagaacgcggcattaaaatagaaatcctgccccaccatggggtccatcaggaaaaatttaaccccatagctgacggagaagatcagaagatagcgccaggcgaccaggcgcaggctctcccggatcttgtccggattgtccatatggatccggtagcccactgtgatcaggatcagggtggagctgatgccgcccagcttggagatggtgtcgatcacgccgccgcccaggtctgtggcggaaacggcgtcccgtatacccagaagctgaagtgccagggccaggaagatcatgacaaacagtggagataaaaggttttttccgatttgacgcggtccggcggtctctccctttagatagatccgggcgaccggcatgaagactagaccgataaacagctcatgccccactcccatgctggtgagataccccatattttccaggccgaacacagtggagaaaagaggaatggccatgaagccgaaggcaaaggcacaaggatagaggggagcgaagcggcgtttgaaatggaacaggcgcgcggtgagaaagcccagccccaggagcagaagctggatcagaaaggtgcaggcggccagcccaaaatgctcggggcgcagatccagcccaataaaggtggtgaagatggtacaggggatcagataatctgagaccagctttgtcacaccctgaacggtctcttccgaaaaataatggcgtttttggagccaaaagccaaaaataatgagcaggataacagggagaacgctgcggatcagatgttccggctgcatgatacggtatcctttcagatgtcagcacaaagtatgaggcgtcccggcagaaaacagaatggggaacggacaggcccgaccctggggattcggatatgcctgctgtctgaaaattataacacacagaacagatgctgtcaccagtatttcacagggagacaggcggaacggaaaaaactttccgggcttccacaggatggagttcttgtacctgagcaaaaaaagtggtataataatacgatttcccccaagagatcaggcccgtcggggcggcgggcctgacaggggaggacaatgaatggaatgagggattttgtatgacctacaaggaagaatttatcacgttcatggtgcgctccggcgtgctcaccttcggggacttcaccaccaaatccggccgcaagaccccctattttgtcaataccggaaactacaagaccggtgcccaggcggccaagctgggggactactacgctgcctgtatccaggagcacatgccagacggcattacctgcctgttcggaccggcctacaagggcatccccctggcggtgtctgccgccgcctccctgtaccgcaattatgaccgggatctgccctactgcttcaaccgcaaggaggccaagaaccacggcgagggcggttccatggtgggctacaagccccaggacggggacgacgtggccatcgtggaggacgtagtcaccgccggcaccgccgtgcgcgagtccatcgagctgttcaagcatgtggccgacgtgaacatcaaggccctgttcgtctcggtggaccggatggagcggggcacccgggagtgctccaccctggatgagctgcgccaggactacggcattcaggtcttccccatcgtcaccgtgcgggaggtcatcgccttcctccacaacaactccatcgacggcaaggtctatatcgacgacgagatgaaggcgaaaatggaagcctatctggaggagtacggggccaagggctgagccaaaaaattccccgtcccctcggagagcggagggagcctccggggggaactggtgccccccggaaaacgcggcgcgcgaatgcgcaaagcggtccccgcagggaccgcccgtgttttgaatggaagcctatctggaggagtacggggccagggcctgagcacggcaaaagaggacagagaaagagagggagcagggatggcggagaggcgcagatccatccatacagggcaccggcagcgggtgaaagatgaattctccgcccggggactggcgggctggccggaccaccgggtcctggaactgctgctgtactacgccatcccccagggggatgtgaacgggctggcccacgagctggtggagaggttcggctcgctggcgggggtgctggacgccgcggaggaggagctgtgccgggtgcccggagtggggcagcacaccgctgtcctgctcaagctgatcccggcggcaggggcgcgctacctccagagccgggcggacctgggggagccggtgcgccggacggaagacgcctacgcactgctggagccctacttcttcggggccaggaacgagatgatctacctgcttgcgctggatgggaagaacaagcctctgggggtgcggaaggtggcagagggcagcatctgcgccgccaacatcaatctgcgccggatcatggaggaggcagccgccctccgggcgccccagatctatctggcccacaaccacatcagcaacctggccttcccctccccggtggacatctccacaactcagaccatgcggacggccctggcgggggtgggcatcgagctgctggaccacctggtctttgtggacggggatatggtgtccatgcgggacagcgggatgatgaagtgatgcctgggccctgtccctctgtggacagggccttgacttagaacatttgttttattataatagggcggacggagagcggcccgggaggaacaggagggacggccatgcccagatttgaagtggtttcagaatacacccccagcggggatcagccggaggccatcgaggccctggccagcggactggagatggggctggacgagcagacgctgctgggcgtcaccggctcgggcaagaccttcaccatggccaagatcatcgaaaaggtccagcggcccacccttgtgctggcccacaacaagaccctggccgcccagctgtgtgccgagttccgggagttctttccccacaacgcggtggagtacttcgtctcctactacgactactaccagccggaggcctatatcccccacacagacaccttcatcgaaaaggattccgccatcaacgaggagatcgaccggctgaggttgtccgccaccgcctccctgatggagcggagggacgtgatcgtggtctcctccgtctcctgtatctacggtctgggcgagccggaggacttcgccaagatgatggtctccctgcgggtgggggccaccctggagcgggacgagctgctgaaaaagctggtggccatccgctatgaacgcaacgatatcgcctttgaccgcaacatgttccgggtccggggggacacggtggagatctggcccgcctattggaaggacaccgccctgcgggtggagtttttcggggacgagatcgaccgcatcagcgagatcaacgtggtcaccggcacccccatccgccggctgaacaacatccccatctggccggccacccactatgtcacccccaaggagaagatggacgccgctatccaggagatctacaaggaactggaggggcgggtggccttcttcgagggagagggcaagctggtggaggcccagcggctgaagcagcgcaccatgtacgacgtggagatgatgcaggagcttggctactgctccggcatcgagaactattcccgggtcattgaggggcggcccgtgggctcgcccccccacaccctgctggactacttccccaaagacttcgtcctcttcatcgacgagagccacgtcaccctgccccaggtgcgggccatgtataacggggaccgggcccgaaagaccaccctggtggattacggcttccggctcccctgcgcctttgacaaccggccgctgaaatttgaggaatttgaaaagcggctcaaccaggtggtctatgtctcagccaccccgggggagtatgagcgcacccgctcgggccagatcgtggagcaggtgatccggcccaccgggctgctggaccccaggatcgaagtcaggccggtggagggccagatcgacgacctgatcggggagatcaaccagcgcacccagcggagcgagcgggtgctggtcacaaccctgaccaagcggatggcggaggacctgaccgcctacctccagaacgcgggcatcaaggtgcgctatatgcaccacgacatcgacaccatcgagcggatggagatcatccgggacctgcggctgggcaccttcgacgtgctggtgggaatcaatctgctccgggagggcctggacctgcccgaggtctccctggtggccatcctggacgcggacaaggagggcttcctccggtccgagacttccctcatccagaccatcggccgggccgcccggaacgccgacggcatggtggtgatgtacgcggacaccatcaccccctccatgcgccgggccatcgacgagacggagcgccgccgggagaagcaggacgccttcaacaaggcccacggcatcgtccccagaacggtcatcaagtcggtgcgggagctgctggagatctccgccacgtcggaggacgtggcctccaaccagcgccagggcagggtcaaggccatgaccaggcaggagaaggccgccgagatcgcccgcctggagaaggccatgaaagaggcggccaagatgctggagttcgagctggcggcaactttgagagaccagatcatcgaactgcgggggaagtgagaagaattctatggagctgctcccgaaacggaagccgaaccgtttgaccggatacgattacagccagccggggtgttatttcatcaccatttgcacagctgggcggcagccaattttgcgtaggggcgcacagtgtgcgcccgcatcggaaattccgcctctcacagaaatcggggaaattacggaacgggcaattcaaagtattccaaatcattatccgtatgtttttgtggaaaaatatgtagtcatgcccaatcatatccaccttatgttgcgtatcgagggaaccgggcgcacactgtgcgcccctactcccgtcggagcggttccccggatcatcaaagcaatgaaagagacggtcaccaaatgtgccaggtctcccgtctggcaaaagggctatcacgaccacatcgtccgcggcgaggcggactatctccgcatttggaactacatcgacacgaatcctgccaagtggcgggaggactgttactactgccagaatgagggagtgtagttactgtggaacacacctatctgctccgtcccggccgctggcgggcggaggggacctactacgacgagacgggccgctcctttcccctggccggggagacagagctggtccaggagggggcggagcggcatctggacggctggatggaggtttccgggcccgctccggtccgattcacgaaccgctatgtcatccgggagacggaccgcccctttaccctgacctggcagtccttcaacccagtgctgggcgtgctggagggtactttcgagctggcgggagagagtatcctgtcccgctatgtctcacgggaccgggtgtactccggctgtgaggtactgaccctccaggtggacggcagctatcacaacgcgggcgtgtctatgaagaacggacggcgcatgtccgcctggaccgccgtgctgagcgaggagaggggaaggacataatggctaaggcaaaagaggaaaaaaccaacgtcatgcgggtcctggaccagaagaagattccctacaccccccacgcctatccccacggggacggcgaggcccccgacggggtgacggtggcccgctccctggggcaggacccggagcgggtcttcaagacgctggtgacccggggggcatccgggggatactacgtctttgacatcccggtgacggacacgctggacctgaaaaaagcggctaaggcggtgggggagaagtccatcgccatgctccacagcagggagctgctccccctgaccggctatgtccacggggggtgctcccccatcggcatgaagaagcagttccccaccgtcttccatgagacggcggagatcctggacaccatcatggtctccgccggaaagatcggcttccaggtggagctgtcccctgcggacctgatcgagctggtgggcgggagcacggaagacgtgacggtgtgagggaaagggactgatatacgcagacgtcctgcaatcggcaggctgtgaccgctttgtgaggaggggataagatggagcagcaggaaaagccgcccaagtttctctatctcccagaggtcaagaatgaccatttcatcatcggcggggcggatgaccgccccgatgcgtccgtaccgggatcagagccggggccgggacttgaggagcccacgggtatctacccctgcccgtgctgcgggtatctgacctttcccgcccccaaagaggaggccatagcctacatctgcccggtgtgcttctgggaaaacgacgtgttcgacccgggggaggacgatcccagcgatgagaaccgcggcctgcccctccgccagggccgggagaactaccggcgctggggcgcggtccgccccgacctggttgtccacgcccgcccgcccaggccggcggagcggccgaaagaaataccggccccccggcttactgcttctcctggaagcgggacagctcccgggagagggaaagccccaggtccaggcccagcgtgaaggcgtggcaggcctggaaggaggctaagatctccatgctgtcagtgagatggaagagcagatcctggtcggcctcggaacaggagcggaccttctcctgggcctgctccagccactccagaagcccgtcctctgtgggggagcggggctcataggggaatttttggatgaccagctcatagagcagggaaagtgtgtcatacatagattaccacccaaaagtaataatttaattatgactaaattataggcgaatttagaattggtgtcaagagggagattggcaggatggaaaagatcatgctgcccctggggcggcggctgaaagaactgcggaaagaaagaaaactcaaacaaaaggaaatggcccggtttttggaatgtacagaccgaaattatcagaaaatggagtacggagagattaacgttcccggactgacactgatcaaactggcggacttctttcaggtcagcctggactacctggtgggccgcagcgacgaccgggagcagtaaaaaagatccccgccccccgccgggcgggaagagcagggaaaagccggggggctgatcttggcgggcgtgtgcctgatcctctgtagaatgaacattcaagccatttcccagtcaaacatcgcccacagtgtcatctgcctgcgcatacaggcgttaccaaaggagaaaccaaaatgcacagtcatatttttgtcaagggcgcccgggtgaacaacctgaaaaacattgatgtggacatcccgcgggacaagctggtggtcctcaccgggctgtccggttcgggaaaatcctccctggccttcgacaccatctatgccgagggacagcggcggtatgtggagtccctcagctcctacgcccgcatgttcctgggccagatggagaagcccgacgtggactatatcgacgggctctcacccgccatctctatcgaccagaagaccaccagcaagaacccccgctccactgtgggcaccgtgacggagatctatgactacctccgtctgctgtgggcccgggtgggcaccccccactgccccatctgcggcaaggagatcaaacagcagaccatcgaccagattatcgatcaggtgatggcgctgcccgaggccacccgcatccagatcatggccccggtgatccgaggcaagaagggggagcacgccaagatcttcgaggatgcccgcaagtcgggctacgtccgctgccgggtggatggcatcgcctatgatctcagcgaggagatcaagctggaaaagaacaagaagcacgacattgagatcgtggtggaccgtctggtgatccgggaggacatcgcccgccgtcttacagattcggtggagaccgccgcctccctggcgggggggctggtgattgtcaacgtggtgggggaggaccgggatatcctgttttcccagaactacgcctgcgaggactgcggcgtctccatcgaggagctcaccccccgcatgttctccttcaacaaccccttcggcgcctgccccacctgcaccggcctgggcagccagatgaagatcgacccggagcgcatcatccccaataaaaacctgtccatcattgagggggccattaccgcctccggctggagtagcatcaagtcggacggcatctcccggatgtactttgacgccctggccaagcggtacaaattcaagctgaacaccccggtgaaggacctgcctccggaggcgctggacgccatcctctacggcaccaacggggagaagctgaccctctactacgaccagccccgggggaaggggaccctgtatcaggcgtttgagggtattgtcaacaacctggagcgccgctaccgggaaactcagtccgactctgtaaagcgcgagctggaggagtgcatgagcgagtgcccgtgtcccacctgtaagggccgccgcctgcgcaaggagtctctggcggtcaccgtgggggggatcgatatcgacgccttcacccacaaatcagtggacgacgccctggagttcgtggatcagctgaccctgactgagacccagatgcgcatcgcccagcggatcctgaaggagatccgggagcggctgggcttcctgcggtcggtggggctccagtacctgaccctgtcccgcagcgccgccagcctgtccggcggcgagagccagcgcatccggctggccacccagatcggctcctctctgatgggagtgctgtatattctggacgagccctccatcggcctgcaccagcgggacaatgacatgctgctggagactatgaagcacctgcgggacctgggcaacaccctgctggtggtggagcacgatgaggacaccatgcgggccgccgactatatcgtggacgtgggccccggggccggcgtccacggcggacagatcgtggcctgcggcacagcggaggagatcatgaacacccccggctccctcaccggcgactacctctccgggcggcggaagatcccggtgccggagcagcgccggaaggggaacggaaagtacctgaaggtgctgggggcggcggagaacaatctgcgccacatcgacgtgtccttccctctggggaccttcactgcggtgaccggcgtgtcgggcagcggaaagtcctccctggtcaacgagatcctctataaccggctggcctgcgacctgaaccgggccaagacccggccgggcagacacgacggcctggagggggaggagttcctggacaaggtcatcaacatcgaccagtcccccatcgggcgcacgccccggtccaatccggccacctacaccgggctgttcaacgacatccgggacctgttcgcctccacccaggacgctaaaagccggggctacggcccgggccgcttctccttcaatgtgcggggcggccggtgcgaggcatgtcagggggacggcctgctgaagatcgagatgcactttctgccggacatctacgtcccctgcgaggtgtgcaagggcaagcggtacaaccgtgagaccctggaggtgcggtataaggggaaaaatatctatgaggttctggagatgacagtggaggaggccctccccttcttcgagaacctgccccggatctacgggcggctcaagaccctgatggatgtggggctgagctatatcaagctggggcagtcctccaccgagctgtccggcggcgaggcccagcgggtcaagctggccaccgagctgtccaagcgctccaccggccagaccatctatatcctggatgagcccaccaccggcctgcacagctatgacgtccaccggctcatcgaggtgctccagcgtctggtggaggcgggcaacaccgtggtggtcatcgagcacaacctggatgtcatcaagaccgccgaccatgtcatcgacctgggccccgaggggggcgacggcggcggcaccatcgtctgcacgggcacgccggaggaagtggccgcctgtgagcggagctacaccgggcggtatctgaaaaagatgctggagcggtgagggcgcgtccttctgcctgggccagaccaacagaacggacaggccgcgggtccctgcgtgagaatcggaaataaatgcgcccccgcagagccggatgcccccagcgggccggacggccccctatatacccatcataatatataacgcgcggagcgctccggcggcctttgccggagcgccgcagaaaatcaggaggaggatcctatggaacacatccgaatcatcgccccgggcgatcctggcttcgactggctctatgacctctatatgcagagctttcccgtccacgagcagcgccttcgggagcggcaggagggggtgctgggccatccggagtaccactgcgacctgctctgtcagggggagacacgggtggggctgttgatgtggtgggccgggcccggcttccgctatgtggagcatttcgccatcgccccgcagctgcggggccagagctggggcagccgggcactgcgtgagttcctggcggagggagacccggtggtgctggagatcgatcctccggaggacccggtatcccggcgcaggaagggcttttacgaggggctgggctttgtctccaacccatggccccacatccatcccccttaccgcctggagttctccggccacgccctggaggtgatgaccttccccggcggctgggacgagggacagtaccggcgctttgcccgatatctggacgagacggtcatggcagaccgccctcagaaggtggcgggggcgtaagtggtccatcctccaggtcccgggccagcgccagtcctgtccgtagtcccagacggaagctgcggagggcgtaaaagcggttgagctcttccagctgttgctggagaaaggggtccagcacgcttcggagcaggtcggcccggcaggcagtcccgaaatctgggggctgagaggaaagggtagttttgatatagtgctcatagaaccaagatagaaagtcttccatatcaaatcagcgtccttcaaacacatcatattgcgatgttattataatacattatttaataatgtgttaagaggagattaaaaatgacagaagtgatccttccggggctggcgggccggctgaagccgctgcgaaacgaaaaaaagatgacccagaaagagatggccgctctgctggactgcacagagggacattatcaaaagatcgagtatggaaagatcaatctctctgccctccagctgatggagctggccgactttttcggcgtcaccaccgattatttgctgggccgggattgacggatggaccggtatcgtgtaaattggttatcagcttgccgcggcgcggcaaaatacggatttgacaggagaccagaatggatctttttcagtggctgaccgacactacagaggggaaatgcctgttcaccaccctggtgtctatgatccccatcatcgagctgagagggggcatccccttcggcgtggccctgggcctgccctactggctggcctttcccgccgcggtaatcgggaacgtgatccccgcccccttcattatcgtgtacatccgccgcatcttcgcctggatgcgcagacatctgccccgcctgaacagcatggtggacaagctggaggagaaggcccacctgaagggacagaaggtgcggcgctaccagtatctgggcctttggatctttgtggcaattcccctgcccggcaccggcgcatggaccggctctctggtggccgcctttctgaacatgcggctgaaacaggcactgcccgctgtggtgctgggggtgatgacggcggggtgcatcatgactgctctgacccacgtgggcatcaatctgttcgcctgaaccccggcggcgcttccggcataggatgggccggaggtgagcctgcatggaatatgtgtgggagatcgtgctgaccgtcctgtgcctgatggggctgggcctgctggtctggtgcctgctggggcggctggtgtgcccggtccccgggcaggaggtcctggccgtcctggaggggcagggggacggaggggggctggagcagagcgtccgcgccctgatgtggctgaggagcctgggcctgctgcactgcccggtggtcatcgtggacctggggctggaccgggagggcctggcggtggcccagcggctcgccctgcgctggccggtggtggacctgtaccgcccggaggatggggcggaggcgcattgatacaagagaggaggtgcccaaaattggaggacggcagagagctggaactggtggagggcaccgtggcctctttgatctttcagaatgaggagaacggctacaccatcctccggctggagcgggggggcgaggagttcaccctggtgggggagatgcccggcgtctcccccggggagtacctgtcggtgcaggggcgctgggtgcgccacgccacctacggcgcccagtttaaggcggagatcgtggagcgccgcctgccccagagcctgaaggaggtcttccactacctggcctccggcgcagtgaagggggtgggcaaatccactgcccgccgcttggtggaggagttcggagaggacgccctccgggtgatggaggaggagccggagaagctggcctccatcaaggggatcacccccaagcgggcccggcagatcagcgagtccttccgccagcagatggggatgcggaggctgatggagtttttgggggaacaccaactcccgctgaccctggggaccgccctgtaccgggcctatggggatgtggcactggaggtgctgcgctccaacccctatctgatcgtgggggaggagttcggtgtagagttttcccaggcggatcagctggccctgtctctgggggtggggggggaggacccccagcgcctggaggcggggctgctctttgaactggcccacaacctgaacaatggacacagcttcctgccccggcgcaagctgatagaggccaccgccatcctgctggacgtgtccggcggcctgctggagccctgcctggaggccctggccggccggggcgaggtggtctgcgaggcagttgcgggggaggatggggtatatctgcccgccctttacgatgcggagtgctatgtggcctggcgcgtcggggagatgagccggtccgagctgctcccgccggacgacctggacaagctgattgcccgaatccagcgggaccagggaatccgttacgcaccccagcagcgggaggcagtggagctggcagcctgccggcaggtcatgctcctcaccggggggccgggtaccggtaagaccacctccctgcggggggtgctggccctgttcgagaccctggggctggagaccgccctggcggcccccactggccgggcggccaagcggctgggggagctgtgcggtacggaggcatccaccatccaccgcctgctggagaccggctttgacccccacagcgggcgtctggtcttcagccacggggaggacgaccctctgaaggcggacgccgtcatcgtggacgagacctccatggtggatgtgcctctgatggcggcgctgctggccgccctgcgcaatgactgccggctggtgctggtgggagacccggaccagctaccctccgtggggccggggaatctgttcggggacctgatccgcagcgggactgtgcccaccgtgcggctcacccagattttccggcaggcggcccagagcgccatcgtccgcaacgcacacctggtgaacgcgggggagatgcccgacctgcggaagaacgataacgacttctttttcctctcccgccgggaccctcagagcgcggcggagaccatcgtggacctgtgccgccggcgcctgccggaacggatggggatcccggcggaccagatccaggtgctctcccccaccaggaggcgggggacgggcacctccgccctgaaccaggccctccaggcgacgctgaatccgccctcggaggagaagggggagcggcgcttcggcgacaccctcttccgggagggggaccgggtgatgcaggtgaaaaacaactacgacatcctctggagggaggacgggggcgcggcctccgggatgggggtgttcaacggagacatcggccgcatccagtccatcgacccgcggggggagtgcatcaccgtggactttgaggggcggatcgtagagtattccccggacatgctgggagagctggagcctgcctatgccgtcacggtccacaaggcccagggcagcgaataccgggcggtgatcctggctgccctggatggggcccccatgctgctcacccggggcgtgttgtacacggccatcacccgagcccgcagcctgttcattgtggtgggggaggagagcgtggtggcccgcatggtggctaacaaccgccagacccgccggtacagcggcctgcgggcccgcctggcgggggagacagcgtcgctccccctgtgactgaaaagcgccagcctgccaagtacggcaggctggcgcttttccccgagagaatggatgactcatttccggcggaggaacaggatgcgggcggcctccgccaggaggaccaggctaccggcggccaggcataccctggccgccgcggcacggccctcctgagccaggggcacggccttggcgatgagtccggcgccggtgagcagggagagggccccgcccatgagccgcaccgggcggtgctcccaggcccggttcatggagcggtcaaatctgccggcagccccttccaccagctgttccagtctttcttccgtcatagggatacctccttatacattcgttctgattgtatgtatatttgcaaaatcaaatgccccagggggcatctgatggaagctaggtccgttcctccccgtacagcacagcgcccatggcggagaaagcagcggagacctggtcgttgatcagggggaggccgatgctctccagcatggtgctcacacaggcaaccttgcgctgaaaatcggggcccgtggacgaaaagaccagagggctgagcaggaggttggtaaagacggccacaacctctgccgcgatttgaggcgagtccacagtgatggagccgtccgacaccccttcctccagaaaggtgcgagtcatagggacgacggaggttcggcagctgagcaggtaggcacagaccagcttggggctttggtaaaaggtccgggagagcatgcggtacatctggagctgctcccggttggagacggaggcaatgatgagccgctgtaatttctccaacccgttccgggaggtgtcctcctggatctcaaggcaggggaccgtctcgtggaacatataggtggtgacggcatccagcatctcctccttaccgtggaagtggtggtagatggctcccctggtcaggccgcaggcttctgcgatgtcctgcaaggtgacatgctcatagccgtgctccagaaacagccgcttagcggtgtccaaaatggccttttccgtcacttccgggtacttattccgcggcatggtttgtgcctcctgatagatacgtaatgtatgtatctgtagaatagcacagaacgatcctgctgtcaaccccctggcgcgaagctgaaaaaactcccggccattccatggccgggaggatccggtgtttcagggagggtcacaggggagcgaccacggaatacatcaggataaagtgagacacgctgcccaggacgataaagacgtggaagatctcgtggcagccaaagcgggggttgttccggccgggccacttgaccgcgtagagcaccccgcccacggtgtagagcactccgccggcgatcagccagaacatgcccgcggcgggcaggacgcgggagagaggggcgatggcgaacagagccatccagcccatggccaggtaaatgacgctggtgagccagcgggggatgtccagcttggcgatggtgaggatgatccccgccgccgcacacagccagatggccagcagcagggggccgcccacgccgccccagaggacggtcatgcagataggggtgtagctgccggcgatcagcaggtagatggagcagtggtcatatttccgcagggccagccggccccggactgtggtgttgacgcagtggtacagagtagaggcggtgtagaggccgatcatggacagcccatagaccaggaaggcggaaaatttgatccagtcctccagcccggcggcccggaccagaagaaataccgtgcccaccagggccagcaccgcgcctgccccgtgggtgatagcggaccaaggccgcaggccgtcataggggtcccggcggggtctgggagcctgctgatggcgggcggtgagcggggcggagcgggtgatatccggtaccacagagggattataagcaggttcgtgcatagagagctcctttccaggaaggcacatctgttcttgcgtatcattagtataacaccaaacgggcaaaatatcaatataaaaattactaaatatagtattaaaaattatatctgaaatgcggaaaattacaggagcccgccggcgccgaatcgctggacaaggtcaggatatgcggaaagggcgaaactatgagaagaagtggaagaaaaaaccttgggtcttttcaagaatctgagagctccgggttatgagcccggagcctttttcaacgtggattgagcagccaaacaccccaattgagataggccgcaaaggtcacccagaggagatacgggacttgcagccacccggcggtgcagtccacctgaaggaaggacagcagcatccacaggatcagggcccaaagcactgccagccagacaagggcaaagccgaaattctggaactgaaagaaaatgatgctccaaaagaagttgaaagcgagctggactaggaagagcagcaggctgcgggaccggagaccggaggggggcgccagatagacccgggccgcgccaatgcccatcagggcgaacaggatcacccatacgatgggaaacacgatgcttggcggggaaagaggaggcttggtgatgacctgggaatagagctgtgtaccgtccctggtcagccagccggccaggccgcccaccgcctcggtgaagaggacccaagtcccataggtcccccatagatgcttcttcattttcatcacccatggacagcatatgtgaaatcggaaattttatgtgttcggaccggggcggctgatagggagggctccggcggcccgctcccagcctgtggaaaacggaggtccagaaaaaaggggttgacaagtgggaaaggggcggctataataagcccaacaaatcaatcagcagaaacctgcgaggaagatgagtagccagtgggcaaaccttcagagagtcctggggggtgggatcagggcggggcgcaactgtgtgaatggacttccgagggcggcttgaacggctttggctcagtagatgccgacggggacccacccgttatccatcgggcacgcgtgatggcgcgtgaagcgagcggacgtttacgtcaatttgggtggtatcgcaggagtgcagctcttgtcccatgtgggatgaggagctgtttttttattggctgcgctcccaagtcaaggccgccggcaccggcccctccatcgcccacccgaacaaattttgttttttggaggaaaacacgatgaaaaagcatgacatgatgaagaagtttaccgctgccgccctgtccctgaccatgatggccggcctggccgcctgttccggcggcagcagctccgcctcctccggcgccgcccctgccccggccgtttccggctccgagaccggcggcaccgccatcaaggtggcggtagtgaagcagatggaccatgcctccctggatgagatcgccaacgccatcaccgcccggctggacgagatcgccgccgagcagggcatcaccatcgactacggccaggtgtacagcggccagggggacgagaccatcctgaaccagatcggcgcccaggtagtggccgatggtgtggacgtcatcattccggtggccaccaccgccgcccagctgatgaccgtggccgccgagggcaccggcatcccagtggtgtacgccgccgtcagtgacccggagcaggccgatctgctggacctggactatgtcaccggtatgagtgacgccctgaacacccagttcatcctggacatgatgctggcccaggacccggaggtgcagactgtgggcctgctctactccctgtctgagcccaactccaccaagcccattgcagaggcgaaggagtatctggacggcaagggcatcgcttataaagagtacaccgcaaacagcgtagatgaggtcatcgccgcggccgggacgctgatcgccgacggcgtggacgcagtcttcacccccaccgataacaagatcatggaggccgagctggccattgcccccgaactggcggaggcgggcatcccccactacacaggcgctgactcctttgtccgcaacggcgctttcaccacctgcggcgtgaactataccgacctgggcactcagaccgccgacctggcctatcaggtggcgtcggagggcatggacggcatggaggactactatctggtggagggcggcatcatcaccgtcaacaccgagaccgcccagactctgggcgcggactactccatgttcagcgacatgggccaggtggtggaagtggccaccaccgaggactaagcacgccctgaccgcacaataccgccagtccctccggcaggacgccggaggggctttggcctgaaaggacggaacccgctatgctctatattctccagacagccctggaactgggcctgttgtacgcaccggtagccctggctctgttcctcagctaccgcatcctggacattgccgatctcaccaccgatggggctttcaccctgggggcggccgtgtcggtgacagtgtgcatcgcaggccaccccgtcttggcggtccctgccgccatggctgccggggcggcggcaggctttgtgaccgccttcctccagaccaagatgggggtgccctccatcctggcgggcatcatcaccaacacggggctctacaccatcaacctgatggccatggggtggacctccaccgccagcctgctccgccaggacactattttccgcatgttccaggctaccggtatcggcggagcctggagcgagatcctgctgggcggggtgctgacggtgggggcggccctgctgctggtggctttcctggggacccggctgggcctgtccatccgagccacgggggacaatcgggacatggtcagggcctcctccatcaacccaaacttcaccatcaccgtggggctgtgcatcgccaactccctcactgccttttccggcgctctggtaggccagtcccagcgcagcgccaacgtaaacatcggcaccggaatggtggtcatcgggctggcctgcctcatcatcggtgagacggtgctgggccgtggctccatgctgcggggggcgctttccgtctttgtgggcagcatcctctaccggatcatctatgcggcggccctcagctccaggatcatcgaggctatgaagctgctgaccgccatcctggtggcgctggccatcgcggcgcccaccctcaagcagtgggctgccttccagaagcggaaggcggaaatgagaaaggggggacgctgagatgctggaacttgcgtgtatctccaagaccttcaaccccggaacggtgaacgagaagaaggcgctgagcggagttgccctccgtctggagaagggggacttcgtcaccatcgtgggctccaacggcgcgggtaaatccaccctcttcaacgccatcgcgggggccttctatgtggatgagggcgccatccgcctggcgggggaggacatcaccttcaagccggagtacaagcgcagccgggaaatagggcggctgtttcaggaccccatgcgggggacggcgcctcatatgaccatcgaggagaacctggccttggcctatctgcgcactgccaagaatcagaacgcttttttcagccggaccagcaaagcggagaagcagttcttccgggaccggctggccctgctggatatggggctggaggaccggatgaagcagcccgtggggctgctgtccggcggacagcgtcaggcgcttaccctgctgatggccacgctggtcccgcccaagctgctgctgctggacgagcacacggcggccctggacccctctacagcagagaaggtgctgggcctgacccgggagatcgtggcggagcatcatatcaccaccatgatggtgacgcacaacatgaaaaatgctctggagctgggcaaccgcaccctgatgatggacagtggaagggtcgtgctggacattgggggggaggagcggaagggcctgacggtggaggacttgctgaagcggttcaaggctggggccggcagggagctggacaacgaccgcatcctgctctcggaataaaaggaaagagcgccgccccgccgcgatcagcggcggggcggcgctgtattcagacccaggcgaggaacagccgggccatgcaccagcccagggtgaagcagccagggaaggtgagcacccaagtgagggcgatggagcgggccaccgaccagtcgatccggcggcctgaggtgctccccgcacccagcagggcagcggtgcgggtgtgggtggtgctcaccggaaggcccagcagggtggccagcagcagacagccgccgccgcccagatcggaggccagcccctcccggggacccagacgcaccatctcgcggcccacggtgtcgatgatgcgccgcccgcccatcccagtgcccagggccattgaaccggcgcacagggccatgagccaaaaggggatgaggaaggtctgctcgtcctgacggccctgggacagggcaatgcccagcagaaggatgcccagaaatttctgcccgtcctgggcaccgtggaggaaggcggtgagggcagccccggggatctgggccctgcggaacagccggtcgctccaggacagtcggctgagcgccctcagggcccggcggcccgcccagaagcccgctcccactgagaccagcagccccagcaccacccgggcccagcagtcccaccggatgcaggacaagctgccctccagggcggcggccgccccggagatgccggctaccagtgcgtggctctcgctggtggggatgccgaaccaccaggccgctgccgcccagagaacgatggaagccatagcggcgcaaagggcggccagggccgcccggggaccgccgccgaaagaggcgatggagtagatggtctcggccactgatgtattcaccgccgtgacgcacagcacgcccagaaggttgcacagggcggccagcccaaccgccggacggaaagggagggccccggtgaccacagcggcggcgatggcattgggggcgtcggtccagccgttgaccagcaggacagccagagtgagcagcaccgtgagggtcagggccgggctggccgccatctggcacaggaactcaggcagggacaggggcatgggatcacctccacccccactatatgggggcggaggcgggggtatgtcccgagaagctgtcacttcagggcggcggagaccagcagcagggtctcctcatgggtgcggtccaccaggtgggtgtagatccggccggtggtggcgggggtgctgtgtcccatggctttgccgatgtcgaacagagggacgccctgggcagaggcgatggtggcgaaggtgtggcgcagtccatggagggtgagccggggaaggtggttcttccgcacgaaccgggtgaaggccagggacagggcgttgggggagtagggcagtccctctctgtccagcaccacatgtccagaggcggcgtaatccccgccccggatggcccgctcctgctcctgccgggccttctcccggcggagcagctcatagagctcgtcaggcataaacagggtgcgcatggaggagcggttttttgtctccttctggaccactgtggcgccataggcagtgcgggcctccttgatatggacgacgcggcgctggaagtccacgctctcccacttcaggccgcagatctcctcccgccgcagacccagcccagcggtgaccttgaccaccatctccagccagtggccctctaccagctggtagagcaccttcaggttctcctgggtataataggatgcctcgtggagcttggggcggggcggctccacccgctccatgggattgacccggagcatatcctgccgcactgccatccgcagggcggcggagagcaggtcatggtgccggcggatggtgttggaagagagcccctccgtccgcgtcatggtctggtagtactcctggatctgcttggggctgagcttggacagggggacggcgcccagcagcgggtccaggtggttgtcgatgatcttctgatacgcatacaccgtagtctccgcccggttggggcggatgatgttctccatccagtaatccagccactggcgcagggtctgctcctgcttgggcgggtggaggagcttgtcccggtcggcgtaaaactcccgcaggcccgtccgggcggaggtcaggttggggaaggtgcggtactgcttgacccgcttcccctcgctgttcttgcccagatccatgctgacataatatacctttcgcacgtcatcaaaggaaatgttgcgttccactcgtttccttgccataagatgatcctctccttttgtcgaaaaatgtcgtttttgcaggaacgtgttacaagaatagcataggtgggcggggagcaggggggaaatcagtgacaaaacaggccgaaggcctacattcattatttgcaggtattgggaaagcataccctctgtacactgagagcatcgaaagagaaaaaagagggcagaaagccctccggacagaccgggcaaaatggcaaaagcaggcggtgcccttgcacgggaggagaagctgtggtacaatcacaccgcgaaacggggccctgccccgggagaagaaagggtgggaccttatgatccggatcagtaacctgtcccttccggtagacggagatttggagcagctgcgcaagcgggcggcccgggccctggggctccggccggggcagctgggagagctggagatcgtccggcagtccatcgacgcccggaacaggagcgaggtccactatgtctatacggtggagatgtccatgccccaggaggagcggctggtggaaaacgcgccggggcggaacgtgtcccggacggagcggcaggcatacgcctttccggcagcggggcggcgctccgccctgcccccggtggtggtaggcatgggcccggcgggcctgtttgcggctctgttcctggcccggaacggctttccctgtgtcgtgctggagcggggccaggacgtggaccagcggacccgggacgtggaccgcttctggaccgccggggccctggacgagggctccaacgtccagttcggagagggaggggctggcactttttccgacggaaagctgaccaccggcacccatgacccccgcatcgccgctgtgctggatacgctggtggaggcgggagcccccgccgacgtgaagtattcccataagccccatgtgggtaccgacgtgctgcggcaggtggtgaagcacatccggcaggagctcattgccctgggctgcgatgtgcgcttcggccaccggctggagggactgaccatacagggggacgccctgacggggctgcgggtggcggggccccaggggggctatcttctgaaagccgacaccctggtgctggccccgggacactccgcccgggacacctttgccatgctccatcaggcgggggtgcccatggagcagaagccctttgccgtgggggtgcgcatcgagcaccttcagcgggagatcagcgcccggcagtacggtccggcatggaaacagctcccgccctccgattataagctggcctgccacctgcccacgggccggtccgccttcaccttctgcgtgtgccccgggggggaggtggtggccgcctcctccgcccagggacaggttgtgaccaacggcatgagcttccgggcccgggatgggaagaacatcaacggcggctttctcgtgggggtggggccggaggacttccccgctggtgccggaccgctggccggggtgcgcttccaggaggagtgggagcgggcggcattccaggcggggggtggcggcttcctggctcctgcccagcgggtggaggactttttgaagaagcggccctcccagggaccgggtgccatccggcccacctaccgcccaggagtgacctggacggagctggaccggtgcctgcccggggcggtggcggatacgctgcggggagccctgcccctgatggaccggaagctccggggcttcgccgcgccggacggggtgctcactggagtggagacccggtcctcctcgccggtgcgcatcctgcgggacgagaccttccagtccgccctgcggggcctgtacccctgcggcgagggggcgggctacgccggcgggatcgtctccgccgccgtggacggcatccgggtggccgaggccgtggcccggggataaaaaacaaaacgcgctgcccagcgggcagcgcgtttttgcttggtggggagaagaggccggtcattccggcagacccatatgaaaggtaagaatgtctccgttctccagagtgacaggctgatcaaagtcaaagaccagatcccggtgtccattgccgccgctccaccagagattgcctggaatgggctccccattcttggcggcctggagccactgagcggcctgagccatctgctccggcgatgcctccaaatcagaatcatcttgaaagacggaggggagttccaggtccaacagcttctgatagaggagcccatagggggtgccgaaaaagtcttgactgaacaacccctgctcatggacaacggcgatgccgtcctggctgacggtgatggacatgaagtaggaaggaagggaaccatccagacagaccacttcggctgtcccctcaggttggctcagggtcagggatacactgccgtcagacaggggaggcgtgggcgggagaaatccttccggccaggtctctgcttcataataggcggaccactgggtcagcgtctggaacaggggatgcatggaccgcatggtgccgctgaccagatcgactgtacagagggtatctccccagtccttggtttcgccggtagcccagtttattgtctctttcaccggggaaataaaggtcaatacagttccggcatcatccagttcgatgtcccgataacgggcgaaagagtgagacccacccatataggcgggaagaagactgatgatatcgagttttgttccgttgtttctcacaaaatatagttggaaactgctcccgtggggaacgccacccatcgagccggcaaatagcgtcccggaagccgagggatacagctgatattccacattgataaactcttttacatcctccatgcgctggatcagatcatccaactggatctgcatgggatcgccgagggtcagttcggcggtgcggctgtcctcgtcgaaggcaacggcaccgtaaggagccaggtcggagaaccagatcagggtctcgccgccgatgttgcagctcctgacatactgcccggccacataggtgtcaatgtccgtggacaggataggctgcgcccgggtccccaccggctgggtgagggcgggcggcgtgtagtccggccaggacgccgggagggcagggcagcctgtgctgtccgcggcccgctccacggaaagggtgcggtcctctgcatcccagaggacctggaagccatatccgcgcaggtcctccgccaccacggcggtgctgccattcacattgtaggagcgcagagggtggccgttgatctgggcggtgatgtcggtgtacagggcccagtccactgcccggccggtcccggcggcggaggagggaagggcgagggacaggagcagggccgccgagagagcggctgtgaagagccgtttcatggagaagacctccttttttgctggtctcgcctctattatagtctccggggacttgcaatacaagaagatttgtggtatatatacctttagtacaaatgcgaagagcgggaaaataacgtgctttcgtttctcagagaggggtggtcaccggctgaaagccgccctgaagcgtgtcgtttggttcgcccgggagcggcccctgagagggggacggctgttccgccgttatcgggaagttcaagtgcgtgtctgacacgaatacgggtggtaccgcggaagggttgcctttcgtcccaacaggtttggggcggaaggcttttttgctgtccgcccccgtccgatcaatttacctctgaaaggaagaacacagatgaaagaacagttagcaaagatccgttcggaggcgctggccgcctttgggcaggcccagtccgccgccgagttggacagcctgcgcgtccagtatctgggcaagaagggtgagctcaccgccgttctgaaaatgatgggcaagctgtccgccgaggagcgccccgccatgggccagatggccaacgaggtccgctccgctctggaggcggccattgaggccgcctccggtaagctggaggcccaggccctggagcaacgcctgaaggacgaggcggtggatgtgaccatccccggccgcgaggtgaagctgggacacaagcaccccatgtacctggccctggatgagatcaaggacatcttcatcggcatgggcttcaccgtgctggacggcccggaggtggagctggccgagtacaacttcgacaagctcaatgcggaggagggacacccctcccgtgactggtcggacaccttctactttgacgaggacagccgggtgatgctccgctcccagaccagccccatgcaggtgcgggccatggagactatggaactgcctatccgcatcatcgcccccggccgggtgtaccgtaaggatgaggtggatgcgacccactcccccatgttccaccaggtggagggcatggtcatcgacaagggggtcaccatggccgatctgaagggcaccctgaacacggtggtggagcagctttacggcaagggcaccaagacccgcttccgccctcaccacttccccttcaccgagccttcctgcgagatggacgtgcagtgtcacaagtgcggcggcgcgggctgtcccacctgcaagggggagggctggatcgagctgctgggtgccggcatggtccaccccaaggtgctgaaaatggcgggcatcgacccggaggtctattccggctgggccttcggcatggggctggagcgcaccgccatgcgccgcttcaagatcgctgacctgcgtctgattttcgagaacgacgttagatttttagagcaattctgattgctctaaaaatcaattaggaattagaaattaggagttagaaattgaagcggtttcttccgcagctcaattccaaatattccggcaaaaccggacaccgcaattcctgatttctaactcctcattcctaattcaaacaaagggagttttatactatgaatctatctcgcaagtggctcagcgagtttgtgagcgttgaggccgatgataaagagtttgcggagtccatgaccctgtccggctccaaggtggagctgacccacgacctgggtgccgagatccagaacgtggtggtgggcaaggtgctgtccatggagcaccacccggacagcgaccacatgtgggtgtgccagatcgacgtgggccgggaggagccggtgcagatcgtcaccggggcctggaacgtccacatagacgacctggtgcctgtggccatgcacaagtccaccctgcctgggggcaagaagatcgaaaagggcaagctgcggggcgtggtgtccaacggcatgctgtgcggcctgagtgagctgggcctggacacccgggacttcccctacgccgtcatcactcctgccgccatcctgggggactacaagcccctggataaggacaagccctctatctccgcggacatccagccgggggacaagatttatgggccggtgatagctgccctggtggagggagtagagcccgccggagaggccggctggacctgccgcctgttctgggccggccaggaggccctgtccgtgacagtcaccaccacctgtgccaatctccacaacggcgacctggtggcctatgacaccaagcgaggggccgtctgcaccctggatgacctccacgcccagcaggcggagttcccccactgcatccccgacggcatcttcatccttcacgaggactgtaaacccggggacgacctgaagccggtggtgggcctggacgaccacgtggtggagttcgagatcacccccaaccgccccgactgcctctccatcatcggcctggcccgggaggcctccgccacctttgacgcacccctggccctccaccagccggtggtgaagggcggcggccccggcgtgctgccggagctgctggatgtggagaccccggcggccgacctgtgcccccgatacaccgcccgaatggtgcgcaacgtgaagatcgctccctccccaaagtggatgcgggagcggctgcgggccatgggcgtgcgccccatcaacaacatcgtggacatcaccaactacgtcatgctggagtacggccagcccatgcatgccttcgactaccgctatgtgaagggcggcaagatcgtggtccgccgggcggaggagggcgaggagctcaccaccctggacggaagcgtgcgcaagctcaatcccaatatgctggtcattgccgatgagcaccgggccgtgggcctggcgggcattatgggcggcctgaacagcgagatcgtctccgacaccgcggacgtggtctttgagtccgccaacttcgacggcaccaccatccgccgcactgccctggccctgggcatgcgcactgaggccagcgccaagtatgagaagggcctggaccccctgaacaccctccccgccgtggagcgggcctgtgagctggtggagctgctgggggccggcgaggtggtggacggcgtcatcgacatcctcaactacgtccctcagccccgggtgctcaagctggagccggagaagatcaacgccctgctgggcaccgacatcgccgccgaggagatggtgtccatcctgaagaagctggacttccaggtggagggagaccaggtcaccgtgccctcctggcgttccgacgtggaggccatggccgatctggccgaggaggtggcccggttccacggctacaacaacatccccaccaccctcatgcggggccagaccacccggggcggctactcccctgagcaggagctggagcgcgccttgggggcggtgtgccgtgcatgcggctatgacgagatcatcacctactccttcatttcccccacctactacgacaagatccgctgggcttcggacgatccccgccgccagtccttcaagatcctcaaccctctgggggaggatacctccatcatgcgcaccacggtgctcccctccatgctggagatcctgacccggaactacaacttccgcaacaagtgcgccaagctgtatgaggtgggccgcatctatctccctggcggggccgacggcctggcggtggagaagaaggtgctctctctgggcgcttatggcgaaggaatggacttctttgccctgaagggggcggtggaggccatcctgggagagatccgggcggcggacgtcacctttgaggcccctcagatccccaatccctcctaccacccaggccgctgtgcccaggtgctggtcaacggccaggaggtgggcgtgtttggtcagatccaccccctggtggcccagaactacggcgtggacgcagagttctactgcgccgagctggactttgaccagctgatgtgcgggaagggccccgatccccagtacgtgcccctgcccaagttccctgccgtcacccgggatattgctgtggtgtgcggcgaagcggtcaccgtgggagccttggaggactgcatccgtcggggggcgaagggactgctgaaggaggtcaccctgttcgacatctatcggggcaagggcgtggccgagggcaagaagtctgtggccttcaacctggtcctccgggccgacgaccgcagcctgaccgccgaagaggcggacgccgatgtgaaagcgattttggaaactctggaaaaggagctgggtgcggtactgcgctgaggccgccccgtggcagacggggcgcgcagcgagtacaagcgttttcccgcagaaaagttttggcgggggcgaaacttagtttcgcccccgctttttatgcccgatgtaaccataaaacagtacgaagccagagacggcactagggcgggcgatcctgtacctgatgtatgggatatgttgtctgtttttatattattcctattggcatttgatccttttatttgtgatcccggaaagaaagagtgatggacgagatcgcgagacctgtacagacagctgagccggtcggcaatgcacagtgctgtgagccggaggtttacaacatcttgcaggggacgcatcctatgtgccccctgcggcctgagacctgattttccacttccggaaacaaattcctgtcccgcgagaacagattctcaccctccggggtggcggcgggaacgtttttccggtatgatagaggcaagaaaggatcacaggaggagacaccatggatgaactggaatttgcccagcggctgaaacggtaccgccgggagcgggggctcacccagcaggagctggccgatcgcatcggcgtgtccaacaaatcagtctcccggtgggagagcgggagctacccggatgtccctaccctgctctctctggcccgggcactggatgtgacggtggatgccctgctggacccaggtgcccctgtccccacattgcagaaaagcgactggcagaatctgctctcctttgccttcgccatcggcggaggactggccttttatttactgcggaggttcgtccccgtgccggtgtgctgggccctctatctgggctgtctggcctacggcatctatctccagactcactacacctatcacgcccgctggttccgcctgggcagctgggccatgtgcttttgcgtcagttggaccctggcggaagaactggggggcgtggtgtttcaggtgctttttcccacagttctgagccagtggaagaacatgattttccaactgctgagaggggatgccggcgcgctgcttcagctggtccttgttctggggcccctatggctggcgggcgcctgcggcctcaccgttctgactcagctggctgcccggcggctggcgggggagagaggggatctcccggtgcggctgcccgacctgcgggggcatccccggctggcccgggcccccttcgcctggagcaaggccatgcccgctctgtgccccatcgtcctggccgggttctggtatctctaccggcagactctcctgccgagattctggtaccagcaccagcaggaactctatctggcggtctggacgatggcaggggtgctggctctgctcccctgcctgaagcggaggcattgggggatgctgctcccggtcctggccatgatgctggcttgcctggggttccgggggatgctggcctatccccaggtctattccctgttttccggcaggctgatggaggaaaaggcagagatgtccacccagtattatctgcgcttcggccagcccagcgaggagctggcggtggccgcccttctggtggccgctgtgtacctgctgtgctgcttcctgcgggtggagtgggtgccggcggagcagaagggccggcaggagccggaggagtcctaaatttttcttaaaattttgccccataccctttacaccgcctcctttttggagtaaactaagcacaagtgttccacttcaacgctgcaggaggtgtgttcgatggatgagatggatttcactcggaagttccggctgggcgatcagcgggatctggagatcaaggcgatcttgactacggtgtatcaggcgcttcaggagaagggctataacccagtcaatcagatcgtgggctatatcctctcagaagatcccacctatatcaccaaccacaataacgccagggcgctgatccgaaaagtggaccgggatgagctgctccagactttggtgaaatattatttgacccattgacagcagattgagggcccgctgcaaggcgcagcgggcccttttctgatgttggggaaggggagagacagatggatattttggtcagtgcctgcctgctggggactccctgccggtacgacggggcctccaggccctgcggggagctggcgcggctggaggtgctggggcaccggctgatccccgtgtgcccggaggtgatgggcggcctgcccacgccccgcccgccggcggagctccagagagacggccgggtggtggaccgggcgggaaaggacgtgacggaggcgtaccgcctcggagccgaagaggtgctggagctggcccgggcccataggtgcaccctggcggtgctgaaggagaggagcccctcctgcggcagggggcagatctatgacggcagcttcaccggcaggctgactgagggctccggtgtgaccgcccgcctgctggaggaacacggggtccaagtgtacggagagtcagaggccggcacattggcggagcgcggggaggcgcgggaggaggggcaaagtgcgtcccgccctttgccctccaaatatcccgggaaaaacgattgacatatcggaagttctatgctatattttgtagcaatctgactggagtttatctggccaagaatactgggaccactcctccgggagtcaaggccatacggacagccgggtccattgccgatcggcgggttaccgcccttattgattgagttaaaagctcaaattttataagttggttacttcataaccagatgcgtgtttgcgcagacttgtgaaacggtcaataacagagtggtaaaagtatcttgttgctatatagactctcagtaccagacatatctcccgcccccagctgttatttgcaggcgtttgtccgccatcgcggccggacaggggacttggagcttatcgtgtacaaattgatccaaacacaagctgttcaaatgcagcttgtgtttttttgtgcttcgaggtgttggcagatgaaagaagaacataccctggaccagaacaaggccccgatctacgaggcgctccagaccttccggcagatgcgggtcgttcccttcgatgtgcccgggcacaagcggggccggggcaacccggagctgacccgcttcctgggggagcagtgtgtcagcatcgacgtgaacagcatgaaacccctggacaacctgtgccaccccatctctgtcatccgggaggcggaggagctggccgccgacgccttcggcgcggcccacgcctttctgatggtggggggcaccaccagctcggtgcagagcatggtgctgtccacctgcaagcggggggacaagatcatcatgccccggaatgtccaccgcagcgtcatcaacgccctggtgctttgcggtgccatccctgtctatgtcaacccggaggtggacccgcgcctgggcatctccctgggcatgaagcgggagcaggtggcccgtgctatccgggagaacccagacgctgtggcggtgctggtgaacaaccccacctactacggcatttgcagcgacctgcgggccatcgtggaaatggcccacgaggcgggcatgtactgcctggcggacgaggcccacggcacccacttctacttcggggatcacatgccggtgtcagcgatggaagccggggcggacatggcctccgtgtccatgcacaagagcggcgggagcctgacccagtccagcctcctgctcatcggccccggcatccacgaggggcatgtgcggaagatcatcaacctgactcagaccacctcgggcagctatctgctgatgtccagcctggatatcagccgccgcaacctggccctccgcggccgggaggtctttcgccaggtgtgcgccatggcggagtacgcccgggaggagatcaacgccgtgggcgggtactacgccttcggccgggagctcatcaacggcgactccatcttcgacttcgaccccaccaagctcagcgtccacacccgggacgtgggcctggccggcatcgaggtctacgacctgctccgggacgagtacgacatccagatcgagttcggggatatcggcaacatcctggcctatctgtccatcggggaccggccccaggagctggagcggctggtcagcgccctggcggagatccgccgccgctatcaaaccgacggcagcggcctgatgaaccaggaatacatcgcccccgaggtggtcaccagcccccaggaggccttctacgcggacaagcgcagcgtccgcctggaggacagtgtgggacaggtgtgcagcgaattcgttatgtgctatccccccggcatccccatcctggcccctggggagcggatcacggcggagatcctggactacatccgctacgccaaggagaagggctgctccatgaccggacccgaggacccggagatcgaggagatcaacatactcacacaggaggcgcggtaaatggagctctggttcagcgaatttcatacccccgacgtgaagcacagcatgcgggtggaccggcacctctactcccaccggagcgagtaccagcagatcgacatctacgacaccccagagttcggcaaggtcctggccctggacggcaatgtgatgctcactgagcgggacgagttcatctatgacgagatgatcacccacgtgcctatggccgtccacccccatgtgcaggacgtgctggtcatcggtgcgggggacggcggcgtggtgaaggagctggcccggtacgagtgcatccggtccatcgacctggtggagatggacgagcaggtggtggaggcctgccggcgctatctgccggagaacgcctgccgcctggatgactcccgggtgcacatctacttcgacaacgccctgcggttcatccgccgccgccacgcccagtatgacctgatcatcgtggactccactgaccccttcggcccctcggagggctactttacccgggagttctacggcatctgctacaacgccctccgggatgacggcattatggtcaatcagcagggcagccccttctaccgccacgacgcggaggccatgcagcgcagccacaagcgcatcgtcagcactttccccatcagccgggtgtatcaggcccatatccccacctatgccgccggctactggctgttcggctttgccagcaagaagtatcacccggtggatgacttcgaccgggacaagtggctggggctccatttgaagacgcagtattacaccgtccgcctgcatgtgggggccttctgcctgccggcgtttttggaagagatgctgaaggaggtagagtgaagatggatcccaatatcgagacctttatcggctgcgacagcagctttgagaaagcgcgcatcgttctgttcggcgcccctttcgactccactaccagcttccgtcccggcgcccggttcggcccctccgccatgcgccatgagagcttcggcctggagacgtacagcccttaccaggacaaggacctgaccgactatcgcatcttcgacagcggtgatctggagctgtgctttggcagcacggagctggcgctgctggacattgagagccgggcggaggagattctggccgcaggcaagctgcctgtgctgcttgggggcgagcatctggtgaccctgggcagcttccgggccatccagcggcgctggcccgacgtacatatcatccactttgacgcccatgccgacctgcgggacgactacctgggcgcgaaactcagccatgcctgcgtcatccgccgctgccacgacctgctgggagacggacgcatccaccagttcggtatccgcagcggggaacgggaggagttccgcttcgccagggagcacacggacctgcaccccttcacctttgacggcctggaggagctggtccagaccctggaggccagccgggccccggtctatctcaccatcgacctggactgcctggacccctccgccttccccggaaccggcacccccgaggcgggcggcgtcaccttcccccagctgctggaggccattcagatggtggccaaaaccaacgtggtgggggcggatgtgaacgagctggcccccatgctggatcagagcggcgtgtccaccgccgccgcctgcaaggtgctgagggagctgctgctggccctgtcccaatagaaaacacaatatctggcccccggaggggaccggggcgtataaaatgagaagaacaaaggagaagtgattatgagcagagtattagtgatcggctgcggcggcgtggccaacgtggccatccgcaagtgctgccaggtcagcgatgtgtttaccgaactgtgcatcgccagccgcaccaagtccaagtgtgacaagctggccgccgagctggcgggcaagactgccaccaagatcaccactgcccaggtggacgccgacaaggtggaagaagtggtcgccctcattaagagctgccagcccgacctggtgatgaacatcgccctgccctaccaggatctgaccatcatggacgcctgcctggagtgcggcgtcaattacatggacaccgccaactacgagcccgaggacattgaggagccggagtggaaggccgcctatgagaagcgctgcaaggagaagggattctctgcctacttcgactacacctggcagtgggcctaccgggagaagttcgagaaggccggactcaccgccttgctgggctgcggctttgatcccggcgtgactcaggcctactgcgcctacgccaagaagcacgagttcgacaccatcgacaccatcgacatcctggactgtaacggcggcgaccacggctaccccttcgccactaacttcaaccccgaggtgaacctgcgggaggtctcggcccccggcagctattgggaggacggccgctgggtggagatccccgccatgagcatcaagcgggagtacaacttcgaccaagtgggcgagaaggacatgtacctgctccaccacgaggagatcgagtctctggccgagaacatccccgaggtacgccgtatccgcttcttcatgaccttcggccagagctacctcacccacatgaagtgtctggagaacgtgggcatgctgtccaccaccccagtggagttcgagggacagcagatcgtgcccatcaagttcctgaaggccctgcttccagaccccgccagcctggggccccgcactcacggcaagaccaacatcggctgcatcttcaccggcaagaaggacggccgggaaaagacctactacatctacaacgtgtgcgaccaccaggagtgctatcgggaggtggccagccaggccatcagctacaccaccggcgtgcccgccatgtgcggcgccctcatgctgctcactggtaagtggacccagaagggcgtgcacaccgtggaggagtttgatcccgatcccttcctggacgccctggacaagtacggcctgccccgcagcgaagaccacgaccccgtgctggtggactgatgggatataagaccttacaagatccccagtttgcgggcctggcaaactacgacccccgggctctgtttgcccagctgcccaccccggcctacgtcatcgacgaggagcggctgcggaaaaacggagaagtgctcgccgctctggcggagcgtactggctgccgggtgctgctggcccagaaggctttttccaactacgatttctaccccctcctgtcccggtacctggcgggcaccgaggccagcggcctctatgaggcccggctgggcaaggaggagatgccccagggggaggtccacgtgttctgcggggcctaccgggaggacgagtttcaggagctcctgcaatacgccgaccacatcgtctttaactccatccaccagctgaaggccttcgggccccggggcaagcaggcgggcaaaagcctgggactgcgggtgaatccggagtgctccacccaggagggccacgccatctacgacccctgcgcccctggcagccgcatgggggtgacccggaacgtgtgggaccaggagatggacgaggccaccctgtccctgctggacggcattcacttccataccctgtgcgagcagaactccgacgatttgaaaaccaccttagcggcggtggaggagaagttcggggacattctgcccgaaatgaaatggatcaatatggggggcgggcatcacatcacccgcccggactatgatttgggcaccctggaggactgtatccgtcacgcccagcagtcctggggggtaaatgtctacctggaacctggggaggcagtggccctgaatgccggatatttggccagccgggtgctggacgtggtggaaaacggcggtgtcaggatcgccatcttggacgtcagcgccgcctgccacatgcccgacgtgctggaaatgccctaccagccccccatcctgggggccagtaccgagccaggggagggccatatgttccgcctggccggccccacctgtctggccggggacgtgatcggggactacgactttgaccggccccttcaggagggcgacctggtcctgctcggcgacatggccatctataccacctgtaaaaacaataccttcaacggcatgcctctccccaatctctggaagctggacagcgccgggggtctggagcagctgaccgcccacggctacaacgcctttaaaagccggctgggccgctgacgggagatcggcgtccgccccgacggtcctgcggcgcaggaccgtcggggcttttctggtcctccggtccggcgccccggctgattttgccttgaaaaagagggaaaattagagtataatgcctttgacttttgtgtcagggtgttttcccggatgggggcgcccccaaaattgcgctgcatccgcagatggcggagcggcagcaggaggaattgaatatggtaagggcaaaaacaagtctcacgtatctgatggaattggctctgttggtggggatcctgctgatgatgaacatcacaggattggccatgatcccgctgcccggacagtacgcgtccattatgacggtaccagtggccgtgggcgctatgatgctgggtccgctggctgggggcgtcctggggggcgtgatgggctgcatcagcttctacaccgccatcaagaccgggttcagcaccctgttcctggccggctataccggaggtgtggtggtggtgctgagctttgtgaatagcatcatcccccgtgtcctgatgggggtgtgcgtgggctgggtctaccgggccgcccgcaggctggacagggggaacaccatttcctattacatcggggggctggcggcgccggtgctgaacaccctgttctatatgacggtgctgatcctgatcttcctgaacgcccccacgctccaggtcctgctgggcgaggagctgatggccaagttccaggacaacattttactgtttgccgccgcctatgtgggcattcaggccgtgatcgaggccgcagtgggctgcgtcatcagcggctcggtgtgcaaggccctgcgggtcgtgctgaaggagtgaaggggagagatatgatgagagagatcgggatcatggaggtgggcggtttccaggtgggccacgcccaggatctggaggcggctaccggctgcacggtgatcctgtgcgaccggatgagctccgccgggctggatgtccgaggagggggccccgcttcccgggagtcacagatcttggccccggtggctgccgcccagggaatcaacgcagtgctgctctccggcggcagcgccttcgggctggacgccgccgggggtgtccagcggtatctggaggagcgggacatcggctttgacgtgggggtgaccaaggtaccactggtgagccagtcctgcctcttcgacctgggggtgggcagcaaggaggtacggcctaccgctgagatggcctaccaggcctgtgagaatgcggggcgctctgcccccgctgagggcaatgtaggggcgggtacgggctgctccatcgggaaataccgggggatggaccgggcgatgaagtcgggcttcggtacctatgcgctccagaccggacctctgaaggtgggggcgctggtggcggtgaacgccctgggggacgtgtacggtcccgatggacgcccggcggccggcctgcttaatgagaagaggacgagcctgtcctgcaccttggaggagatgtttgcagacatcgccccggcggaaaatctgtttgcgggcaataccaccctaggcgtggtggtcaccaacgggaagtttgataaaacgcccttgaccaagattgccggcatggcccataacggctacgccagggctatccggccggtccacaccaccgcagacggggacagcatctatgccctctccctgggggatgtcccgggggacatcaatgtggtgggggccatggcagccctggccatggagcgggccatcctgcgggcggtccagtccgccggttccgcctatgggctgataggctgggaggacctgcctcgctgaccggctgcgctccgcggcccacctcctatcggttcccaacgcgccatttctgaaacctagggaaacagctcacaccacctacctttaccatctccatgctgagatacagaaagcccgcaggtctttgcgtgacctgcgggcttcttggatatgcaatgtgttgcccccgcttgatggcggatatgcagcttctacgatatacagcccatgttgtgggtttgaaaataccatatgtatgaggcttcgaggtggagttgaataggtgtgtgatcacatcgacctgcagctattcaccacaatagtatttgacccggaggtcaactgcttcattggtaacctgtggctgcatatgtgactgaacatccagcgccatatatgctggtgaggtacggtcatagggcgtccatactggtagcgtacctccgttcggatcaccatttttgataaaattagcccagtaattgctgacagcttttgccaactgataatcatttccgtcaaaaggacgccagcagtggtctaaggtacggaacacataccaatgttccgatgcgtggaatgcgccggcatcgtcgccaggcaattcccgttccagacgatagaagtagaccgggtttctgccatggagactttgcatccggcagaatgcagcgcaataagctaacatgtcctcggtaaatccatgattgagttgaaaatcgtaaatttcttcgtctgttgaatattttacgaccctttgatatgcttcggaatagtggccataagcatgttccagcttatgggcaatttcttcgctggtggcatggaagcggtttcgcatggaccatgcctctttgttggtacatcctaccatgtagcagatatcatgaagatggccgttttggagggaatctctgaccccttcaggcagaataaccccgtctatgcaaggctggataaatggagactcaccgcgatccaggtcgggaccatactggcagaggatagaagcatctaccttgcgggcatcttcgatagagtacaagccgtatcgctccagcagggctttccccatattttcggcctccgactgtgaaaaatttctttctagaagaggaccgctctgcatgatggcgccttgaaaccatcctttgactagtggacatgcagacaacatgagtacgctggatgcgccagcagaaccacctgagatagtgatctgttctggattcccgccaaaagaggcaatgttttcacgcacccagcgaagagccaatatctggtcctgaagaccatagtttccggctagtccatgaggagactcgtcccgcagatctgggtgcgcaagaaatccaaagagtccaagccgatagttgatcgttactactacgatgccttgggcggccatcagttcaccgtcaaattggggagcgaagctgtaattggtctgaaaaccgccgccgtggataaataccagcacggggagattatcgctctttgagtctgcgggagtccaaatattgagttggagacagtcttcgtggtgagtctccagatgctgataggagaagaattccttatgatagaaggtgcctggctgagggattacttggggacagatatttccaaagcggaccgcatcgaaggttccggaccaaggctttttgggtatggggggcctccaccgattatttccagtgggagactccgcatagggaatgcctttaaatgcagtaaccgcaggattaccagccgctattccacggatatgtccacaaaggacatcagtttcacgtatagccattatattcgcctgcccatttactggatgacagaaaccaaggcatccacagcctcgtctccgatctcgctgcgtaccatatcatagacgggctgagcgatctcacgcatggcagccatatcctcagcactcagttcgttgatctccatgccgctttcgatcagtgtatcataagcggtctgatcagcctcctgatagacagggatcatctcaacagttgtttcagcgacggcgttttcaatgatctcctgataggcggcaggaaggctgttgaagtagctctcactcatgaccatcatattggtgtacagagtgtggttagttagggtgatatagtcctgaacttcgtgcattccgcccacaacaacggtgtccaaggcgttctcctgggagtctaccagcccgttctggagagacatatacagttcgctgccagggacaggagtcgtgttgcagcccatatcactccagaatttgatctggtattggttgtccataacccgcatgttcagtcctttgaagtcttcgatggaagtcagctttttattagaagagaactgacgaaaagaggcaccttgggtaaagccaaggcatttcaagccggcattggcgaagtaaccgtccagctttgtcttgaaatcgctctggttcagcacctcgttgatctcctcggcagtggaggtggagaaggcacagggcagatcaaaaacacccaactcggggacaaaagcgacacagggagaaggctgcatggcagcgatctgaatagtattatccagaacggattcaatggcctcaacatcggagcccatctcgccattcgagaagatatttacagtgatcttgccatcagaagcagcctctaccttctctttgaacaggataccccatgcccctaccatggagctttcagcccccatatgtgcataggaaatctgaatgctgtcttgagtattagaggaaccagacggaggagcagaagcattaccgggattgccgccgcaggcggccaggggcagagtcagagcaaagctgagtgccaaagcgagaaactttttcataattatttttcctcctaaaatttatttgaccagcaacatgctgaactgcggcacaaaggcaataatgaacagtgcgatgacaaatacacctatgtaggggatggcggacttgccgatagtcatgggctgttcgccagagatagaactagtgacaaacaggttcaggccaaagggaggagtgaccagacctacagccaggttgcagaccatcagaacacccagatggacggggtcaatgccataactctctgcaatgggacaaagaatgggaccgaggatgataagggcagggccggtatccatcaccatgcccagcaggaaaaaagcgatgataactacaatcaggaaagagatcttgtcagtggcgatggtcatgatggcattttgtacgatatcagcagcatgaatcagggatagtgtgcggccgaaagcagtagcaaaggccagcaggaaacaaataggggccgcagatttgacggcagagcgcagtaattcagggagcttttggaaggagactgttttgtagataaacaggctgacaaagagcgcatagaacaccgatacagcagcggcttcggtaggagtaacaatgccggcataaattccgcccaggattataacaggggagagcagagcccaaaaactgtccttgagcaggggcagaaagccggcagcggcaattttttgatagttggattgaatctttgccttgtcctcgccatggattttacagtatgtgacggcatagaacatcagcagacaagcaactaggatgccgggcagaatgccggccataaacagtgcaccgatggaggtctcggtagccatgccatacatcataaaggggccgctgggagggatgatgacacctaaaccaccggataccgccacagtagcagcagcgaatttggcgtcatagcccaattcaatgagcagtgggatagtcatggcaccgattgcagcggcagtggcagcgccagagctggagatcgcgccgtagaacaagcaggtgataatgacggcacagggcattccaccggttttattgcccacaaagtatgcaaatacatcaaacagctttttagaaatgccgccctctgccatgagaacgcctgcaaaaataaagagaggcaaacagagaatattgggagagtttgcaccactgaatgcgccgcggatcaaagctgctatactggtggccccaactgcatccatagccagtggagtgattgcgccgccaatcatgcacataataatgggataccccaatgccagtaaaacaaaaaagatcaaaaatactaaaccagccatttaattaccccctttttgatttcggaacagctgctgagaagcctcatccaactcctcctccaccgccgtcatggcatcgaccttaatgtctccaccggtgagtagaagcttgattgactggaaggaggactggacagaacggatgattgcgaggaaaaagccaatggatgtggccagataagggatagtcatggggatctgcagtgcgggggaacgctggccggaaatgatggtagctttcacacaatcgatgctgcccccaaagaatatgataaacacgatcagcatggatacttgaatgaggatatccaacgccatacggagaacgcgggggagatggtcctgcaatagagtgatatttagcagacagcgatttcgcaccgcgtatcccaggcttatgaaacaaaagtagatgtagcagaaccgacagaactcttctggccaaggcaaggcgtggcgaaagacgtagcgcatgatgatttgcatcataatgacgatgccgatcaggctgcctgtgatgatcaggatagtttcttccagatgaaggtctagccatgcgatgacacgctttaatgggttttgtttcatgattatcctcctcaaatagaaatggcgcctcaattcatgctgtgattttgtacttcgtatacaatatataaaatacaaatctggaaaagtcaagatttaaaaagcaaataaaaaatatttatagaaacccccaattataggcgtttaaatttgggggaaatgtaaaaatagaaatgagaagacaaatcaacttaatcaatttggaaaataagcttgcatttccacataaaaatagatataattaaaaaagtattttgtatacgaaatgaggcggtcaaatggactcagtgattttggagagtgtcaacctgaacgacttggcctatgaagaaatcaaaaagagaatcatcagccgagagtttgcacctggtcagcgattagtagattcccagctggcaacaatttttcaaatcagccggacaccgattcgggatgcgatgcgccgccttacaaaagagggattgttgaccaacacatcctcccgtggtttttatgtgtttgcgccgacgctcaaagatattgacgaaatcttcagtatttcaggaatgatcgagacggaggctgccgctagaattattcgccgccttagggaaaacccctcacctaggctggaggaagagcttaatatcttagagaaaaaggctagtgaggtttttcctatggaaaaggatgaagagttcaagcgttacatgatggagctcgccgaaaatcagaggctatacgatatctatttgcaaaatcatggacagcgggttttgctggcaaacatcattcatcatgggaaaaccgacgagatagacagctttcgcgctgaaaagtccaagcttgtacacaatcgcattgtattaggtattcgaaatcaagattttgaatatacccgtcaagcaattgaggaacataatggctatgggattgctgatgccaccgattatgtccttcaattgaatgcttaatgtccgttgtagactgagaattgtgatttattgggtgtggtgtgttacatccaatatctctgcttttgacaaatttcagaatcggagccaaagaatatcatgaatcagtcaggagtagatacaagagatattgataatttgcaaagcgtttaatgttcacttctatgcttcagtgtcgtagattttgtatgggttgattcttttcaaactgcttctgccacagatttgcccccagaacaagccacagacagaaaaaatcatggctccggcgggactgtcccgccggagccatgcgctttccgctggcaatggaggagcacagccgtccgccatgccttggttttgggtggagaggccatcagctcaccccggactcgatggacctgccgctccacttggagctccccggttttcggattcaagttatcccactggagggtgcagatcacacccccgcgcaggccggtggtcagctcggtgaaaaagtcccgccacacctcgtcctgctcaatggcctccagaaaggtgcccagctgttccccattcagaatctgctttgggaggtaattgggctttagaattgctgtgccccgtcgagtttagtgctatgctccgtatcctcagacgagtcaatggcgtggctgacactggaactgccgccgccgctggaggggaggacgtccacattgtttagtatcagcttgtaggtttcggtattcaagctgttttggacaatgatttcccacttggtagtaccataaggcagagagtgcgtggagcgagcagccacttcataggacttgccatcaaaagtgatcttcgcgtttttagggtccttagcctcgattcccgggatgccgctggtcagccctgcgccggtcgtcgtataggtcttggtggccgaggcataggcccttttacataaaggtaaaggactgtgtggcactcctctcgttggaaaggtctagcaagtcatcctgcttcgtacagctctgttgcttttccagaggctgaccgttgatgtctagcagtataacgatcaggttgccgctggctgtcccccccattttgttgtactggaacgtaacttcgacagtcgtgccgtcttcatcggtgctcatggtatggatcagcatcacatctttgttccggcgcaccgccagatccagtgtcacggagaaatcattgttgccctgataactcgttcacagtgtcatattcggcattccttgccatagacttacaagtgcctccacccaggctttcacatgggcggggataccgggccaccacccggaagtactggaggccgaagaggatgtcttttccgccagcaccgctctgctgctccctgaaacacgagcataaaagaactccgccgtcccagtttcagggaacggcggagttcttatttcagagattccacatagcgggccataaagtcgggagaatacggcggctggcgggaatggattcgcctgtgttccaggggttagggtatcccactccacccgtgtcacatgggacagattaaccagacagctgaaatggcttaggcagaagtcctgattctggaattcctctttcaatttgaagagggacggcgtgctcaatctgcctactggtttgtatggcagtcttacagcccgaggtattcagacaggtgatctcgtccagaggaaatggcacggccacccacacgcagcaccgggcgcttttgctgccgggcccagtccagagcggcggccagccgccactcgtccaccggcttgagcggatattctagtggggagacagagaagctgtccagcgcgaaaccgggataatccgtaatgtaaataatggaggcgttgaccttgcgttcccgcaggaaacgggccagctccacgccgttttctgaccacagaaattgccatagacacgctcggaacacatgaaagtattgcagttaaagcgtgaaggaaaacaaatcaagcggagcaaaatagcgaaaaacaaatgaaagttattcaaattgtctatagcatagcacgccttgcggtggcctgatagtggaaatatcttttacaattactacaagttataaaatagaaatggggacctattggaactgaccaacgggttcccatttattgaacacatcgacaaccacagacagtaaacaatcagaaattgtgcaaaaagctttctagtttcgctgctaatagcatagcagggaatgatggttctccctcatgaacatactgccggaagccggaccaaaaatcgattccagccagcctgattttcctccacccatacgctgccgccgtggatttctgcaatggcccggaccagggccagccccaggccgacaccccccagttcccgggagcgggcggtatccgcccgaaagaagggctcgaagatccgctcccgtaactccggcgggatacaaggtccctgattggccacggtgatgacaatatcggctccattcaactccgcacagagccgtgtctgtccgccatccggcccgtatttgaccgcattttccaccagattgaacagtgcccggcggagcagctctctgctgccggtgatcgtgccaggggaggcttccaccaaaatggcgatgccctttttggcggccagaggggaaacatcctcggcagcttggtggagcagttctcccaatttgattcggtcgctgcggggcacctgttccagattggtcagcttcagaaggctgtccaccatgccggagagtcgatccacctcgctctccataatactgaggaatgcctctgtggtctgcggcgcaaaatcttgtttcttacgaaacagaccgatccgggtcttgaggacggccagcggggtacgaaattcgtgggcagcattttgggagaagctgcgctgcatcaaaaaagcccggctcagccgctgagacaggtcatcaaaggaatgtgccagttgtgttacctcatcccctcgatccgggatggacaggggctgatccagatccttagcggtccggccctggatctggtcattcaggtctttcagcggcgcaagagcccggcccaccagcaggtagatcaatagaagtcccgtcgccaggattacggtagaggccagaatactctggatctgaaatagctgctgggcctgctggaccactggagctgcctgtgtggtaaggagaggcatagtccctttcgcggtcgcctccggatcaagggcgggtgagaggggagcggcggcgatggtgtctgtcagatggatggcagacagattgctggtaacggccagggcggcacagcacagcgtcagcagcagggcacacaagagggtgatacgcagccgcagggaacgaaagggtttcatagagcctccttttccatcaggcgatagccctgaccgaccttcgtctgaatggggtcattacccagagcgtcccgcagttttttccgcagggaggagatatgcatccggaccacattgctgaaggggttggcgtccgactccagcacatgctccatcagctcctcctgactgacccagcggtcccggtggagcatcaggtgctccagaatggcaaactctctgggcgtcagctccagcggcctttctccggcggagatagcacgggcggatatgtccagcatgagaccacccacagtaagtaccgtatttcgggagacaaactcccggcgcagcaggctgcggactcgggcctccagttcctccagggcaaagggtttcgtgagatagtcgtctgcccccagatccagccccgccacccggtcggataactccgctctggccgacaggatcagcacccgcagctctggctgctccgcgcgaacggcccgcagcaggtccagcccgtccatgccgggcagattcaggtccaggatcagcaggtcgaaggactcgctcaggagcaggtcataggcttccgcgccgtcatagcaccgttccaccgtgtatttttcaagttccagatcctccgcaataccatcgcacagcagcttttcgtcctcgaccaccagaatacgcatcatcagccctcctccgcatgatataccatgataacagaaaactgtaaatttttcatcaagggcaaatgagcggttcttggacacggctcatcatccctccacgaaggaacgactcataatataaaattcttcttggcttggaaggtgcttcttttccataggctccaatgcagcatcatagcgttccgccccttcctcactgattgccataacaggactatcctgatagacccatttatgaccatccagtgcatgaggacgcagttctttgaccatcatcgcagcagggtatttcccactttcgatacagacattatattttttgcagcttttgaatccacggctgacatagttgacaggacttccaaagataacaatcgtatcatatcctaactgtatggctgattggaatgaatgctccataagcatttttccataccccattctctgataacctggatggatactaactggaccaaatgttaaaatttctttttcagttccattttcatcgatcaattttgcttttgtataaatgatattgccgatcacctgtccggccagttccaatacaaaatccagttccggaataaaatcctcatgttcccgcatgatgtggaccaaatagtgttccacacaccccggcacataaagattatagaaggcttgtcttgtgattttctctacagtttcccaatcttctttcttttcatttctaataacaatattttcttccataaagcagtacctccttttacactctgattggcatttttctaatcagctttgaaatttctttttcccgtcttccctttgcaatcatgtagctctctttatcttccatataatcattttcagcctttaacttccgataagattgccagcggtccatgtccaattctcccatttccagtgctttctgaatagcacatccgggctcgtttgtgtgagtacagttgcggaatttacactgagaagcaagctcctcaatgtccctaaaggttctctcaattccgtcatcattgtcccacattcccaattcacgcatgcccggggtatcgattaccatgccgccagaggggaggaggaacaattctctgcgagtcgtggtgtgcctgcccttatcgtcattgcgaagcccatttgttttcagccgttctttccccaatagacgattgatcagggtggatttccccacgccggaagagccgataaaagcaatcgtttttccctccgaaatcaatggaagaagttccttgtatccattttcttctgttgaagtcgtgaccagaacatctattccaaaagcaaccgcagatacttctgaaagtttgttttccaaatcatcacatagatccgattttgtcaggataatgaccggcatggcgccgctgtcccacgcgatcgaaatatatcgttccaaccgtctcagattaaaatcatggttcaatgccatgcacagaaatacagtgtcaatgttcgcagcaacgatctgctcctgttgtggttctccggctgcttttcggacaaaagcgccttttcggggcagaaccgattcaatgatggcgctgctgccggatccgttccaatttaccagtacaaagtctccaacagccggatagtcggaagaaactacagcttgaaatcggaactttcctgacacctctgccaacttttctcctttgtccgttataattcgataaaaccctttctcctgtgaaagaacgcgagctggttctaaatgattctcttgcgaaatttgacttaaaaatacttcggaaaatccatatttttttatgagaacgaaatgctccactataatttcctttcttctttcagtttttgggaaaaatgtctttgaagaaaatcgtcaatataacactcatagcttttggcgatttcctcttttgtttctttacgctctactccatcggacatgctgagcaacaaataaaagggagaataaaactcgatcgccaacgcatgaggggagggaagctgtttcttttgtctctttgacatttcacaaagcaaacgctcaatatactccaatggtccgctgacaagaactttttgatataaagcgctcatttccgaagacttgtattgttcaagcgtcagcattttacgaaagttgcaagcaatttcatcttcgctccaataatggaattgtgctttcatataatcgcctaaactttttggcagtacatgagaaaaagcttccggcatatctgagtagtcctgttccggaacgccgctttttcgagaacgctccacgtccaactgacagacatattcaaagatacagttaaaaatgtctctcttgtttttgtagtgcttatataaggcgcccttcgttatgcctaattctccagcgatccggctgacagataccgcctcatatccataaacggcaaagagccgtaaggcagtcaccaatattttctccttcgtattcattaccatgaccctcccaataagtaaacgtctgttcacttaagcagtatagtgaacagacgtttacttgtcaaggggatatcagtatattcccgcaataggctgccttgacgaaaaatttacaccgcatttgctatactccctcctgttccaccagaacaaggaggttttatggatgaaattttggacgaagaagcgggcggcggctctggggctggccgcactgctaaccctctccctggctgcctgcggcgaaaaggcgcccagcctggaggaagtggagcaggccatcgaggccgggacactcaccgtagaggacgctcaggacaagggctgggtggaccaggcgtgggtggatggctattgggaagcgcgcacggtacccgccgtggataaaatcgagatcaaccgggtgggagagtttaccacaacgaccctgtccggtgagccctttactcaggaggatctggggcatgtgctcctgtttgcctttgtagatccggccagtgaggatgcgggcgcattttatgacgcaatgacggcggcgtgggacggtgtgcaggaggcgggagccgggatggtgctctgcctcaagggtgaggatgagcgcggacagtttgccgacgcccccttcccggtgatcctctataacgactctctcaaggaggcgctggggaacaacagcggcatggtggaggacaaggatgtgccaaacacggcctcctggtatgtgaacggttccttcctgtccgcctgggcactggtgctggatgccgaagaactgcccgaggacgcggcggcctttgccaaggtcagcgggcaggccgacagcgcaaactccgatccggacagcagcggagcatctgccatgagccctatgggttgagccggcatgagaaagatgaccatgctctgcctgctggcggccctgctgatgatgggcctcggtctgtggcggggcgaggggggaaccgtcctctccaaggggatcaatctgtgcatggagtgtgtgggcattggctaagaacagacatcgctggaagatccagctgggagcgacgctggccaccaaccccttctttctgaacttctttcaggggaatatctctcgtgggaagctgaagggggtctgcgtccctggactgaactgctactcctgtccggctgcggcggcctcctgtcccatcggggcggtccaggccgtgatcggctcctccaaattccattttgcctactatgtagtgggttttctgctgttcatcggcgtcctgctgggccgggtggtatgcggctttctatgtcccttcggctggtttcaggagctgctccacaagatccctgcaaaaaaattcagcacaaagcggttccatatccttacctatttgaaatatgtgatcctggtcctctttgtcattgtcctgcctatgacggtggtgaacgaagtgggaatgggggacccctttttctgcaaatacctctgtcccgccgggatcttggagggcggaatccctctgtccctggccgacaccggcatccgggccagtctgggctggctcttcacctggaagagctgtatcctgctgggcgtcgtggtgctgtcggtgttcttctaccggcccttctgtaaatggctgtgccctctgggggccttttacggcctgtgcaacaaggtctcggtctatcggctggaggtagatcaaagcaaatgcacctcctgcggtgcgtgcagccgggtgtgtcagatggatgtggacgtattccgcacacccaaccacgccgagtgcatccgctgcggggactgcgtggccgcctgcccccatcaggccatcaccaagaccttttctctgaaaaaacaaacgaacaagaaggagactatataatgaaaaaaggatcttctctgctgttggcatcggtcctgctgctggctgcgctggccggctgttccaccggggaggacaactccctggtatccaaaacgcccttcccggagttctcagaggcggacaccgaagggaacccggtgagcagcgacatcttcgcagactacgacgctaccatcgtcaacttctggaacaacggctgcggcacctgcattgaggagatgccggagctggaggagctgtatcaccagcttcaggagcggaacatcaatctcatcggcgtaggcaccgactccggcgagggagaggagcagctggagaccgcccaaaacattctaaaggagaagggcgtcacctatgtgaacatctccccggacccggaaggcgagttctacaaggactttgtctctgagatcttcagctatcccaccacctacatcgtggacggtgagggcaatatcatcggcgcccctattgtcggaaatgtgaaaaaacagatcgacacggtgaacgatcggctggcactgagcacagcctcagatgaataaaaaaggccgaagggcaagccattacggctggtccttcggcctttaccttgtcaacaggataggatcgagggaatcgatccggtcaactttccagcgccgtcgcgatgatgatcctgatctgtctgcctgcactgctgctggaattgttgtaccagccggtcagcgtatagtcctccgcattgacagcggaaagggcagtcaggtagtaagaaccgtttttacgcaggtagacctgcacatcatccgcaatggcgtacctctgattggaggccatagcccagcttccggacagctccgtcagctttacggacttcattcgctgcatggtctggatgctgccgtcggacttataggcgatggctatgccgccggtctccacaggatacttaacggaagcagaacgcagggtctgttcagtgccgtctaccaaataggtgtaggtgacattgatggacatctcctgggactgatcctccaaatcggtcagataggcgtaggtccagaggtctccagttacatcatccagaataagatactcgatcctgccttcctcgttcagtccgtaataacggatgtcgtcactgtccaggctcatcccggacagacgggaggcatccacggcagcagcagtaccttcgctgctggtatccaggatctcaacattgtccgcaaaggaaagatcgccgagctttgtagcagtgctgttcaccttaccgctggtatgcttttctgtcagtgtttttatggtcacgctgccctcgctgacattgacagagaccagacggccggccttatagtccatggctttgtccaccgcaaaggtttttgccgtgccatctgtgcagagcacggtaacattggtctgaactgcggcatttccgtcctcggcgaccactttttcagaggattccaccatcccatagtacaccgcttccacgctggtcccagtgagcacatccaccacggaaccgtccatccccagcagcagcgtcacgatggtgccggctttgcctccgcccagcgcagacagcttataagtggcggcagagctgccaatttcataggcagcgccggctaccgtgacggaagtaggagacgtggcgctgggagacagctccgtgatcttgccggagacccggttggtgtagatccacagcgtgctgctgccctgatcataatagtagacatcgtactgattcagtacggcggaagaggaaatttctccgtttcggtagactgttgcaggctggaagggcagagaggtggaactgttctcagctacataggggccgctgaggttttccagcgtcagggcggtatagtccacctctccgttggtcactgtataacccagagtctcggcatagatctgaccgccgctggttttagctgtcatcaaattggagaaaagtgcagcgcagtcccgccgggccatagtgccgccctgcttcaggctgatcccgtcccgcaggcccagtgctgcggccttactcaactgagcgcttgggaacgagccggccagagcagaggtgtcgtagcccagcagcttcagcaccgcggcgcacgcctcctccagctttactgtttcatccggccggaaggtcccgtcggtatagccggtcatccagccctctgacacggcgcagcggatatactccgaggcccagtagctgcttttcacatccctgaacagggaatatccgctgccctcgctgctgacgctatccttataggaggaggctgccaccagcattttggaaaactccgcccgggtaacagggctttccagatctgtgccgtccaaaatacccaaagcctggaccatctggactgcgctgtctccgccgactgcggaggccggggacaccaatagcgagcagagcgtgcacacagccagaatgagagagagaacttttgatttcatataacagatacctcctatcagtcataccgcagggcttcgatgggatcgaggcgggcggctctttttgcgggcagatagccaaacaggatgccgatgccggcggagatcccaaaggctgccaagaccgccgtggccgagggagagacggtaatggccgtctccatcagccgtttgatgacctgtgtagcaaccgccgacatgagatagccaaggatgatgcccagccctccgccaagggcggaggtggtggcggcttcgatcacaaactgccgcaggatgatgccctccctggcccccagggccttgcggataccgatctcccgggtgcgctctgtgacagagaccagcatgatgttcataatgccaatgccgcccaccagcagagagatgccggcgatggccgccaggatggcgatgaccatattgaccatgctggtcatggtgtccagcatctccgccatgctgaccacggtataggcgtcttcatcctgaaaaattttgtagagagcggtttcgatggcctctttccccagggtggcgtattcctcatcggtcacggtcacagtatagctgctgatggtgccggtaaaggacaggcgggctgcggtggagtaggggacatagacgcagtcgtccgtgcccccctcctccatctgctccgcctcctgagccataacgcccacgatggaaaaggtggtgccgcctaccttcagactctggcccacggcattcccgccaaagcaggtctgggccacataactgcccaccacgcacacctttttccggttgacgatgtccatatactcgatgccccggccctgagctacctcgtagcccttcatatcaaaccacgtctccccgacaccggatacggaggtggagctgtaagtggtgctgccgatctttacactgcctgtcatggacacagtaggcgaaatctggtccagatagccggcgttgtcctccacgatctgatacatctgctcctcggacacggtgcgggaggtcccacggcccatgatggacaccgtcagggtgttggtccccatctccgcgaagctgtcctccatatatccggccataccgttgcccaggcccacgatgacgatgacggcgcacacgccgatgatgatgcccagcatggtgagaaaggtccgcattttgctgccggagatatttttgacagcaagcgtaaaagtctcccagaggctcatgacgacacacctccccttaggccgggggtcaccacggcctccggcgcgcgggcgtccccatcatagactacatggccgtcctccaagcggatgatccgctgggcctggaccgcaatggagttgtcatgggtgataagtaccaccgtgttgccctgacggtgcaggtcctggagcatccccagcacctcccggctggtgtgagagtccagggcaccggtgggctcgtcggccaggatgacggcgggacggccggccagggcccgggcgatggacacccgctgctgctgaccgccggagagctgattgggcaggtggtggagcttgtcgcccaggcctacctgctccagtacctctcgggcccgctgccggcgctccgccttggggacgccggcatacatcagcggtacctccacattttccagcaggtccagcttgggcagcaggttgtactgctgaaagatgaaccccagcagctcgttgcggatcgctgccaactgattggtatccatctgccctacgtcccgtccgtccagcagataagtgccggaggtggggacgtccagacagccgatgatgttcatgcaggtggattttccggagccggactggccaacgatagccacaaattcccccttttcgatgcgcatggagatgtggtccgccgcccgaactgtggtgtcccccatctgataggtcttgcagacctgacgaaattcgatcagcgcgctcatcccgggaacccccctccggggccgccgccgcttggcattccggcgggcatatcgccgcccatggcgccgggcatcccgcccatcatcatgctgccggactctgtggagcgggtgacatacgctacggtgtccccctcctgcaaaccgctgaggatctggacatagctgttgtcgctgatgccggtctccacctgcacatagacgtagccctcgggcgactcctgctccacggcgctttccgcactgggagagtcctgagtgatgagtaccagagaggtgttcccgctgcccctggtgacggcgctgctggggatggccagggtatcggcggcctcctccagcacgatctccgcgtccacattcatgcccggcagcaggccgtcggtctcgtcgatacggacggtgaccgggtaggaggtgatcccgccggaggtggtgcctgccaccgagaccttggtgaccacgccggtaaaggtcttgccctccaccgcctccgcagtgatctgaaccgtttgtcccgcctccaccgtggagatgtccagctcatcgatgttcagggtcatctccagatagctcaggtcgtagatggtacacagggtcttgccggattccacggtatcgccggccttgtattccttgtcgatgacggtcccgctgataggggatgtaatggtgtaattctccagctgcttctgtgtgttctccatggacagctccgcatttctcaggctgtctgccgcgttttggagctgatcttccaaatcatcaccgcccagagtgatcaatacctgtcccttggaaacagcgctgccttcagagacgtggaccgcggcgacagtcccgctggcgctggccgtgaccgtgctctctgactggtaggtaaaggtcccgtttccggcgctgcccagaccgttgacggaggctgtggctacctgaactgcactgagcccgccgggattttgcacggcgatggtcacatctcgggtaatggtgttgccggttccgacggcattcccgccggagatcgactggactgtaccggtcagcgtctcaaaagagccgtccagtgtcacctgagcggtctgccccacgtggaaggtagcagcgtcctcagcggggaaggggacggtcagtgtcatggtgctgtcgttgcggatggtggcgatggtctgcccctgactgacctcgtccccctctttgacatccaatgtgtacaacgtaccggaggaatttgccttgactatctggttttccgccgtgctctcatagctgcgctgggcctgagacagggagatctgcgccttttcgatgttggcggcggcgtcctcgctgtcgatctcatagagcacgctgtcctgttccaccatatcgccctcctcaaagtccgcagagaggacctcgccttcgatcagggtggtcacagtataggaattggcgggctggagggtaccgctgccggtaagagagttggtaatggtccgtggggcgaccttttcctctgtgtaggtgattgccgccgctgaaggccctttgctcagcaggaattttccggcgaaggccaggatcagaaggagagccacaatgaggagcgaccaccgcttcccgtgcttggggcgagggagacggtgtgttcgctttttcgtttgctctccctgcacttggtcgtcggactttggtttcactaaggtcatatgcgagaaactcctttcgtgccgcacttaagttctggagtgatacggcagatgatatctgatgataacaccgtttgctgaatagacactgaaaatacgcgggaaagtgctgcggatctttctgctttttcagcttcgattcagtatttttgtgtagtataatatcaaaaaggaataccgcatcccatcggaggctgttatgaaagtactaataattgaggatgaaaaactgctggcggactccatccagtcggttttagagcgcaagggctttgaggtggagtgtgtctacgacggtgagaccggggctgagtatgcggagctggggatctacgacctgctgatcctggatgtgatgatgccaaaaatgaacggctgtcaggtggcccgggaggtgcgggccaagcgctgcggcacccctatcctgatgctcaccgcccgctcagaattggaagaccgcatcgaggggctcaatgccggggctgactattatctgaccaagcccttcgatatccgggagctgctggcctgcatcaatgccctgctccgacggcaggggccccaggtggatcaggtgaccctgggaaataccgctctggatctgggagcctgcaccctgatctgcggagaaaagcgggtccagctctctgcccgagaatttgacgtgatgcgcattctcctgcgctcccagagcaccatcctctcaaaggaagtaatcctggcccgggtgtggggatatgactccgatgcggtggagaatcatgtggaggtctatgtgggctttctccgaaaaaagctgcacagcatcggttccaatatccgcatcgaggcagtccggcggctgggctatcgtctggaggtggatgaggaatgctgaaacgtctgcgccttcaatttgtcgcggtcatcatggtgatcgtcaccatcatgttgtgtacggtctttggaatgctctatttttttacacggagcagcctggagcaggaaagctttgccatgatgcgcgccgttccggtaggtatcatggcccctgatcgtccgcttgccccctttgcacgcccgggtgaacaaccggagcaggtccgtctgcccttttttgtggtgcaggaggcggaggacggaacactgactgctgccggtgtgggatattatgacctgtctcctggagaagcctttgaccaaacttttttgcaggaactgatccaggaggtggagcgggtgaaccgcccatccggggagttgaagcagtatcatctgcgttttctgcgagtagacgctccgtttggacagagtgtgatttttgcagataccaccagtgagcagtccaccttaaacaatctggtcaagaactgcatcctcatcggcgtgctctgcttttttgcttttctggggatcagcatcaaactggccgcctggacagtgaaaccggtggagtgggcttggcagcagcagcgccagtttgtctccgacgcctcccacgagctgaagacgccccttaccgtcatcatgaccaatgcggagctgctgcaaagcgaagaaaatgaccgggacagccaggtgcggttttctgccaacattctcaccatgtcccggcagatgcgggccctggtggagcaaatgctggagctggcccgggcggacagcggccagggaaaggcggacctgaggccggtggatctgagcactttggcagcggacgctctgctgcctttcgatccggtgtttttcgagcaggggttgatgctgtccagccaactcgccgaggggatcaacgtcaacggggatgccggccggctcaaagaggtgctggatatcctgctggacaatgcccggaaatataccgagccgccaggaactgtgaacgtccgtctggagcgatgggggcaccaccgctgccggctgactgtaagcaatcccggcccgcctctctcggcggcggagcagaaggatattttcaagcgcttctatcggacagatccagcccggagccgggacggcagcttcggtctgggcctctccatcgcccagcgcatcacagaggagcaccacgggcgcatctgggtggagagcagcggtggatacaatcgcttcaccgtagaacttccggcccggtgaccagagaatcaaaaaagtttgttgggaacggagtagctacggttcgactttttgctgcttcagtgtagcgcaatgctctatagtatccagggcctgtcggctggtttctttgtctcggcgtcacgtttcctgcatgtggccggcgtcctcttggtgttgcttccttcggtacttgaccacggagcgagccacagacaaaaaacggggctccggcggtggggttctgccggagccccgttcaggtagcataaaagacaaccaccggctatgacggcggtcaaaaatagcttatagaagagtaaagtaaagattaaactatgactgattctataaaatattcccggtgtttttagctcgggtaaacccagctaccatagacaagacgggtatgcatccagaagacaagagcggtgctgattagaaaccaggcgtcaaacaccacgctgtcaacccaaagaatcagttctacagacatcgatcctctctcctttgtgagtgcagattcagcagttttttctcatggtcgttctatactgtagagaaaaagaagagggcgccggataagacccggcgcccttgctatgtctacattataaaagtcggctattcaagagccaatctgcaaaaattatccatttttcaacaacacgatcaaaatcttccaataactcatataggtagtcaacatctttcgtattgccaacattgtcgtggtaatatcgaaataatgaaactcacctaaaggcactgtaacataatcgaaaaatacccggtcatctacccctgcctccatcaaaacagttctgcgctcttgccacctcctcatcaaaaatcacttcctgatacagtacctgacgagagtattgtaacataaaagcgaaaatagcagaagtactgagttctactgcccttggacagctgaatacctgctgccggagtgcatacaacgtaagggaatcatcgctatgacccgcagaggaacgtactgactgggatgatgccatagaaggcccggcgcaggaaggcaaataatatgcagcaagtcattttatgagagaaagtaaatttgttatcagttttctcagaaatagagttcaaatctatccccaacaattagttgcaaagagcggtggcacggtgctcccgatgcatcgtaggatacgcacgcgatagaaatgagcggatatcctttggaaagagagaggtactttgcctgctcataggtagcatagacctgcttcaaggtttttgttcctgtcccggtaaaacgaatgtggtacttttcggccaggaccataatcagggatgtgtcatttaaatcctcttcaataagaaaagagaaccgttccgggaagcgggaaaattcgatagcgaccggcttatcgtttgcatatcgaattctctccagtactacaacttttgagcctgcttcgatacccagttcctttacatctgagtcagtggcgtcttcaatgactgacttgattgtacgtgcccctgggactagacctgcaaactgacagatctgtgtgaagcttgagttttccgaaatgtttctgcggagagaatgatctgctacaaaagtgcctcgtccgcgatgacgaatcagcaggccatcctgttcaagctctttcaatgctttccggatggtaactctgctgacggaaaagatatccgcaagagcactttctgttggtatctgctgcccgcaggtataaactccggattttatctgcgccagaagtgtatctttgatttgcagatacagggggcctgacattgtagttgtttgcataagcttccttccatttacacttttgttgcttatttgtattatatatgaaagagatgaaaaagtaaatacccttatgaaaaagtattatttatattttttgatttttcaaaaagctattaataatatgcaaagaacgacaatataaactaaaattgaacaaatatagacgatgaaaaatgtaaaaaacaacaaagatacaaatttttataaggggggacctgtattgacatcccaaagagaaaggtatattgtattaaatacaaacaagacaaattgcgtgggaaatccacaaaacgaaaagtgaaggtgaaatatatgtggactgaagacctgtttcgagtgaagcagcctgtaatcgcgctgcttcatctgcgtgccctgccaggagatccgttgtttgacaaagaaggtggactccagaatgtgatcgacattgccagaagggagttgcatgcgctccaagacggcggggtggatggtatcctgtttgccaatgagttcagccttccttatcagcgcaaagtcgattatgtcacggttgcctctatggctcgtgtgattggcgaactgcgcagtgagatcgcagttccttacggtgtgaatatcgcgtccaatcccatggcggctattgatttggccgtggctaccaatgcgcagtttgttcgcgcagcatttaccggtgcctacttgagtgaagcgggtatcataaacacggatgtagctcaggcggtccgccgtcgcctttatttgaaccatacagatattaagatgctgttcaaggtaaacccggagtcggatgtttaccttgcagaacgcagcctccagaagatcactaagtccatccttttccactgttttcctgatggactctgcgtatctggtgtcagtgccggttctgagacagacgatgatatcctgaaggatgtcaaggcggttgctgacagtgtccctgttttttgcaatactggctgtactgcacagaatgtggcacagaagctcagcgttgtggatggagtctgtgtgggcacagcatttaagaaagacggaaaatttgaaaatcaggtggaactgcagcgtgtcgtcgaattcatggatgctgtgcgtgcataccgcgctacaaaataaaggaatttgtcatgagtactggaaatgctccttattacatgggaatcgatgtggggacatcagagacaaaagggcttctgatcgaccggaactgcagaatcgtcctccagagctccataaagcatagtatggaacaccccaagcccggtcaatatgagcatgacgcagaacgtgtctggtggcatgacctctgcattgttgctaacaccctgattcgagactctggagtggaggcaaaagagatcgcagcgcttgggatcagtacactcgggtctgattgtctgccggtagatgaaacctgtaagccccttcggaaagccatcctttacggcattgattcccgtgcacaggaggaaattgaatggctaacaaactactatggcacagaagaggtgaatcgcctgttcggacggcccatttgcaccggcgacgtagcggcaaaaattttatggatcaaacatcacgagcctgagatttataagcgcacctataaattcctgaccggctcatcctatcttgttgcgagactgaccggaaaatatgtgatagaccaatttctaagccaagcctcgtttcgccctttgtatcgaaaggatggcagcatttgtgaggaggagtgccagctttattgcagtccggagcagctggcgcagactatgccggccagcgacatagctggttttgtgaccaaagaagcgtccttggccacaggacttgcagagggcactcccgtgattaccgggacgggggattcttctgcagaagcgatcagtaccggcgtgcttgcgccgggggacatgatgattcagtttggctcgaccctgtttctttactactgtagcgcaaaacctgttcaggatgaacgcatgcgcggcaataactttctgattccaggtacatacagcctggccggcggcaccaatacctgcggtgccatgacgcagtggtatcgggacatcctgttttcggactatctgcaggaagaacagcagggcgggaaaaacgcatttgcaaggatgccggagggaatcgaagaaatcgccccaggaagcgagggcctgattacactgccttattttgcgggtgagagaactcctatcaacgatcccaaagccaggggaatgatttttgggttaacactttctcatacaagaaaacatttgtatcgctcggctttggaaagcgttggttattccgtacgtcagcacctggaagtgctgagagaccacgatcttccgctcaagaagcttatggctgtcggcggcgggactaagagtgccgtatggatgcagatcgtatccgatatcatcggattgcccatcagcgtttcggaagtgtctgtgggagctgcatttggagacgcgctgatggccgcacttgggacaggccgtttcaacagcttccggcagctcaacgaagtcattaccaccgcccgaatttatcagccggaccaagaacggcaccgtcagtacgagcgttattacaaactctattgcgaactttataaccagacgaaaaatatgatgcacaggataggagaggtggaaagcgtgccttaaggagatacaacttggataggaggtaattttatggaaggacaatatattcctgaaggtgcactgggaaaggtatggcgtgtgcttgaccgctgcattatgttcactacagtcgttggttcgctggcttctgttatgttcatcggcgccatgttcctaaatgtcattatgcgttacgtgtttagcagccccatctggtggttcgatgaaatgatcattgcactgctggtgtggtattcagctctcggcacagttgtatgctattggactaatgagcatgcagttatccacttctttttaaaattcatcaatcgtaccgggaagctctttttcatgttcatcccgcacgtggttgtggcaatcacgtcactggttttcgtttctgggggaatcacactttttggcctccaagtgaccaagctgccccagggaggtcttccgttcaccaaagcctattactatgcgctgcccatgatcgtcatgggggcaatgatgacaatctgtgcagtatatcgtatcgtcgagtacattttaacgccaaaacatgtgtttttggatcgcttccaaaaacttcaggacgaaggagtgatgatcgttgagtgactacatggtttggatctacttccttattttcgttgttctgatccttttggaaatgccgatcggaacggcaatgctgctttcaagtctgctctatgttattcagaacggccagagcttcgtcatgttcgcccagaagacggcaacatcgtttgcgagctactcacttttggcggttcccgctttcgtttttgtgggctgtgcaatgaatgagatcggattcagtgacagaatatttggtttggccgagaaagcaatcggacatattccaggtggtctgggccacgcaaatgttctcgcaagtatgatcttcgctggcatgtccggttctgctatggcagatgcaggcggcctgggtgccattgagatcaaggcaatgaacgaggctggctatgacaaggggttttcagtagccatcactgcggcctcatctggtatcggtccgatcattcctccaagcatcaaccttgtgatttggggctttcttgcaagtacgggtaccgtagaactgtttatggccggtgttcttccgggtattttgatgggcctttgcttgatggtctatatctatatcgccgtcacgaagttccatgtaaaagcacccattactcctaaagctccttttaaggacttcttacatgcactctggcgtggcctccctgcactgggggcaccagccattctgctgggcggcatcagcacaggcgtcttcacatctactgagaccggtgctgtggcctgtgcatatatcattctgcttggtttctgctacaggcggttaaattttgcgaagataatgaagatcctgaaggaaacgatgtccaccacagccctgactatgtggctgtgcgctaccggttctgtatttaactggatgataattaacagcgggattaccaagactctgtcggatcttctgttgagtcttaacaatgaaatcatcgttcttctgctgctgaatcttctgcttttgttccttggctgctttatgggttcgctgccggttcttatcatgatggcccctgttcttttaaatgtggccgacgcattcagcatgagctacatcactatgggcgttatggcagtactgaatttgaccataggaggcattacaccgcccatggcgccatcgctgtttgtctccgcaaaggtggctgaccttcccttcgaaaagacattgaagcacatctatcccatgcttgttcctcttgtggtcgcactattgatggtgacctttattaagccgcttaccctgttcctgcctggactattgctctgaactttgtaacggaattggccgtgtatgacgaatcaaaaataaaattttaggaggaatcgatatgaaaaagatgaaaaaagcgctggcgctatcccttgcactggtcatgtctgctactctgtttggctgtgcccccaaggaaaatcccgctgccaattctcccacagcgtctgatccagccgcaagtactcagtcttctcagtctggagaagagagacaggatcacgatgagattgtgattaaactgggggcatcctctgcttctacggaaccaactggtattgctgggcagaagtttgctgatctggtcaatgagagattggctggtcgggtcagggtggagtactatcccggcgagcagctgggtgctgcaatggaagaggtagagaatatgcaggtggatttgcagcagggcgccattttctcctttgataattacagcagcatcgcaaaagacctgaatattatgagtatggcttttgcgtttgacagcattgagcacgtctacgccttcctggactccgagctggctgataacgcattccagacattggaagacaacggtatccatattgtctcatataagctgcaaaagaaccctcgggccatctttggaaagaagcctttagcgactgcggctgatctgagtggtgtaaagttccgtattcccaatattgacatctgggaaaagaactttacgactctgggagcaaagcccaccatcgtcgcttggtccgattacaccatggccatgatgcagggcgtgattgatgctggtgagtgctcttacgaatctattaaggcattggacctgcataagtatgctccctatatttccttggtcgactacgcctatcctctggagagcatcgctatcaatatgactacctgggagaaactgacccccgaagagcaggagattatcacccagtgtggtgacgaggtcgctcagtggttcaccgcttatgttaaggagcagtgggaggcagataagcagactattatagacgaaggcggccaatttgtagagtttgacaagcagacctttatcgatgccatggcgcctctggccccccagctggaatctgaaggctattgggctacttcgggtctgtacgatgcagttcaggaccttgagtattaattgtcaaaagtaatcaccagatgtacagcttgggcacacagtgcccaagctgtacacaaaatagagcgtaaggagtgacgaatcttgagttatatgattggcgtagatgttgggggaacatttactgatttctcgttttttaatattgaaacgggggcgttgaggcattataagcgcagttctactccggaagatccgtccaaggccattatgggcggcattcaggagatcctgagtgaacagagcattgataccggggagattacctatttggcccatggaactacggtcgccaccaatgcgctgattgagaaaaaaggagcccgaatggggcttatcacgactgaaggttttaaagacctgatggaaatcgggtggcagcgccgcccgtcactgtatgacttgcgccgtcccaagccggagcagcttatcccgcctggaatgaaccaggaagttaaggagcgtattcttcacgacggcagtattttaacgccgttagacgaagacagtgttcgtaatgcggtgcgcttcctcaaggaaatgggtgcagagaccattgcggtgtgcacattgttctcgttcatcaatcctgttcatgaagatcgcatcaaggagatcattgaagaagagtatccgggagtgtatgtttctgcatcccacgacttggttgctgaatttcgtgaatactcccgcatgagcactactatcctgaacgcatatctcggcccagtaatgaaagaatatgtacacaactttgaaaattctgtcaaggaagccggtattactgtatcgccttatgtgacccagtccaacggttcgatcatctcgatcaaagagacggtcgattgtccgattaagactgcggtttccgggccctctgccggcgttattggtgccatttacattggcaagcagtgtaatctggataaaattattacctttgatatgggaggtaccagcattgatgtcagcctgattgaaaacggtaaggcccagctttccaatgaacgcactgtggagggataccccgcccgaattcctatgatcgatattgtgacagtgggcgcaggtggtggctccattgcccaaattgatgcgggcggagcattaaaagtggggccgcgcagttcaggtgctactcctgggcccgcatgctatatgcgcggtggtgagcttccctgtgccactgacgccaatattattctgggcaagctcaactccaagaaaatcttgggcggcagaatggatgttgacatcaagctggctgaaaaggcgatccgcacccacatttgtgaaaaatcgaacttggatttgcagcgggctgcggcaggaatcgtttccgtgatcaattccaacatggttcgtgctgtacgagtcgtaagtgttgaacgcggatatgatcccagcgaatttacccttatggcatttggcggcgcaggacctctgcacgcctgtgaggttgctagggatatgggaatcaaacaggtccttattcccccctctcccggcaccctgtgctcgttaggtctgctgatggcggatactaaatttgatctcagctgttcaaatctgaccactgcagagctaacatctctgcctaaggttcggaagatctttgataacttgctggacgatggcaatgccctgctggataaggagcatgttgcagaagacagacgcaagtacgcctattccgttgactgccgctatctccaccaaaactacgagatcccgatccaggtaacggtgccctttgacgaggcggctatggaggacatgatcgagcagttcaatctggagcatgagcatgcgtatggctactgtgatcggaatatgacaatccagatggtgaacttccgtatcagcgccatcggtgttatggagaagcccgacttggtggccgtggaactggaacctgatgctcagctccctgagccgattgaagttcgtaaggtcctgtttgaccgcgaggagcagtacattgacaccaaggtgtaccagcgcggcgaactgaaagccggtacgacggtagaggggccggcaattctggagcagatggattccaccacggtaattccgcccaattggaatgcctacacagatgcccactacaacctcatcgcgacttatcaagggggtggagaagaatgacacggaaaacagatgcggttatgcttgaaatcattggaaatcaactcctctccattgcggaggaaatgggagttgccatcatcaaaagtgcatattccaataatattaaggaacgccgggatatttctacagctatgtttgatcccgaaggtaatatgattgctcaggccgaacacgtgcccatgcacctgggctcattacttgggatcatcggagaggtcttcaagaaattcgcagtctctgacatcaaacctggcgatatgttcgttggcaacgatccctacaatggaggagggactcacctcaatgatatcactatcgccgcccctatttttgcatccaatggaaagctgattggctgggcggcaaaccttgcccatcacagcgatatcggcggcaaggagccggggtccacctgcggtgatgctgtaagtatctttcaggaggggctcaagatcccgctggtgcgtatttgccgcaatggcgagcccatcgcggatattgtagacttcattctctgcaattctcggatcccaaacgagcgctatggtgaccttcaggctcagatcgctgccaatcgtgtgggtgcccgccgtcttcaggatgcctatacgcgttatggagacctgttgatcgattgcatgcatgagcttcaaaattatgctgagcgccgtctgcgcgccggtattcggaacctgaaggacggcgagtacagctttattgattatatggatgatgcgggtgtggcgtctccggacccagtaaaaatctgtgtaaagattacgattaaaggcgatgatctgcatgtcgattttgcaggcacacaaggacaggtttctggcccgatcaatctcacaaaaaacggtatgctggccgcagtattctactccttgaaggcgcttattgaccctggcacgccgtccaacgcaggcatatatcgggcgtttacagtagccgccgaacccggcatgatcttgaatgccaaaaatcctgctgccgtcggcgagcgaattgatacggcaatgcgtattgcggatgttatcttcggagcactggctccggcggccggaattcgctccatgtccggaagcaatggcagttgtacaacggcgttgttcagtggctatgatcctaacgaccctgagcagtaccatgtgtatcttgagaccattgctggcggtgccggtgcgcaccgggatatggacggtcaaaacggtgtacaggtccatatgacaaacacctcgaacctgcctgtggaagcgctggagatggaattcccgctgatcatggtcaaaaaatatggacttcgcccggacagcggcggcgcaggtctgtaccgtggcggtcttggtattgagcgcgtctatgaggcggtaacagaccatgtaatatatactggccttggagaccgccagcggtttgagccatgggggattgacggagggcataatggtgcgggcggctgttatgatttgacccgcagcggacagacggaatctcagcggctgacatccaaatgtacgggccttgtgatgaatcgcggcgatgtggtctgcgtcagaacgcctggagctggaggttggggggatcccaaacggcgcgatgtacagaaggtgcttgaagacgtcctggagggaaaggtgtctcctggagcggcagcttcggaatacggagttgcgctgaaacgtgataaaatgctctggactgtggatgaggaacagactgacgtacttagaaataccccctgaagatatgggaagaaaaaccgtaacggatactacggaaagacggttactaagaccaacaaggaatgcccgataaacgaaacataatcacaaaaggggagttgcggggaaaggcaaaaccaccggctttgccgtcatctcattaagataagcgacagaccggactgcgtgcaaagcagttcggtctgtgttgtaggcaccaaaaacacccccccggctatgccggtggtaaaaaatagcttaaagcgaggagaagagtagaaaaagaaaaaactccctgatagggtagaagtgggttgacgaccacacaactacgataacagggaggtcttcatcgtgaaagacaaagacataaatagtttagagcatacaagttggagatatcaatatcatatcgtatttgcacccaaatatcgaaggatggagatatatggacagataaaacaggatataggagtgatattaaggaaactgtgtcagcaaaaaggggtagaaatcatagaagtcagagcgtgcccagaccgtatacacatgctgataaacatccctccccaatacagtgtatcacagatcatggggtatttgaaagggaaaaatagtctgatgatatttgaccggcatgcaaatctgaaatataagtatagaaatcggcacttttgggccagaggatattatgtggatacagtgggcggaataaaaaacagatagcagagtatttccgaaaccaactggcatcagatcaaatcgcagaccagatagggctgaaagagtttgttgacccgtttacgggccgcgagaacaagaaggcgtaaaaagtgccccttaagggacttcgtccgtatcaggcccttatagggcctactcaagcctccggcttagccggaggctttgacttggccgactgcctgatttttttatcgtatcgcgtccttcatggttttgacatacgcaccgatgcagccaggggcatccttcccgtgctgttccagcagcttgacgatggcagagccgacgatcacgccatcggcgagctctgccatccgcttggcctgttccggcgtggagattccaaagccgatggcggctgggatatgggtgttctgccgcacagtctccatcatggaggccagatccgttttgatctcgcttctggctccggtaacgcccagggaggacaccacatagagaaacccctccgcctctctggcaatcatggcgatccggtccttggatgtaggcgcgatgagggagatcagctccaccccgtaccgcctgcaaaccggcagaaattcctccttctcctcaaagggcagatcggggaggatcagtccgtcgatccccgtctcccggcaggcggagaaaaagcgctccgctccataggagaacactacattggcgtaggtcataaaaaccagaggtattgttacatcacggcgcaggtcccgcaccagtccgaagatctggtctgtggtgaccccgtcctgcaaggcccggaggttagccccctggatcaccggcccctcggcggtggggtcggagaagggaatgcccagctcgatgaggtccgcgccattttccactgcggcccggacggcggcggcggtggtctccagatccgggtcgccgcaggtaataaacgggataaatgcctttccgcgggcaaatgcctgtgcgatcttactcatggagatcctcccctctgtatcgggcgatggcggcgcagtccttgtcgccccggcctgaaatagtgatgacgatgatctgctcccgctccatagtgggagcaagctttatggcatgggccacggcgtgggccgactcaatggcagggatgataccctccgtccgggccagatactcgaaggcgttgaccgcctcctcgtcagtgaccgggacatattccgcccggccgatgtcatggaggtgggcgtgttccgggccgatgcccgggtagtccagtccggcggagatggagtagaccggggcgatctggccgtactggtcctgacagaagtaagacttcatcccgtggaagatgcccagcttcccggtggcgatggtggccgccgtctccggggtatccgccccccggccggccgcctcgcagccgatcagccggacctgttcgtccccgataaagtgatagaagctgccgatggcattggaaccgcctcccacacaggcgagcaccgcgtcgggcagccgcccctccttctccagaagctgtgccctgatctcccgggagatcaccgcctggaagtcccggacgatggtgggaaaggggtggggccccatcacagagcccaggcagtagtgggtgtcttcgatgcgggaggtccattcccgcatcgcctcggatacggcgtccttcagcgcggccgtgcccgtctttacgggaaccacctccgcccctagaagacgcatccgatacacattgagggcctggcggaccgtatcctcttcccccataaagaccacgcactccatccccatgagggcggcggcggtggcggtagccaccccgtgctgccccgcccccgtctcggcgatcaggcgggtcttgcccatccgcttggccagaagggcctgtcccagcacattgttgatcttgtgggccccggtgtggttcagatcctcccgcttcagatagatcttcgccccgcccagatcctccgtcatctttttggcaaaatacagccgggatggtctgcccgcgtattcattgaaaagctcggtgagctcccggttgaaagcttcgtcgttcttgtagtgatcgtatgccgcttccagttcaatgaccgcgttcatcagcgtctcggggatatactgtcccccgtggacgccgaagcgtccctttggattggtcatgctctcgctccctttctgactgcggccacaaaggccgccattttttcaggatccttgcccccatccgtctcaataccggagctgacgtccaccgcataggggtgaagccgctccaccgccccttccacattctccggtcccagtccgccggccaggaaatagggacgccggatctgatggagcagactccagtcgaacaccgtgcccgtacccgcaccggcgtccagcaggatatggtcagcagcactggcctcggcgcggaggacatcctgaaccgtggcgatccggaatgcctggataatgggctttggggtaagcatccgcagccggtcaacatagtccccgccctcgctgccgtgaagctgggccaggtcgattacaccgcggttcagcaggcgggccactgtctctgctgtctcgttgacaaatacgcccaccgcctgaatgttcgggtccagtaattccttcaattcagcggcccctttgggtgcgatatatcgtttgctttcaggggcaaatacaaatccgatatactccggcctcagctgatttgcggccagaatatcccgggggcgggacaggccgcacagcttgatttttgtcatgctccgcctcgcagtccggccagagcggcctttttatcggccgcccgcatcagagtttctccaatcaggactccgtccgctcccagctctcggagcactgcgatgtctccggcgctgcggacgccgctttcggaaacaaacagcacctcgcgggggatcagcgccctgagccggcggctgttgtccgggtccacagagaaatccttcaggctgcggttgttcaccccgatgatccgcgcccctgcccggagggcagtttccgcctccgcctcgttgtggacctccaccagtgcggacaggcccagctcatcgcaggtgtgcaggtactcccggatttgccgctccgtcaaaatggcacagatcagcaggactgccgacgcccccagcaccttcgcctcatagatcatgtattcgtctacggtaaagtccttccgcaggcaggggatggaggccgtccgggcgatctcctgcaaatgccggccgctgcccagaaaccatttgggctcagtgagcactgagatgcagtctgcacccgccgcctcatagtccagtgcaatttgcaggtagggatactccggggcgatgagtcccttggagggcgaggcccgcttgcactcacagatgaaagagagtccgtcttttctcagggctttctcaaacccaaaatctcctttggggagagaaagggcctgccgacgcagctcctccagagggacagcgctcttggacgccgccacccgctcccgggcatggccggccagctggtccagtatggtcatgcctccacctccgggccgttgctgaccgcgatcagccgctccagtagggcggcggcctttcctgtatcaatgagctccgccgccagggccacgccgtccttcatgctatcggctttgccgccgatgtacagggccgccccggcattgagcagcaccgcgttccgcttggcgccccgctcgccattcaaaatagcccgggtgatggcggcgttctcctccggcgtcccgcccttcagctcctcttttttgcagcggtcaaagccaaaatcctccggggtgatgaccgaggacttgaaccagccgtcccggatctcgcagatggtggtgggcgcactcagggagatctcgtccagcttgtcctgtccatataccaccatgccccgcttgatccccagattgatgagcacctgtgccaggggctccaccagatagtcgtcatagacgcccagcagctgccggaccggcgtcccggggttggtcagtgggccgaggatattgaataccgtgcggaagcccagctccttgcggatggctcccacatatttcatggaggtgtggtaatcctgggcgaagaaaaagcacattcccacgtcccggagcagctccacgcacttttcggggctctggtggatgttgacccccagtgcctccagacagtccgccgtgccgcacagggaggaggccgcccggtttccgtgcttggccaccttcatgccccctgccgccgccaccagggcggcggtggtggagatgttgaagctgccggcgttgtctccgccggtgcccacgatctcaaagagctccatgccggtctccaccttgacggcgtggccccgcatggcggcggcgcatccggcgatctcgtcggtggtctccgcccgggcgctcttggtggagagggcggcaagaaaagcggcgttttgggtgggcgtggtctcgccgcccataatttcgttcatcacggtgtaggcctcctcataagtgaggtcccctttattgacgatcttgacgatagcttctttgatcatggtttacatctcctttatgaagttttggagcatggttttcccgtcgggcgtcaaaatggactctgggtggaactgtacaccgtagaccggatgctccctgtgctgcaccgccatgacctctccgtcctcggttcgagcggtgatcttcaggcactccggaagggtttgggcgtccgccgccagggagtggtaccgccccacaagggctgtttccggacagccccggaacagcgggcagtccggatcgaatcggacctgggactgcttcccgtgcatcagcgccttggcgtaggtaatggaggcgccaaaggcggcgcagatggcctggtgccccagacagacccccagaatggggatctcatgccccagggcggtcaccacctccatggtgattcccgcgtcctccggcctccccgggccgggggagaggatgatccgttccggctgaagcgcccgaatttcttctgcggtcatctcatcattgcggatgatccagatattcggctcgaattccccaacaagctggtacagattgtaggaaaaactgtcatagttgtcgatcagcaggatcatagctccgcctcctgtgcaagctccagcgccctcagggacgcccgcgccttgttcatacattcctcaaattcctgctccgggaccgaatcggccacgatcccggctccgcttctcacaaacaccctgccgttcttctgataggcgatccggatggcgatgcaggtgtccatattcccggtgaagtcgatgtagccgatggccccgccgtagatgccccgcttgttgttctccagctctgcgatcagctggcaggcccggagcttaggcgctccggagagggtcccggcgggcagcaccgcctcgatggcgtccagcgcgtccttgtcctcccggagctctccccgtacggtggagccgatgtgcatgacatgggagaagcgctcaatggtgtggaacttctccacctggaccgtaccgaaccggctgatcttcccaagatcgttccgccccagatccaccagcatattgtgctccgccagctctttctcatcggagagcagctctgtctccagaacctggtcctcctccggggtctttcccctgggccgggtgcccgcgagagggaaggtgtggagcacgccgttttccagcttgaccagagtctccggcgacgcccccgccacctccacatctgttccggaaaaatagaacatatagggggaggggttaagggtgcgcagcacccggtaggtgttgaacaggctgccctcaaagggggccgacaggcagttggagaggacgatctgaaaaatatccccttcccggatgtggaccttggcctgctccaccattcgggagaagtcctcccggccgaacagcggcgtcaccgggcccaggagccgcccggcacggtcctgcttctttgctccggtccgcagcagctccacaagctgtctgagctccagcaccgccttgttgtagctggtctccggctcatccagggacatattgaccatgagaatgagcttctgccgcagatggtcaaaggcaatgaccttgtcaaagagcatcagatcaagatcccgaaattcctcgctgtcctccacctccgcccggacggacggctcgctgtaccccagatagtcataggagaagtatcccacaagcccgccggtgaagggagggagatggtcaaagcgggggcttttgtgctcctccaggacctgacgcaggtaagcggatgggtccgccgttgggaagtgaaggcatccggcccgcatctccccgttcctgcaggtgatctccagactgggatcaaagcccaggaaggtgtagcgtccccaggtctcatggctggctgcggactccagcatatagcagtgggtggaaacctgcttcaggatgcgcatggcttctatgggcgtggtgaagtcagacaggatctcacagctcaccggaagcacccggtatcgtctggcggaagcgatctcctggactttctccaatgtgggaacgatctgcatggtctgcacctccaaataaaaatactcctctggcgtttctgccagaggagcaaaaaatcgtccttgacagaaactacggtctgtcaaggacgaataaaacacattatccgcggtgccaccttgattcacggcatgacccgtgcgcttagcgggataccaacatatccccggcaaatgacgtctgcctgcaacgtcgcagcatactctgtgaatctcacatttgactgcgccctcagcggtccatttgacaacttgtttcttacctgactctcagcaccacaggctctctgtaaaggcatgattgccgttatctccgcttcaacggtttaggatattaaattttttatcactatactactatgccctctacttgtcaagggctattataaaaaattccccacgaacgtgtattgtattcctacaaatacgcaacagcaactttttaattaccccttgacttagtaggaaaatggtagtataacattatacataccaattccgtgggtaaaaggagccggttatgcaaaaacattttttcagacttctgcggaataacttccgtttcggacgaatgtgttatctgttcttcctagcaaaataaatcatggaacagaaaggaacacaactatgtctgattacaaatttgaaacgctccaactccatgtgggccaggagcaccctgaccctgcatctgatgcccgtgcggttcccatctacgctaccacttcttatgtatttcataacagtcagcacgcagcagatcgctttggtctggctgatacaggcaacatctatggccgcctgaccaattccacccaaggtgtttttgaacagcgcatttccgcattggagggcggtgttgccggtctggctgtcgcctctggcgccgccgcgatcacctataccattcaggcgcttgcaaaacagggagagcacattgtagcacaaaagaccatctacggcggcaccagtaatctgttggcccacaccttgccactctacggcatcaactccagctttgtggatgtccacgacctcgccgccgtggaacatgcgatccagcccaacaccaaggccatctacattgagaccctgggcaaccccaacagtgatattcctgacattgacgccattgctgacattgctcacaaatatggactgccgctggtaatcgataatacattcggcaccccctatctgatccgtcccattgaacacggcgctgacattgtgatccactccgccaccaagttcattggcggccacggcacgaccctgggcggtatcattgtggacggcggcagctttgattgggcggcaagcggaaaatacccctggatcagcgcagcgaatcccagctaccatggcgtaaagtttacagaggctgcgggaaaggccgcttttgttacctatatccgcgcaatcctgctgcgggacgagggtgcctgcatcagtccctttgcggcttttctgctgcttcagggtacggaaaccctgagtctccggctggagcgtcatgtggagaacgcaaagaaagtggtgaaatacctgacttcccatccccaggtggaaaaagtcaatcatccttctctgccggaacatccggatcacgcgctgtacgaaaagtattttccgaacggcggcgcttccatttttacattccaaatcaagggcggacgggaggatgccttccggtttattgacaatttgaagattttctctttgctggccaatgtagcggacgtcaaaagtttggtgattcatccagcttccaccacacacagccagcttacggaggaggaactggagaacgtgggaatttaccagaataccatccgtctttccatcggcacagagcacattgatgacattatcgcagatctggagcaggcgttccagcgtgtcaaggaggtatgaccatggcaaacatttatacttctgctgaccagctcatcggcaagacgcctttgctggagcttacccatattgaaagatccgagggcctggaagccaggatcttggcaaagctggaatacctcaaccccgccggatctgttaaggatcgtattgcgaaagccatgatcgatgatgccgaagcgaagggatcgctgaatacccggtcagttattattgaacctacctccggcaacacgggaattggcctggcatctgttgccgcggcaaggggctaccgcatcatccttgtcatgcccgacaccatgagcgtggagcgccgccagctgatgaaggcgtatggcgcggagctggtgctcaccgagggggtgaagggaatgaagggagccattgccaaagcagaggagctggcaaaggaaattccggacagctttattcccggccaattcgtcaacccggcaaaccccgccgcgcaccgcgccactactggcccggagatctgggcagataccgacggcgaggtggatatctttgttgccggtgtgggtacgggcggcaccattaccggtgtgggcgaatatctcaagagtcggaaccccgctgtcaaggtggcagcggtggagccggcggcctctccggtcctttctcagggagtggccggagcccacaagatccagggcatcggcgcaggctttgtgccagacaacctgaacaccgagatctatgatgaagtcctggcagtgtccaatgaggatgcctttgaatatggcagacgtgtgggacagcaggagggagtgctggtgggcatctcgtccggcgccgctgtctgggctgctgtagagctggcaaagcgccccgaaaacaagggtaagaccattgtggccctgctgccggacaccggcgacagatacctttccactcccatgtttgcagatgaaagaccgaggagtatattatgatttacgcagacaatgctgcaaccaccaaaatgagcaaggcggctatcgatgctatgctgccctatatggaagaatattacggcaacccttccagcctctacgcctttggacagcaggccaaggaagcgctggaaaatgcccggagccggatcgcggcctgcctccatgccgatccgcgggaggtcacgtttacctccggaggcagcgaggcggataaccaggccattatgaccgccgctgcgctggggatgcgcagaggcaaaaagcatattgtttccacggcgtttgaacaccatgccgttttgcataccctggaaaaattgaaaaagcaaggctttgaggtcacccttctggatgtacacaatacaggacttgtgaggccggagcaggtggctgaagccatccgggaagacacctgccttgtgaccatcatgtatgcaaacaacgagatcggtactattcagcccgtcacagagattggggctatttgccgggagaaaggcgtgctgtttcatacagatgcagtacaggcggcgggacacctgcacattgatgtaaaagaacagaacatcgatatgctctccctttccgcacacaaatttcacggtccgaagggaatcggtgctttgtatgccaagcgcggtattatcctggaaactataatcaacggcggcgcgcaggagcgcggaaaacgcgcgggtacagagaatatccctgccatcatgggcatggcagcggcgctggaagaagcctgtgcggccatggacgagcacagcgcaaaactaacggtcctgcgggagcggctgatccatggattggatcagattccttatagcgaactgaacggcgatcacaaacatcggctgcccggtaatgtgaatttctgttttgagggcatcgaaggtgaatcgctcttgcttctgctggatgacaagggtatctgcgcttcctccggctccgcttgtacaagcggctctcttgatcccagtcatgtgctgctggcgatcggcagaccccacgaggtcgcccatggttctctgcggctcagcctcggcgaggacatgacagaagcagatatcgatgagatcattcttgccgtcacagatgtggtaaactatctgcggaatatctctcctttctggagagatttggtcaatggtaaacggccccacatatttgaaagataagaggtgtgtctatggctttgtatagtgataaagtaatggatcatttccgaaatcctcggaatgtaggtatcatagacgatgcagacggtgttggagaggttggtaatcctgtctgcggggacattatgaagatctatctgaagatcgcggataacaccattaccgatgtgaagtttgaaacattcggctgcggcagcgccattgcttccagttctatggcaacagagctgattaagggcaaatcgttgaccgatgcccttgcactgaccaacaaggccgttactgaagcattagatggacttccggctcataaactccattgctctgtattggcggaggaggctataaaaaaggcggtcaaggattattacgataaaaatggcattccttatgaccacagcctgttcccggattgtgaacactgtgaccactgtggcggatgaaggcactgattaccatgagcggcggcgttgacagcagcgtcgccgctctcctgacacagaacatgggttatgactgtattggatgcaccatgaagttatttgatgattcatctacagaaactgctcggagccgaaccttttgtgctctggaagatgtggaggatgcgcgaagtgttgcgttcagaacaggagtgccctattatgtgtttaattttagagataacttccgcagtaaggtaactgaaaaaaacatccaaagctaatattcaaaagaccatagactttgttgccacctgttagggtatggaaagaatgcagagatatcaaaagtttgaatggttgaccatcgctttagatagccaaatatgcagagcctatataccgtaaaagatactatcagcagaaagagagctaactgacgaatcaagatcagttagctctctttttatgaatcatgaaaaaatgttgcaaaatcgttggaacagaaggtcttaagccctcaaaaacctagtaaaatcaggcttttctaggcttctgaacttattcccactcgttgctgggtatcatattctaacggattttgctttagaaatatgatgccctgttcttttgattatttgatatatccatattatccagcctatacgatgggctgttatcaaattgttatcagtggtgataatgggaggcagagtatattgctttttctctgctggtttacgactttaataatagcacaaaaggcggagaaatgcaactatactctgtttccttttgttgaacaaatcatttgaaaaaacccccaacaaacaggaacttactgctttgtccactcaagcaaatacctgtaatatagtccgtatttaatgattgcgtgggggagtactcttgatgaaatatcccgcacttcgtttaatggaggaagatgatacgatactggtatatttagttcttcacttgaccgcatatgcttctgtttagatattattttgcatggcaaaattcgcagaccttctatcacatagtctgcaacggtagagggaatcgcaagcccgacaataatcagtatcccattcggggaaagtaatgctttagccctttccaccgcaaccgtcatatccatatgatgaattgaagcaacgaagataattgcatcataggattggcgtgtctcatagtcctcaaatccgcaacaaataaattgtgtatttggtgatttgttctctacatttgccttggaaatgcaagagaaatcaacatctatgccaattaaatttttggtgccatcatcaagatacgcaacaagagaaccatcaccacatccaacatctaaaatagacttacaatctgctacctgtcgctttatccatttgtagtaagctgtattatgattccaatataaaggttctttcatagatacctccgcaaagatagatttggttattctattatagcagtaaagtcacctgctgacaagtaaaaatcaggagggcacccttttggagcgccctcctaatgttcgttaccttgccccccggctaaacttccgttttgctttcttctgctctttctctgccgcctcccgacgctttgcgtcctccacggctcgttctacttcctccgggccgaaagcccgcttgacccgctcaaagtcggcaactgtcccccgcagggccttgttctccatcttcacctcctgcaagcgttcggacaggttggcgttgccctcccttgcccgtccatagtcaccctgcaaacgctcatacttccctttcaactcgacataggcccggtacagagagcgcagcaccttgacgatcttagcaagcagaggcttggcttttttctcccggtaggacttggcactctccagcggccccggctccggcaatatccgctccgggtcatcggagaactgcgccgccaactgctccatgttccttacagccggggccagctcctttagacgttgctcctgctgttccacctgtccctgtttcttggccttgaccgcctccagctcggcaatctctttcgccctctgctcctttttgaagtccagcacagacaggtgcttatcatgagtgcccttgtcctcccactctatcccgtggcgctccatcacggcggcaagctgttccttttcggagcgtacccactggctccactccgtatcgcccctggtgccgcccttgaaaccctgggccgctaacgcctgtttgagagatacccttgtgtccaggccccgcttgctcccggtggtgaacggtacaaagtcgatgtgcagatggggcgtggcctcgtccatgtggaggtgagcggagaacacccggagctgggggttgcgctcctggaaacctctcatgtactcgtccagcaccgccgccgcaagctggccgtcctcgctctcggcgctcatgtcgtccttgttgcccacttgcaggatgatttcatgaaacggtttttcctgcttactggaacgtatcttttcgtagtagtcctcaatcttgcggtctgccctggtctgcttgtcattgtaccgcttgagggcctcgtcaaaaagctcatggaaaaccgtcttgatattttcgtggcagtaggttatattcaagtgggagcgttccgggtcggtattcttggcgttgaacttcctgctgttgtggttcaccgaaccctgccccaccatcgcactaatcgtccttttcaaatcaacactcctttcgccgcgccagcggcggcctttgttactttctgcgaaagtaacgcaaaagcacttttgacggccttgcggccatcaaaagcgcatttgcgccctacggggtggagtgggggcgttgcccccgccgtctgcggacggctcccccagcagggccgccctttgaaaagggcaccctgcaccccgcctaaactttgacactcgccgttgggcagggggaaaggcacagcctttcccccacccggccagtgtcctccgtgggccaaaagtcaaggggtttgggttgtattgccttgcggcaatctccacccgcaggtatgcccccttgacttttggccccgctccccgtgacggccgtgacgaccgtgacgatgttttacacaccgcccccgctctcaaaaaagccgtcacagccgtcacggtcgtcacgcctggggcggttccaaggtgagggtgatacttctcccggcgtggctcctgctgttctcatagcggatgtggtactccgccgccagcctcccggcccggacattcagccgcatagccagggcgttgggcttcatgtcggtctggagcgccgccgccagttccgtggccgtaccgccccaggcgggcctgtccgccgtcacaagggcggcaacggcctccaataccgggtcgggcggttccacccacggctccgtttccagccgttccagctcccacacaaggcgctccttgtccttggtgagatacatccgctggtcttgctggtcacgcccggccacgtccagaatggcgctgccgtccgtccgcttctccttttgaagaagaaaggccccgtccgcagctcccaacaggccattggtgccggaaatcatatcaaacttgtcgtctgcctgttgctttcgggtatggtgtaccagcaggagacagataccgcaatcatcggcaaggcgtttcagcgtgcccaccacctcgtaatcgttggcatagctgtacttgtccccgccagcctcccggactttctggagggtgtcaatgataatgagcttggtatcggggtgttcccggacgaacattttgagctgtccctccaggccaacgccaagctgtttggcgtggatcgcaaagagtaagtcgttggtgccgtccatgccgaacatccgatacagccgcccctgcaagcggcggtggtcgtcctccaacgccaggtagaggacggtgcccttgtggacggggtagccccacagggggaggcccatgctcacatggtaggcaagctgggccatcaggaacgacttgcccaccttgggcgctcccgcaaagagatacgtccctgggtagagcagaccgtcaatgattggcggtctgctctggtagacattctggtaaagctcactcatggaaatggtggggagataggccgggtcagtcatgcggcgcatttccagaagcctttcctccaaacttttctcctgggggttgttttcggtcgtttcctctgctatacttggggtagttgtttgtgaaatgggctgttccccgtctgcgccaacagacggaaccgggacagtccttttcgtttctctggaatccatcaatctatcaatcctccttcatgccgtccagcgtcacggtgataaggcggatggtggcgagcagttcatcatccatcccgcccccggcctctatgcgccgcagctcccccaggacggcggcgagctggtcacgcagggccttgtagaccctgggattgccctgcaccacaatgtcccggttcagcagccgccgggtgatgtagtcctgcttggtcagcccggacaggcggacagcaatctcaagctgttcgtcctcctccggggacactcggaacgccacggtcttgttccgccagcggttgtgattgtccaaattcttagccgacattatgctcccgtcctttcaaagtccagcttgtccgccatttccgtctgcttggacggaaacaggtgggcgtagcggtaagtgatctcgatactctcatggcctactcggtcggcaatcgccaccgccgagaagcccatatcaatcagcagggaaatgtggctgtgtcggaggtcatggatacggatacgcttgaccccggcctctttcgcccctctgtccatctcatggtggagatagcttttcgtaacggtgaaaatgcggtctttcttcttgaccccgtagagcatccccaggtagtcccgcatttcgtcacagaggaaattgggcattttgatggtacgattgcttttcttggttttcggggtggtaatgacatcctcgccgtggagccgctggtaggacttgctgatcttcaccgtcccggcctcaaagtcgaagtcagccggggtgagggccagcagctccccctcccgaataccgcaccagtagagcatttcaaaggcgtagtaagagaggggcttgtccatcatagcctccgcaaaccgctgatactccgcctttgtccagaacagcatttcctttcgttcctccgtccccatgttcccggctttagcggcggggttggagcgaagctcatagaaacggacggcatggttgaaaatggcgctgagctggttgtgcagggttttaagataggtctgggagtagggcttgcgctgttcatcccgataggccagcagctcattctgccatgcgatcacgtccttggttgtgatctcgctgatcttccgcttgccgaagtagggcagaatcttcttctggatgatgttctccttagtcagccaggtgttctctttcagccggggccgcacatccttggtgtaaagctccacaaaggcttcaaaggtcatatccatgtcggcggcggtctgcatttgaaagctgcgctcccagtcctgggcctcccgcttggtgggaaagccccgcttgcacttctgcttacgctcccccgtccagtcccgataccacgccatgacgtaccatgtgccccgcttttcgtccttaaataccggcattttcgttcacttcctttctggccccgtagagccgttcgttgaaatactggcggttgacccgccccgcaatggtgatgaagccctttcctttcagttcctcgttgagctggcgaatgagcttgtaggcgtagggcttcgacacgcccagctcgtccgctacctcatccacccggataaacttgttctccatgctggttcctcctttcttgaataataacgctatttgtttaacgttgaccctattatactaactctattccgttatgtcaaggctttccaagaagaaaatataaacaaatttatttatatttcgcttgacagttctaaacatatctgttatactccaagtgtccccattacatagattggagttggcagttatggcgattggtgaacgtattcgctttttccgcaataagaaaggtgtcacgcagaaatatctcggtcaggtggtgggctttcccgaacgctccgccgatgtgcgtatggcgcagtatgagacagggagccgtacccccaaggccgacctgacccggacgctggcgggcttctttgaagtctccactgacgccttgaccgtccctgacatagacagcgacattggccttatgcacaccctctttgccctggaggacattcgggggttgaccattggggagattgacggcgaaatctgtctgcggctggacaagtccaagggcgggacttatctctccatgcttgaaatgctgtccaggtgggcaaatgaggccaagaagctggaagcaggggaaatcaccagggaggagtacgaccattggcgttacacatatcccgcagttgaggcccagcgcacaagggatgagcttgacgcactccgggcaaagcgcaaggcggcggagacagaggaatagacagcaaaaagcccttaccgacattgccatcggtaagggctttctaatatggattttgtcacccacaagccgcaaaggaacacttttcacctgcaatccaccggggatacagaatgatacggcctatggggaacgttatcaaattgttatcaaaagagggacgcaaaaccgtctatccgttgtgccgcaaggggtttggagtttcaaaaactcattcccactcaatcgttccagagggcttcggtgtcaggtcatagagcacacggttgactcccttgacctcggaggtgatgcgggcggtgatcttttgtagcagggcaaagggcacatcctctaccgtggcagtcatggcgtccacggtattcaccgcacggaggatcacaggccagtcaaaggtgcgcacgccgtcccgtacgcctacggacttgaaatcaggcaccacggtgaagtactgccagacccttccctggagcccggcggcagcaaactcctcccgtaggatggcgtcggattcccgaacggcctccaggcggtcacgggtgatggcgcccagacagcgcacgcccagacccggtccggggaagggctggcggtacaccatggaatcgggcaggcccagagccttgccacaggcccggacctcatccttgaagagcatcttcagaggctccaccagctcgaatttcagatcctccggcaggccgcctacgttgtggtggctcttgaccgccttgacggtcttggtgccggactcgataatgtcggggtagatggtaccctgggccaggaattcgatgccctccagcttacgggcctcctcctcaaacactcggatgaactccgtgccgatgatcttgcgtttctgctcaggatcagctgcgccggccagtttatccaggaagcgatccactgcgtccacatagatcaggttggcgtccatctgatggcggaacacctccaccacctgttctggctcgcccttgcgcagcagcccgtggttgacgtggacacaggtgagctgtttgccgatggcgcgaatcaaaagggcagccactacggaggagtccacaccgccggagagggccagcaggaccttccggtctccgacttgctgccggatcagctccacctggtcggcaatgaagttctccatattccaattgggctgggcgccgcacacaccgaacacgaaattggagagggcctgcttgcgttcctcctcatcgctgggccagggctgatcacccttgtggtcggccagaaggacggggacatcgtggttgtagatctccttggcggcgtcgatctcaacaccgtccaccacccggttggggccgccgtttaggatgatccccttcacgttggggagggccttgacctcctccagtgtgatatcgtgggggtggatttcgctgtaaacgcctagagcgcggatctcacgggccagacgggggttttcctcgctgccaagatcgagaataaggatcatgtcctgtttcattttggtacctccacttcttgttgaatgatgcctctatcctaccacaacagacgccgggccatcaatagaaaaatagaaaaaaggcggatcttgcgggagaggagaaaagcgggggaagggcggctcagcgccggagagcaaagacgccagaacgggtggggcagaaccggggagactcagtcggacgtgtgacgtgtgttgtatctggcctgtgtatcccggctctaagaaatattttgcaataaaattggcggaagcccttgacaaaggtaagtgcgtctgctaaaataacctctgccctgtgaggcacaatatgggggtatagctcagctgggagagcgcttgaatggcattcaagaggtcagcggttcgatcccgcttatctccaccaaagagaaagacccacacagtttaactgtgtgggtcttttattttttgagaaaaagaggacggcatctagaatcttatagtgctgggggacaggggaggcggacggtgaaggtgctgccctgatccaccacgctatccacccggacctggccgccgcacagctccaagatccggtaaacaatagacagccccagccccaggcctctcccgctgccgctggagcggctgccttggtagtatttatcaaagacatgggagcggacctcctccggcatgccgatgcccgtatcagcgaccgagatctccagctcctccgggcggacctggagtgtcacagtgatctcgcccccttccggggtgtattttacggcgttatcgagcaggttgatccacacatggcgcatcagctcctcgttgcctacgaactccgccggctccaggctggcggtaaaggagatctgctttttctcccaggagggggagaggaggatggcgcaccgcttgatctgttcgtccagggggtaggggcgcttctcagcaataaactgctgggactccagccgggtgaggagcagggtgctgttggccaggtcggccaggtgggaggactcatccagaatgatctggagatactgttcacgctcctccggggtggtgtccggctcccgcaggagctccgcaaagcctttgatagcggtgataggggtcttgaattcgtgggagaagtggttgatgaagtcggagcgcagggtctggatgctctgcagctctttggacatcttgttgaaatcctcataggcaggctggagggggccgccctcctctggctccagatactgggaaaaatccccgtctgccactgcctttaagccccgggtcaggccggacaccattcggttgaattggcggctgaacagcgtggcggtgatccccaccaccagccccatcaccgcgagaattccgagcaccgagaccgtggatgcccagagccagtggaaccggtccagaatgtggagcatcgcaaagggggccactgtcaccagtgtgaccacaacggactcgatggacagccagaaggccagcgtgcggttccgccacggacgtcgctttttcatggctgctcctcctttgtgatctccgccttatatcccaggcccttgatagtgacgatgcgaaactcgggaatgtcccgcagcttgttgcgcaggcggctgatgtgggtcttcacggtatcctccccactctccgagtcatagccccagaccccgtccagcagctggtttcgggtgaagatctgtcccggataagacagaagcttatagagcagctcgaactcctttttgggcagctccatagccgccccctcccgggtgacggtgtatgtccctgagtccagcactgtccgccccaccacgatccgatgctcgctggcgatgtgcgcccggcgcagcaacgcatccagccgccagatcagctcctcgtagttcaccggcttggtcatataatcgtccacgccggaggaaaatccctcacgcttgtcctcgaaagactgtttggcggtgagcaggaggaccgggatctggtccccccgctcccgcagggtctttaccagcgtatagccgtccattcgaggcatcatcacatcagcaatggttaagtccactggctgccgttccagcacgtccagggcctccaccccatcctggacgctgatgatggcataccggtgcttcagcttggcggtggtgagcaggcgcatagaggtatcgtcttccaccagcagaatggtcgccattgccgtctcccttccccggccttggtttgggaagacccctctgggcagttctcccgcgccggagttatttttgatagttccacaacaaaaatcaacgaaagaacaacagcctagtatctcatccatgggatatagggtgtcacagacattatatcgtcccaggggctgtccgtcaaagggagagcccgcctttggaagaccagcatagccccttcgggtaaactagacgtaaacttcctgtcgctctttgtgggtttttctaaaaaatgtggggcagagagggggatttccggcgttttcttcctgccgcccgggcggcccagtttacaatgagtttacctgagcgtgctatgctaccgccgttagaaaatctgcacgaacgcgcagcgacgatggaggcacaaccatgagacaaagaatttctctgctgctggctgtattgattctagccggtacgctgagccttcccaccctggccgcagagccgggggaggacaacgcacgggagaccggggcccagaatgggggagtccagcaggtccctgctgacccggaggagacccagaatccccggcccgacccggaggggacagtgacctgggccaacctggacagccgcatccgggaggggagcctgagcgccctgatcctggcggagaacatcggcggcatcgagggcatcgactatgacctgatgtatgatgatttgcgccgacagatcaacgacatcgccgatctgcagtggatgatggtcctgatgggcaacagcatgggtgctgacgccctggaccagacctatgacgctctgcgggagacctttgacgcgatcaaggacggagagctgcaggcggacaacgccgatgtggtgtggcagctggaggacacggtgaaccaggtggtctccgggggcgagacgctgtacatcacccttctgggcctggagcagcaggccgccgacggacagcggggcctggccgccctggaccggagcttggaggagctgcgcctgcggcagacgctgggccaggtgtcccagcagacggtggctcagctggagcagacccgggtggagaccgtcagccagctgaacagcctggacgccaccatccgggagctgaaggtccagctccagaatctcatcggtgaggcccccaccggagagctggaactgggcgctctgcctacccggtcggagacagtgtgggaggtccccgactatgaggccggcctggaggccgccaaggcggccagctggaccctgcgcagtgcccagaaggcgctggaggatgcggaggaggattggaaggacgcccgctccgactaccgctcctcccgcaagcagtacctgctccagcaggcggagcatacctggaacgccgctcagctcacctaccagtccacagtccagaacttcgagaccagcttcaaaagcctgtatgactccctggccaactatgagcagctgtatgccagtgcccagtccgctctggtttggcagcagtcccagctggacaccgtccagacccgctatgacctggggctgaccacctgctccgcggtgctggatgcccaggacgaagtggcatctgcccaatctgccctggacagcgcctggagggacctgttctccgcctgcaacagctatcgctgggcggtggagtacggcctgctcccggcccagggagcataaacagagacactcagggcggcccctgccggctgcccgcagtttgaagggaagaaaggatggaacacgactccatggatcgcaaactttccgttttattgtgcggtgccctgaccctcgccttggctggctgccaggcgccggtggaggagcccctgctggaccccaccgtaacggtggagaccaccgccgtccaggccggggacctgagcacccagagcacatacatcggcaccatctccgcagagggtactgccagcgtggtatccatgatctccggcaatgtggagcaagtggccgttgccgtaggggacaccgtctctgccggggacctgctgtgccgctttgatgacgagagcgcccgcctgagcctgcaaaatgcccaggccgcggccaacagtgcccaggagagctataacagcgcggtgtccaactacggcggcacggacctgcccctgctgcaggagcagctgcgcctggcccaggacaactatgacgacactctggccctgctggagatcggcgctgcctcccaggtggaagtggaccaggcccaccagaccctcctgtctgcccaggctggcctggaggcggcccaggcatccctgaactctgcccgggcgggcatccagtccgcccaggtgggggtggattccgcccagtaccagctctccctctacaacctcactgcccccatcaacggcgtggtggaggcggtgaacgtcacccagaacaacttcgccgcctccggtcaggtggccttcgtcatctccaatggaaacaacaaaacggtcaccttctatgtcaccgactctgtgcgccagacccttactcctggccaggcggtcaccgtcacctataacggccagtcctatgagggggcggtcaccgagatcggcggcgtggtggacgcccaagtgggccagttcagggtaaaggctattatcgacggagcccaggacctgcccgacgggctggcggtggagctgaccaccaccgcccaccaggtcaccggggcagtgctcatccccagcgacgctatgttttttgaaagcggcgtctcctatgtgtatgtggtccaggacggcaaagcggtgcgctccgacgtgaccatcggcctgtacaccgctgacaccatcgccgtaaccagcggcttgaccctgggggacgaggtcatcaccacttggtcctccagcctgcgggacggggtctccgtgcagaccgccgcccagacggaggacagcgagagcgcccaggccgatccggcggcatccggcccagaggcggagggataacgtggcatgaagttcattcaattagtcctgcggcgccccatgtctatcatcaccctcatcctgggcgtggtggtgttcggctccgcttccctcaccgggatgcccctggagtatatgccggacatggagatgcccatggagctggtgatgatcacctggccgggggcagatgcggacagcgtggaccggctgctaacccagccaatggaggacgagtgtgagtccctgtccgatctggactccatcaactcctactcctcggaaaactacaccatgctccagctgacctatcaatacggcacggacatggacgacgcctactctgatctgaagagcgccatcgataacctgatgccctccctccctgacgagtgcggcgaccccatcatcatggagatcagcgccgacgccctgggaaccatgatgatctccgccactgcccccgcgggcatcgacgtggcggactatctggacaacgaggtggtccccgccctggagaatatcggcggcgtggcccgggtagagctgtccggcgcccgggatgagtacctgcgcatcgtgctggacgaggcggccatgcggcagtatggactgtccatttccaccgtgggctctgccatcgcggcggccgacttcgacatgccggtgggcagcgtgtccctgggctcccaggacatcgccctgggcgtgtacggcaacgtggaggtcaaccccaacttccgggatctgcccatccagaccccttccggccacacggtaatgctggaggatatctgtaccttcttcaacctgtataaggaggatgcggacaccgtcagccgctacaacggccaggagagcgtcatgctcactgtcaccaagcaggattccgccgccactatggaggtgtgcaatgcggtccaggacgtgctggaccagtacagcgtggacggtgtgggctttgagaccatttacagcgagggcgacagtatcctggagaccctgggcgaggtgctcaataccctcatcaccggcgtcatcctaaccatgatcgtgctgttcgtcttcttcggcgacctgcgggccagcctgatcgtgggcatcagcatgcctctgtccatcctgctggcagtgatcctgctgaactttgccggcttcaacatcgacctgatgaccggctcggccctcatcatcgccatcggcatgatcgtggataactccattgtggtgctggagagctgcatgcgctgcaaggaagagggaatggatttccgggaggctgccgccaccggcacggccaccatgctcatgtccatcctggcgggcaccctcaccaccgtggtggtgtacatccccatggccatggccgacggcctggtgggcatgatgaccggccccctgagctggaccatcctgctgaccctgctgtgctccttcctgtgcgctgtggtggtggtcccactggccttcctctggctcaagccccggaccaaggatcagcttattaccaaccgcatcctgggccggttcaagggcttctaccgccggaccctgccccggctgctgcgccaccccgggcgggtggtgctggtgggcggcgcctgcttcctggccgccatcctgctgatgacccagatggaatttgtgatgatggccagcaactatgacggcagcatcactgtggacgtagctttccgctcgggcaccaaggtggaggtgatgaaccagcgcattcagaccctggaggacgccctcctctccgacgagaacttcgagagcgtgaccctggacctgtccgggaataccgcctccttcaccgcctactccgtagataactgtgaccgctccagcgaggcggcggtggaggagtacaccgcccgcttcggcagcgtgccggatatggatgtgtctgtctcccccagcggcgccatggacatgagcgccctgatgagcagcaacagcaaggatgtggtcctgctgggcagcgacctggatacccttcagaccgcagcggagcaggtggaggaggccatgacacaggtccccggcgttatccgcatcgagaaccccttccgctccagccagtccaagggccgcatcgtcatcaattcccagaaggccatggccctgggcacctctgagtcagcggtggccatgcagatctactatttgctggagggcatgaatgccacatcggtggactacggcgacacggagtatgatgtggtcctggagtaccccgagggcaagtacgacgatatctccgccctgctggactaccccatcaccacccagactggccagcaggtggccctgcgggacatctccaccgtagagtacatcactactctgcccaccatcacccggcaggaggggcagtacagcgtcacccttacggccaccaccaccgattccgccaagtacagcgccccaaaagagatcgacgcccggacggcccagctcgacctgccccagggggtgtccttcggcgtgggcatgatggatgagagcactgcagagggcctggagagcatggcgaccgccatcgccgcgggcatcttcctggtgttcctggtcatggccatccagttcgactccccccggctgtccatcatggtgatgatgtgtattccgctgagccttattggctccatcggcctggtgttcctcaacgggcggcccatgagcatcgtgggcctgatgggcttcctgatgctggtgggcatcgcggtgaacaacggcatctatctggtggacggcaccaaccagctgcggcagaccatgcctctaggggatgcactggtggaggcgggcaccacccgcctgcgcccgatcctgatgaccaccctgaccaccatcatctccatggtgcctatgattttttccaatgacagcggcatgagcatgatgaaggacatggcctacgtcatggtgggcggccttatcgcctccaccctcctggccatgttcctgatgcccgccttctatctgctgatccggcgggagaacctggacggcaccaaaaagggccgccgcaaaaagcagcagcccgaacctgtggaggccggaaacgcccagtcctgaccgcccccaatagagacaagacaggagcgccccgccggggcgctcctgtcttgtcttttccactgtggacagcttgcctttttccgagggggagagctccgggggagatccatgtgtgatggaagcctgtaccatgttttactatgaacgggaaaggtatatgccgtcggcagtggggcttaaatatgtaggcgcgtccagatcccaaaggaacaggatctcatagatccggctgacctctataaatattcccttccacctatcaaaaggattatgcacaatacaggacgcagctgcatcacactcagatgaagacacaactgtttgcggcacagtttgtttggaaacgcggtggagagggcagacgtgggaagagagatatgagggaggaactgtgatgcccagagcacaggagaatcgtatttcgggggagtgactttcttggctcctggcgggggcagcttttcatcgactgcggggatgttacactgcgcaggaaaagaagacctgaaaaaatgaccctttcaaaaagaagaggagatgttggcattaaaaatgctgcggagcatagctccgcagctggggatatgagaggcaaactgttttaaaagatcattggaccgatgaaagcataaagtaaaacgaaagcccatgcaaaagcggcaccaatccagtttgcacgaagagcttccttcgtgttgtcgcaacgggcggtgatcatctgaccgataaaattgctggtgggatagacagaactggtcaggcgggttgccgcgaggatagagacagcaaaaacacccataggaagtcctgccttaattgccatctcaccgaacatctcagccacgatctgaatttccagtacagcggcggtctcaattccgaatccgcccaccacggcggaaaccaaagcgagagcggtggctccaccactctgcgccagcccgctgagaagattgcccaaagcggtaaagccctcgccggcgttgaccaagtccatcataacggtgaaattcaaaagcaggaccaacgtggaggcctgactaccgatgcctttgctcagcattttgacaccttcatctaccggaaaaccggcaatcagaataataattccggccaaaagtagcatgacagtcagcgcataggaagtactctgcttcatcaggatgccgtaggtgatcaggacgacaaaggagatcaagaaaataattgtatttcttttttcctttggggttggagtgatagagtcaatgctggagatatcggaagaaagctcataatgctcagtgccttcggtaagccgctgggcgcggttgcatccgatccaggccccggtcagccagaagagagaaaaggggatcacagcatacagcatcagctgcccataggagaggccggttacctgcatggtgatcagggtgacaccagtcagcgggccaacgatcaggccgatttcgccagataccttgaataggacagccaccacggtgggggtgatgcccagagcagccaaaatcgggatcaggatgggagagatgatggcgtttccgccggccaaagtccccagcagcccgcagaccaagatggaggagaggatcagaacgatttttcctttggcacgagtgttgatgccgatccgtttgacgatccaatagacaagagtgtgggtgatacgtgcctccgtcatgagaacgccgagccctgttccgaacatgatgagcagaccgatcactgtggtggaggaggagatcgcggcggtataggcattggtcagggaaaccaggtcctgaccagtcaggaagaagccgacgatgatgcccaggaacatgcccagataattgccctttccaagaagagcaaacacaatgaagatgatcagcgggagcagcgccaggagagaaggggaagagatcaaagcccaattaccaagttccacaagaaattctcctttctgttctcgtttgcttatgtgcaggtgatcacaatttaccgcagcaacacttgaccggggcgggctccggttatggaaccagacttcagggaaaacacgccgcttaccaggacatgctcaatgccggacggggcgaccagggaatcggtgaaagtacattggtcacagacggactcataatcgaacacagtgatgtcagcagccttgcctggctccagggttcccctgtcacgaagccccaaaatggctgcaggaagggcggtcatcttgtagacagcatcctgaagagacatcagtctgtgctcccgcactgtctgcagaaaacggggaaaggttgcaatgttgcgagggtgagggctgggcaggccctgtgtatcctgaagagagaaggcggagccatcactgccaatggcgacatgcatgtcgcacatgatggtatggacgtcctcttgggacatggaaaaatagatggcagacacagttccggaacaacgcgccaaaatatgggcaacagtttcggctggggtaagtcccaggcaaacagagagctgggagacggtttttccgtgatattccggcgcgcttccgtgggtggaggcgactaaaacagcgtccgcgccgccgcgccgctccatctcttctgcgatgtcccgaagaaggaatgtgtctgggtccgacaccctgcgcagcatggcggcagaacctccgtcataggcccgcctggggagcagtgcggccagaatagtggaggttgcggtataagggtactggtcacaggtgacaacggctccacgttgcctggacgcttcgatgcgctcaagtaagcggggggcctgcccccactgggctttccccattagcttcaaatgggagatatgcagatgaacaccggtttcctccgcaatagagagcatctcttccactgcctggaagatattcggcccctcatttcgcatatggacggcgaggatcttcttatgcttttggaccacacgcgccagctccctcagctctgacgtgggggagaaactgccggggggatagatcagaccgagggatagtcccagggcaccttggttcagctgatcatcgaggaggaacttcatttgctccatttcagagggcgttaaggggcgatattgaaagcccacgataccagcccgcagagttccctgcccgatcagcgtcccgaggtgggaaggatagcctgtctgggccacatgagcggcatatttctggacagaggcatcacggacagcctcctccggcaccgggatctcgctgatctttcgaagataagccgtctgttccgcctgacaggatgggagaatgggaacggcagaaacgccgcagttccccacgatctccaaagtgattccctgcgctactttactttccggaaagacagcagaaaatggacaggtatcagaatgggtgtgaatgtcaataaaaccgggagagacgatttttccggtgacatccaccctcgtgcggcaattaccctcccactgagggctgatcgcgacaatttttccgtcctgaatacacaaatcagcctgataggggggcgtgcgtgtgccgtctatgatccagcccccggataagacagtatctaccataaacatcctccttgtatttttgtgagagttggcgtcagttttctgtgcttgtatctctcatgccctctgcggccggcttcgcagggacaggacgagtgttatgaaaggggagaacgatgcccggaactccagtttatccatttggtgtgagcctgcttgatggcgactaagatcgatttgcgggagtggccccaatagcgggcctcgacctgatggagcatctcttcgacctgtgtggaaaagctgtagcccaccagaagctgagacaggaaggagctggttatctggcagagcgcattgacctccacttccagaatggtgccggttttcgcatccaccaggaaggcaagaaacagaaccctatggcgctgggaaatgggattttctgtggcaggcctggagattccggtaatgtacagcgtttgaggaacggacatatcaaacaactcctgatatggttatggaaacaaaaaagacgcactgacattgaaaaatgtcagtgcgtcctacttacaacggcatccggggtcaccgggccaataaatagttctgaacaatatatagataactcagttcagcatcagtataaaatattgacaataatatgtcaagagaaaaataaaaaatcagccagagtgctgcggaagcatgctctgctcctgaagagtatgaatgatatttcggatacagaaaataagggccttttgagagtgcccaagataccgggaaccaatatcttggataattgcattgtaatcggtataaatgcttctgccgaccaaaaggcttttgacaaacctctctgtaatatcacagacagaattgatatctgcatcataaatttggcctgaatcccggtcaaagatgatcggcagaatgaggtattggctggcgacagtaattgggttttctgcggcagccttggcacaaccgacaatataaatggaattctttgaatactccattatcagtcccccaaccatatctgatcgtttaaaatatagcataaatacacagaaccgtcaagaataggaacacacaaagagaaattttgccacgggaacacaagacgaaattgaaaactccatgttttttgccaaaggaccctttggactgcctgcagctgttggggcagttcatggaggcggacgtggttttggctgttttacatatagattttacaaagaaatcattataaaatacaactgttaaaaagcaggggtgccggggctggggtcctgcacggcaggatcaagacgccggacaggcggagtgcggagaagcgcggccataggaggcgggagatggtgaaaggggaagtccataatttttccagagggagcatcccccgcaatatcatgtccctggctctgcccatgaccgccgcgcagctgatcaacgtactgtacagcgtggtggaccgggtctacctggggcgtctgcctgggcatctggccctgaccgggctgggactgacgatcccaatcgtatccatcatcatgggatttgccaacctgtgcggaactggaggcgcgccgctgtgttccatcaaacggggacagggagacaatgaggaggcggagcgggtgctgggcaacgccttcaccctgctgctgatctttggggctgcggtcactgccgtctttctatggttcaagcagccgttgctctacctgttcggcgcaagcgacgccacctatccctatgccgacgcgtacatgaccatctatcttctgggaacgatctttgtgatgatcggcctggggatgaatcccttcatcacggcccaggggtttggcggggtgggtatgttgacggtggggctgggagccttggtaaacatcgtgctggaccccatttttatttttgggatggggatgggggtgcggggcgcggccctggcgactgtgatcgcccaggggtgctccgctctgtgggtgctgcgcttccttaccgggcggcgggctattctgcggctgagggtgcggaatatggcgctgtgtgccccacgggtaagatccatcgtgaccctgggcctgtctggcttctttatgaacttgaccaacagcttggtccaggtggtgtgcaacgccacccttcaggcctatggcggggacctgtacgtgggggtgatgaccatcatcaactcgctgcgggaggtgtttttcatgccggtgcagggcctgagcaatggcgcccagccggtgacggggtacaactacggcgccggacagtacagccgggtccgccgctccatccgcttcagtgtggcggtgaccgtggcgtatgccgccgccttctgggccgtggccatgctgtttcccggcatgctgatccgggtgttcaacaatgaaccagaggtggtggaggctggtatccctgcgctgcgcatctatttctgcctgtttatccccatgtccctccagatggcgggtcagggcgtctttgtggggctggggcgctccaagcaggctatcttcttctccctgctgcgcaaagcggtaatcaacgcgccgctcactgtcattcttcccatttggatagggacgaccggcgtcttcacagcggaggccgtctcccagctgatcggcggcctagcctgtatcctcaccatgtatttcaccgtctaccgcccgctgggcagcctgccggaccagcccctggagcgcgtgtgacacgatcggagcataggaaatgcaaaagcggactgcaccagcagtccgcttttgcgtttgtggttccaaagcatccggcttagccgaaggttttggcttgtggaagatcagtttcccaaagtatcgccataagaatgcacattgtctgggagtcggaactgtccaacaagatcgtcaaggagctgcgcctgggaggacaactcctcactggcggcagcggactgctcactggtggcagaattggtctgaacgaccgcggaaatctgatccaatcccacagtaacctgtgcgattgccgctgaaatggtatccaccatttcagctaccctgaccatatcgtctacagccaaaccggcaagatctgttgtcttttggagcgaatccgttacatttgtcacaatggcgtttccattttgcaccgactcaacagaactctcgatcagttctttcgtggccttagccgcttggtcggatttaaaggccaaattgcgtacttcgtcagcaacgaccgcaaagccctttccagctgtcccggctctcgctgcttccacagcggcattgagggccagaatattggtctggaaagcaatgtcctcaatggtagtaatgatattcccgatttttttagagaactctgtgatctctgccatggcagtcgtcatttggagcatcattttgttgctctgcatgacctgtccaccggcctcctcggcccgggagcgggactgtctcgatacatccgctgtttcgtccacattctgagaaatgtcatgtacggtagctgccagttcctgtacagaactggcctgttcggtcgcaccctgagccagtgcctgggcgccgtccgatacctgggaagagccggcagcgatctgggcggaacttgtgtggatttgggagagcacatcgctcagcttgttcttgatgcggcgcatggagaccagcaagggggcaaagtctccaatatacagctccggaacccgggaatcgactacaaaattcccctctcccatctggctgagcagatagtcaatatccttcaaaatggtacttaaggcggtgacaataattttggtggaggataccaattcgcccacctcatcgttgcggtcaaagtcgggtacgggagcctccagatttccttgggacagcagatggaggcggtccgaacaggccttgatggggccgccaatgccaactgccaaccgcagagcaaccaaggacgcgacaatgacagccgcgataagcagaacaagggtgataatgatccccaggatggctgtgccagtaaaatcggaggttggggcattgatagcaatgctccagccgttggtctcagggacgggagcatacgcagtaaactttgtctctccgccatagctgtactggctgaacccggtgcctccagcaatcatatccgtctcgatcgcggccaaatcggccagagatttatcgccttttgcatcttgaatggtattttcctgattgcggacgctttccagattgcggtgggcaatggtgttgccggtggcatccagcatataagctgttccgccttcacttatctggaggttgctgacaatctcgttaaggaatgtttcctggggcacaaagtagaccacgccagctacccggccccccacttgtccatcctgccagactggagcggaaataatgatcgtcatctcaccggtaacagaggagatcaatggctcggagacataagtgttcccctgcattgcggctttgaaataggcccggtcgctgtaatttgacccgtcgatcaggctgcggccctgggtattcagtaggttataacgctgaaaaccataggtatctaccttttgctggagcagatcctgcttttctgccagggtgatctccgggttggagaggcgtgcagtacttcccgtttctcccacgatgttccgatatgcctggagttcatacgacacccggtcagcagccacaacagccatttctttcatgctggcctccagcgtcgactgtgtacccctatagctcaggatacaggaggcgccgccgaccaggatcagggaaattgccaatgttaggaccatggacaccaatatttttgccttaatgctcctcattgtttcttcctccacacgttctctctgtattaacgtcctaatagtgggtatccatttaagttatcggcataattcggcataagataatagctgagacacatggctataggcttcgagagataatattttacggacaggtgcttctgcggcaactacttgttgggggcccagagaaagctgcggctgtatagaacgaaaatttattctatatatttatatatttttagccgaaaaagcaaggggggcgaataaagcttgacatcagcgcattagtcagttaaaattttctattatgtgtgtgaacagagaggagagagaaccatgagctatattatcgcaatcggtgcatacctgtttctgctgatgatctatggcttggtcattgcgcacaagaaagtgaaaactgcagacgacatggtcacaggcggccaccggatacccttcatcatcctggtgggaagtctgctggccacctggtgcggcggaggcggcatcaccggaaatgccagcatcatttacaacggcggcccgtgggtgggcgccatcacctttgccgcgccccctatcggcattatcctgctgtatttcatcgcgggcaaggtccgcaagtccaataaggtcacggtcccggagatcatgggcgcccgttacggccaaagcgccagcatcatttccgcggtgtgcgtcatgctggcctatgtgggcgtattggccactcagctgaaggcggcggccgacattctggtcctgctgtgcagctccagcggtgtggagatctcccgtgggctggcacttgtcatctgcaccacgattattgtggtcatcacagtgggcggaggactggtatccgtggcatactccgacgcgatcagtgcgctgatcatgatcggcggattcttcattgccatccccatcctgatcagtgtggcaaacgcgcagggtgctgtgctgcccccggagaagaccactctcaccggcggcatgtccggttgggaactgctgggctatttcctgccctccctggccctgatgctgggcgaccagaacatgctgcagcgctttgcctccgccaaaaacagcacagaggccaaaaagtccaacatcggcatgttcattggcgagatcctggtcatcgtcagcatcatcgcagtggtgacccaggcggcccgcctgtatcccacgctggacacgccctccaacgtgatcttccaggtatccgtggactatctgccgatggccttcggtgcgctgatcatgtgtgcctgcatggcgtttatcgtcaccacggcggacagctatctgctctcctccgccaccaacctgaccaatgacatctatgtcaaatatatccgcaaggacgctacggacaagcagaagatgctggtgctgcgggggaccatcgtggtattcagtgtcatcgcggtggccctgaccctctatttccccaccgtgctctctctgcagatgaccgcctacaccatgtacggcgcggccatcacgccggctatcctgttcgcgctgttctccaagaaggtgaccccggctgccggtattgccggcatcctggtgggcggtctggcaacgatcgtctggacgctgatgggaacgccctatgggatacagtgtgccatcgtagcagtgcctgcctccgtcattgccatcctggtcgtgtccgctgtgacaccgaaaggggaagccgcccgttccctggatgcgctctatcaggagaagtgatcgtaaagcggggcagaagagatccttctgccccgcttttttcaataggatcaaaatcaggaaaggaagtgctctgtcattatggaggacccgagaattcgcaagtttgctcaatttctgatccggagcgcggtggagctgcaaaagggggagaagatccttattgagctccacggcagcgagactggactgatgaaggcgctggtccaggaggcctatgcggtgggaggaaagccctttatccacatttttgactatggggtggagggggcgctggtccagggggccgacgcggagcatatggaggagatcgcctcctatgaactggagcggatgaaggatatggacgcctatatcgacatccgggccacgcccaacatcagcgcatggcacaatgtcagtgacgaggctcagcgccgttaccgccagtattactggggccccatccacctggcccagcggtgcaaccacaccaagtggtccgtgctgcgctatccaaacgacgccatggcccagctggccggcgtgtccaccgaggagtatgaggacttctatttccgggcctgtctggtggactacgacaagatggggcgggctatgaggcatctggagaagctgatggaccggacagaccgggtgcacatcatcgctccagggacagaccttaccttctccattcagggcataccctgctatgccatgcacgggaaccggaatatcccggacggagaggtctatacctcgccggtgcgggattcggttaacggacatatcacctataactgcccctccccttatgacggcttcctgttccgggacgtgtatctggagttccgggacggcaagatcgtaaaggccaccagcaacaacaccccatatatgaatgagatcctggatattgatgagggcgcccggtatatcggtgagttcgccttcggggtgaacccagtgatcacccatcccatcggggacatcctctttgatgaaaagatcgctggcagcttccatctgacgccgggcaacagctatgacaacgcctccaacggcaatcattccgccgtccactgggacctgatccagatccagacgccggagttcggtggtggtgagatctggttcgatgatgtgctcattcggaaggacggcctgtttgtgctggaggagctgaagtgcttgaatccggagaatctgctctgagaaggataaggagggtcatagaatggatacagttgtagaccgtctgatccgctatgcgaaggtgtacagcgagagcgactaccatgccgggagagcggtgacgcccagcacgcagcggcagttcgatatgggccgtctgctggtggaggaactccacgggctgggcatcgagaacgcggtgctggacgagaagtgttatgtgtatgcctctgtgcccgcctcaccgggctgtgagcatctgcccgccatcggcctgatcgcccacatggacactaccccggatatgacggggaaggatgtgaagccccaggtgatccattacgaagggggagacgtggtgctgaaccgggagcaggggatcgtcatggaggcggcccagttccccgagcttcaaaagtttgtggggcaggatctggtctgctcagacgggaccacccttctgggggcggatgacaaggcaggcatcgccatgatcctccaggcagtggaggagctgctggctgagggcgtgccccacgggaagatctgcatcggatttactccggatgaggagatcggcatgggggccagcggctttgatgtcaaaggctttggcgctgattttgcctatacggtggacggcggggatatcacggactatgagtacgagacattcaacgcggccaaggccacggttaccattcacggcttcagcatccatcccggcactgcgaaagataaaatgaaaaacgccatcctgatggccggggaatacaacgcgctgcttccggccctggaaataccggggcatacagaggggtacgagggctttttccacctccaggagatgcacgggactgtggagaaagccgacatgatctatatcgtccgtgaccacagcatggagaggttccaggagcggaaagcgatgatggagaaagcggcggcagagattgaccgccgctatggggcgcacacggccgaggtggagctccaggaccagtattacaatatgcatgaggtcctgaaggatcacatggagatcctggaactggcagagcaggccatgaaggcggcaggcattgctgcccccacccattcgcccatccggggcgggacagatggaagcgtcctgacctacatgggtctgccgtgcccaaatctgcccagcgcgggacacaacgcccacggaaggtttgaatatgcgccggtggagtccctgaagaccggggtgaggatcatcagggagctgctctctccggcgctggtagagtccgtgatcttgaagaagaaaggctgatgatccatgtatcaggaacgtatcaaaagagtgctggactccatggaggagatggggctggaccagatgctggtgtctgacccagacagcatctggtatctcaccgggtatgacgtgtttccctttgagcgcctgtttgctttttatctccgccgggacgggcaccacaagctgtttttgaacaggctgttccctgtgccggaagctccctatgagcaggtgtggtcctccgacaccgatgatgcggtggcgattttggcctcccatgtggacggaaagagcgccctggggatcgacaaggagtggccggcccggttccttctgcccctgatggagcgcaatccggacagccggtatatagtggcatccgactgtgtggatcacgccagggcctgcaaggacgaggcggagcgggagctgatgcgggcggcctcccgtatcaatgacacagtaatggaacgggcggcggccttcctccaggaggggatcacggagcgggaagtggccgactatatcataagccagtacgcggcggagggctgcgacgctgtggcgttccagcccattgtctcattcggcgcccacgccgccgacccccatcatgaggcggaccagacccgcctgaaggcgggagactgcattgtcatcgatatgggctgccggaaagaccggtactgctccgatatgacccgcaccttcttctgtaagactgcggaccccaaatacgcggccatccatgacctggtccgcagtgccaatgagatcgcggagggaatgatccgtcccggcatccccctgcgggagctggacatcgcggcccgggaacatatcgcttcggcgggctatggtgagtacttcacccaccgcctggggcattttattggccagacagagcatgagaagggggatgtaagtgcagtcacagagctggtagccaagcctgggatgatcttctccattgagccaggagtgtacctccctggtcaatttggggtccgggtggaggacttggtgcttgtgacggaggagggctgtgagatcctcaaccgcgtggacaagcattggaagacggtgggctgagagtggagttcccataaaatgagagcatactctgtttttgaatcgggattgacagcggctcccggggccgcagaacgaaccatcgtaaaacgaggcaaaagcctccccaataaggaatcagccccggacagagatcctgtccggggctgattccataaaaagcagcgttggcttaggacggacaaaaccggggaatgccggcaagggcgcgaagcgttcatcttgacccttgcacggcattccccggttttgctacttcttcgtaatggcatgcatcaatttgctttgcaaacggcctttcatatatgggtctatctgcttatggggctgcccgctttcatcgattatatttcaccatactcatataatgccccctgcctatattgtaaattataccaaaatttatctggaaaccctactcttttctaaaaaagtggtcttaatctgcgattagccatttggctatttttctttaaatataacaaataatccgaacccatttcctatcggaaacaagttcggattatattggtttggtgccggtggtgggactcgaacccacacgatgtcgccaccaacggattttgagtccgtcacgtctaccaattccatcacaccggcatatttgatcaagtaccaattaattatataacaaaaatgggatggacgcaagaaaaaattttgcccttttcctaagaaaaaagaaaaatttacagaaagccccttgacaagttaaaggctttcatggtaaagtaaaatgcttttatatcctcataaaaagagcacggtccccccatgctccacgaaaactataacataggccccggaagttgacaagaggaaagttgaaaaaggttcaaactgagccgggtgttcgcaaaggcgcggtttggcgcttttgtgcacaacgacggggaaaatgcggaagagagccgggaaaggaccgaaaaacagtagattcacccctttcaaatcaaagaaagtgagttgatttttagaaatgacggtcaaggacgtatattacggaaagaccctgcgaaagagctttgcccgctatcaggagatcctggagatgcccaatctgctggagatccagaagaagtcctaccagtggttcctggacgtgggactgcgggaggtctttcgggacgtagccgccatcactgactacgccggcaatctggagctgtccttcatcgactactccatggacgagaagcccaagtatgacgtggaggagtgcaaggcccgggactgcacctacgccgcgcccatcaaggtccgggtgcgcctgcgcaacaaggagaccgaggagatcaaggagcaggagatcttcatgggagatttccccatcatgaccaattccggcaccttcgtcatcaacggcgctgagcgggtcatcgtctcccagatcgtccgttcccccggcatgtactatacccgcactgcggacaaggcggacaacctgactttcgccaccaccgtcattccctaccggggagcctggctggagtatgagaccgacctgtccgacgtgttctatgtgcgcatcgacaagaaccgcaaactgcctatcacctgcctgatccgggccatcggccccaagaccgacgccgagatcatcgagatgttcggtgaggacgagcgcatccagtccaccctggagaaggatacctgcaagaactatgaggaggccctgctggagatctaccgtaagctgcgtcccggcgagcctcccacggtggactccgctgagagcctgctcaacggcctgttctttgatccccgccgctacgacctgtccgcggtgggccgctataagttcaacaagaagatggctatgggcagccgcctgtccggccacaccctggccatgcccgtggccgacccccgtaccggtgagatcatcgccgaggccggggagaacctgaccagggagcgggcccgggagctggaggaccgaggggtcaatgaggctgtcctggatgtggacggcaagctggtgaaagtgttcgccaacaacatggtggatatgaagaacttcgtggactttgacccggaggagtgcggcatcaccgagaaggtgtccttccccgtgctgtgccagctcctggagcagtactccggcgaggagctgaaggaggcggtggccgaccacgtggacgacctggtgcccaagcacatcaccgtggcggacatcatggcctccatcaactatctcaacggcctggcccacaacgtgggcacccccgatgacattgaccacctgggcaaccgccgcctgcgctgcgtgggcgagctgatccagaaccagttccgcatcggcttcagccgcatggagcgggtcatccgggaacgcatgaccattcaggacttggacgtggtcaccccccagagcctgatcaatatccgccctgtcaccgctgccatcaaggagttcttcgggtccagccctctgtcccagttcatggaccagaccaaccccctggccgagctgacccacaagcgccgtctgtctgccctgggccccggcggcttgtcccgtgaccgggcctccttcgatgtgcgcgacgtccattacagtcactacggccgcctgtgccccatcgagacccccgaaggtcccaacatcggcctgatctcctatctggcctcctacgcccgggtgaaccggttcggcttcatcgagaccccctaccgcaaggtggataaggccaccggcagggtcaccgacgagatcgagtacatgaccgccgacgtggaggatgagtacaccgtcggccaggccaacgagccggtggatgagaacggctgcttcgtcaacgagcgcatcacctgccgccaccgcaacgagatcatttccgtggaccgcaacagcgtggactacgtggacgtatcccccaagatgatggtctccgtggctaccgccatgatccccttcctccagaatgacgacgccaaccgcgccctgatgggcgccaacatgcagcgccaggctgtgcccctgctccggcccgaggcacccatcgtggctaccggccaggagcataagaactgcatcgactccgaggtggccatcctggcggaggggcccggcgtggtcaccaaggtgtccgcccggtatatcactgtaagatatgacagcggcgagaccaaggagtaccgcctgaccaaatatctgcgctccaaccacaccacctgcatcaaccagcggcccattgtcaatgcaggccagcgggtagactatcaggacgtactggccgacggcccctccaccgaccggggcgagatcgccctgggccggaacatcctcatgggcttcatgacctgggagggctacaactacgaggacgccgtgctgctcaacgagcgcatggtgaaggaggatgtgttcacctccatccatatcgaggagtatgagaccgagtcccgggacaccaagctgggccccgaggagatcaccagggacatccccaatgtgggcgaggacgccctgaaggacctggacgagcggggcatcatccgggtgggcgccgaggtgcgttccggcgatatcctggtgggcaaggtcacccccaagggcgagaccgacctgaccgccgaggagcgcctgctccgggccatcttcggcgagaaggcccgggaggtccgggatacctccctgaaggtgccccacggagagagcggcatcatcgtggatgtcaaggtcttcacccgggaggcaggtgacgagctctctcccggcgtcaacgaggtggtccgggtctacatcgctcagaagcgcaagatttctgtgggtgataagatggccggccgccacggcaacaagggcgtggtctcccgcatcctgccccaggaagatatgcccttcctgcccgacggcacccccctggatatcgtgctcaaccctctgggcgtgccctcccgtatgaacatcggtcaggtgctggaggtccatctgggctacgccgccaaggccctgggctggaaggtggccacccccatcttcaacggcgccaacgagcaggacatccaggagtgcctgaagatggccggcctggcccgggaggtgggctatgatgagcccctgatcggcaagcagctctatctggcaccccaggaggagggcggcgagctgcgggccctcactccggaggagatggcggacaacgtccaggtccgggagtggcagaaggccggccagctgcgtctggtggacggcaagaactggctgtacgacggccgcaccggcgagcggttcgacaacccggtcactgtgggctacgtctacttcctgaagctgcaccacctggtggacgacaagatccacgcccgctccaccggcccctattctctggtcactcagcagcctctgggcggcaaggcccagttcggcggccagcgcttcggcgagatggaggtgtgggccctggaggcctacggcgccgcctataccctccaggagattctgacggtgaagtccgacgacgtcaccggccgtgtcaagacctatgaggccatcgtcaagggccacaacgtgccccggcccggcgtgcccgaatccttcaaggtgctcatcaaggagctccagtccctgtgcctggacatgaaagtgctggatgcgcagggcaacgagatcgagctgaaggacgacgacgaggacgcctaccagcccggccgccgcgatgacgacgacgatttctatttctccgcggaggactccgacttctccgccgccggctacaccctgaagggggagagcgacgacgatgacctggaagtgggagagagcacgaacgattccatggacggagaggacttctccgacgaggatttttgagagaaaagggaggagattgaacgatgagttatacggagtttgacgccattcagattggcatcgcctcccctgagcagatccgcgagtggtcttacggcgaggtcaaaaagccggagaccatcaactaccgcaccctgaagccggagcgggacggcctgttctgcgagcgcatctttggccccaccaaggactgggagtgccactgcggcaagtacaagaagatccgctacaagggcaagatctgcgaccgctgcggcgtggaggtcacccgggccaaggtgcgccgggagcgcatgggccacatcgagctggccgccccggtctcccacatctggtacttcaagggtatcccctcccggatgggcctgctgctggacatcagcccccgcatcctggagaaggtgctgtatttcgccgcctatatcgtcactgatcccggcttctcccccctggccaagaaccagatcctctccgagaaggagtaccgggacatgcgggagaagtatgaggacgacttcgacgccggcatgggtgccgaggcggtcaaaaagctgctccagcagatcgacctggagcagctctcccagcagctgcgcagcgagctgaaggacgcctccggacaaaagaaagcccggatcgtcaagcgcctggaggtggtggacgctttccgcctctctggcaacaagcccgagtggatgatcatcgatgtgctgcccgtcatccccccggagatccgccccatggtccagctggacggcggccggttcgcctcctctgacctgaatgacctgtaccgccgggtcatcaaccgcaacaaccgcctcaagcggctgatccagctcaacgccccggacatcattgtacgcaatgagaagcggatgctccaggaggcggtggacgccctcatcgacaacggccgccggggccgcgccgtcaccggcgccaacaaccgggccctcaagtccctgtccgacatgctcaagggcaagcagggccgcttccgccagaacctgctgggcaagcgcgtggactactccggccgaagtgttatcgtggtcggccccagcctgaagatctaccagtgcggcctgcccaaggagatggccattgagctgttccgccccttcgtgatgaagaaactggtggaggatggtctggccaacaacatcaaatccgccaagaagatggtggacaagggggctcccgccgtgtgggacgccctggagttcgtcatcaaggaccacccggtgatgctcaaccgcgcgcccacgctgcatcgcctgggcatccaggccttcgagccggtgctggtggaaggccgtgccatcaagcttcatcccctggtgtgtaccgccttcaacgccgacttcgacggcgaccagatggccgtccacgtccccctgtccgccgaggcccagaccgaggcccgcatcctgatgctctccgccaacaacctgctgcggccccaggacggcggcccagtcaccatcccgacccaggatatgatcctgggctcctactacctgacctacagccgggaggaagagggcaccggccatatcttcgccgacaaggatgaggccctgctggcctatgacgccaagattgtcacgctccactcgcccatcaaggtccgcctctaccgggaggtggacggcgtgatgcgctacaagctggtggagaccacggtgggccgcctgatctataacgacgccattccccaggacctgggcttcgtggaccgctccgatccagagaccatgttcgacccggagatcaacttcgtggtgggcaagaagcagctgggcaagatcatcgacaagtgcatcaccaagcacggctttactgtatccgccggcgtgctggacgccatcaaggacctgggctaccactactccaccgtgggctccctgaccgtggccattgcggacatgactgtgcccgccaagaagtatgagctcatcggccagacggagaaggagatcatcaagatcgaccggcagtaccgccgcggcctgatcaccaacgacgagcgctaccgcctgtccgttcaggcgtgggagaagaccaccaacgacgtgaccgacgccctgcgggagtccatggaccgctacaaccccatcttcatgatggccgactccggcgcccgcggctccatggcccagatccgtcagctggccggtatgcgcggcctgatggccgacacctccggtcgcaccatcgagatccccatcaaggcaaacttccgtgagggcctcagcgtgctggagtacttcatctcctcccgaggcgcccgaaagggcatggccgacaccgccctgcgtaccgctgactcgggttacctgacccgccgtctggtggacgtgtcccaggaggtcattatccgggaggaggactgcggcacccgggacggcatcgaggtcagcgagatcgaggagtacggccaggtcatcgagacctttgccgagcgcctccacggccgctaccccgccgaggacatcgtggaccccgccaccggcgagctcctgttcagccgggacaccatgctccgcaatgaggacgccaaggtgctggaggcccacggcatccactccgccaagatccgctccgtcctcacctgtgaggcacgcagcggcgtgtgcgccaggtgctacggcatcaacctggccatcggtgagcctgtaggcgccggcgaggcggtaggcatcatcgccgcacagtccatcggcgagcccggaacccagctgaccatgcgtaccttccacaccggcggcgtggccggcggcgacatcactcagggtctgccccgagtggaggagctgttcgaggcccgtaagcccaagaagatggcccagctggccgagatcggcggccgggtgtccattgaagagaccaagcgcaacattatgtgcaacgtgaccatcaccgccgacgacggcgaggtggtgacctatgccctgccctatgccgccggcctgcgcatcaaggacggcgacgtggtggccaagggcgaccagctcactgagggcgccctgtccccccacgaggtgctgcgcatccgcgggctgtccgcctgtcacaactatctgatccgcgaggttcagaaagtgtaccgtcagcagggcgttgacaccaacgacaagcacatcgaggtcatcatccgccagatgatgcggaaggtccgggtggaggacgcgggagattccgacctgctctccggcgctaccatcgacatcatcgagttctgggacgctgagaaggctgtgaggacccgcatggaggccggggaaaagaacgagatgggcgaggacctgcgcctgcccacctgcacccgtctgctcatgggcatcaccaaggcatctctggccaccgattccttcctgtccgccgcctccttccaggagaccaccaaggtgctcaccgaggccgccatcaagggcaaggtggaccacctgctggggctgaaggagaatgtcatcatcggcaagctgatccccgccggttccggactggcacagtaccgcaaggacgaccccatcgacgagaacggcaatctgatcaccgcggggaccgccggcgcagtggaggccgagcccttggaggagccggaagaggagggctttttcgccgaggaggagcctgaggtggaggccgctgccgacacccaggaggacagcggaacgctggtgtaatatcgctccttccccaacagaacagcacgtccagtgagaaagccccggcgcatgcgcgccggggctttttgtcagtttggttgtttcccaccccagggcggcggctgggcagggcagtcggaacgggtgaaagggaaataagcgctgttgaaagttatgtaaactgaaaaacaccttgacggaagaggcggcggcgggctatcatagaacgaaaaggagggggagcaccatgatagagtggctgatggcgctggtgatggcggggatcgtggccctctggctgtatcagaacggaaaggacggaaaataacggggccggatgccggtcctgtacccgctgccagggaggcggcggaagaggaggaacgtatggatctgctggtgacattggatcagaattacctgggaccgctgcgggtgctgctcggctccctgtttctcaatgatccaggggaggaatttcatatctatatgatcgaagaggggctgaccggggcacaggtggaggagctttcccagctgtgccgggcccaccacagccagctgcacccgctggaggtcccggacggcctgttcacggacgcaccggtggtgcggtactactcccgggccatgtactaccgccttctggcggcagagctgctgccccgggaactggacagggtgctctatctggacccggatatcctggtgatccggccggtgcggcccctgtatgagacacagctgggagacagcctgctggcggcggccagccacagcgggttgaccgggatgtctgactatgtaaacaagatcaggttgtccaactatgaggcggagagctactacaactccggtgtgctgttgatgaaccttccccagatgcggaaggagatgcgcccggcagatattttcgcctacgccagggagtacgaggagcggctgatcctgccggaccaggacatcctcaacggcctgtacggcacccggatcctgggtgtggatgacagtgtgtggaactatgacgcccggcgatatgaccgctactggctgggcagccacggggagaaggatatggactgggtgatggaccacacggtgttcctccacttctgcggcaagaacaagccctggtccagagggtatgagggacatttttccgccctctataagcactaccagcgcctgctgggagaggtgtaacgcagagagactgtcgaaaaagtagtagcctgccgcacacagggcctggccgcctgcggcggacaaaccccacatctgcagcctgagaagtgttttccccggcgtacatgccgccggggaaaacaggtcagaactggatttgcgcctgcgtgtgcgaactctgggaggctttttccataagctgaggggcgcggcctggaatcaggccgcgccccgtgatctcgacatagggccctgacggatcataggccttcaaacgtgcctaggaacaagggcactccgttctgcaggtccacgatgccatagaggaaggggcggtcgaagatcagagtgacgccctcctggggcggggcggcgccggatgccgcggcaaccactgtggcggccgccgcctcggtgccctcctcattgacttcgatcctggcggcatggatcacctgggagaggtagtaccccctggggtcatcccccagcagggagaagtcggccaagtccgggtcaaaagcgtccgtcagtccaagagcggccagggcgtctttcagctctcccgaccactcctgctcaaatttgggcagggacaggcggaggaagaaggtctcatccctgccggagaggagggcggacagcccctccccggtgagggaggacagccagcgctcaaagtccgggacgccggaggactgccggggcatgagggcgaagaaagccagccgcccgtcgtcataggggaggaggacgccttcgtcgctgccgctttggagataggtcagagagcgggagaagtgctggaggaagtccaggggctccgcagttccgtcggcccgggtgaagtcccgtgtaatggtgtcgctggggtcgaatttggccgcccaggtgttcttcaggtagagggcattgaccatcagggcggcggcgtcctccccgaagggccgctggatgatctgggggatcatgcctgcggtatggtctgacacccagctgttgagggcggggacgatgactggggcggacaggtcctcctggaacacctgagcgtcgaaaatgccggagcatctgcctacaaagtcttcttgcatacggccctccgggtcggtccacaggctgttggcaatggagcactccgtggagccccccagtcctccatagagtttcatgagggcagagcaggagacgttgagggcctccaggctggcaccgtcccccagcacctcccggaactggtccaaggtctccccatcagcaccattggcggccatggatagtgccagggccgcggaaaggggggataggagcgttccctccccctcctggcgggcagttttcaacaggtccagcccaaattcagacagggcggaccagacggcgggggtctccaggtcataacgcatcatctcctcttcggagatcgtcaccggctgggcagagagaggctgcggggcggcagaggcggagcagcccgacagagcggacagccccagggtgcaggtgaggagcagggcggagacgcgtttcataagatccctccttgcttttttgatagggcctgtgtgggacagcgccgtaatggcgggagactctcccgtcttttactctgttagacggcggaaggggaaaaaagttccctgggggagaaaaatagaggcgggaggacgcagagcggcctgtgggatgcgtgtccttcccgtccccgcgcagggcggaacatctctgacagatcctacggctgcgactgggacgggagaaggaaggcccctcatccgtcgcggcatacgccgcggcaccttccccccaaagggaaggctttgggcgggcagagccctttgggccatcctgcgggtgggacgggcaagatgcacaccgctcccggtcccgcagggaacaggaacgaccaggggaagctttggcccagggatataagatggaattttgagttttgcatcaaaacagaagaaaatttgctcttgacggcgggcagagaccatggtataatccgaaattgcggtggtaggggcattctgcccttttacccgatgaaacgcccccggcgacgggggagaggaggggcaccgaaatgctcgaagaactgaaagcgggttccagggtcgtgggagccaaacagacccggcgggccctgaaggacggacgtgcgaaaagggtctacatggccaaggacgccgaccccaggctcctccagccgctggtgcaggaggcggtgcggcagcgcgtccccctcatccaggtggacaccatgcgccagctgggagaggcctgcggcatctccgtgggcgccgccatcgtggcggcggtatgaccccatatttttggttttaacagaataaggtcttcctgattctgttaaaatatatattacgccccaatgtgggcagaaatcgagaaaggaggaaaaacatgcctacttttaatcagctggtccggaagggccgtgagcaggtgacctacaagtccacttcccccgccctccagcatggcctgaacactctgaagagccgtcagaccgacctgcacgctccccagaagagaggtgtctgcaccgcggtgcgtacttccacccccaagaagcccaactccgcactgcgtaagatcgcccgtgtgaagctgaccaacggatacgaggtcactgcctatatccctggtgtcggccacaacctgcaggagcactccgtggtcatgatccgcggcggccgtgtcaaggacctgcccggtgtgcgttaccacatcatccgcggctctctggatacccagggcgtcaacggccggatgcaggcccgttccaagtacggcgccaagcggcccaaggccggcaagaagtaattttttgcggagcaaaaaattgctgtatgggcggatatcacccgcccgccgctcaaatctgctgagatttgaggcttgaattgcattgtgcgttctgcgcaaggcaaaccgccttgccgagcgttttcctatattttttaatatgggcagacctcggacaggcattacacaaactgcaaggcagtttgagtacctatgatttctaattttataagaaggagggaagcaaagtgcccagaagaggaaatgtacccaagcgggaggttctgcccgatccgctgtataactccatcctggttaccaagcttaccaacagcatcatgctggatggcaagaagggtgtggcccagaaggtggtctacggcgcctttgatatcatcaaggagaagaccgataaggaccccatggaggtctatacccaggctctcgagaacatcatgccctccctggaggtcaaggcccgccgtgtgggcggcgccacctaccaggtgcctatcgaagtgcgtcccgagcgccgtcagaccctggggctgcggtggctgaccacctatgcccgggcccgcagtgagaagaccatgaaggagcgcctggccggcgagatcatggacgccgccaacagcctcggcaacgccgtcaagaagcgcgaggacacccacaagatggctgagtccaataaggcgttcgctcactaccgctggtaataaggagaaacagtatgcctaggaaagttaccttagagaataccagaaacatcggcatcatggcccacatcgacgccggcaagaccaccaccaccgagcgcatcctgtactacaccggcgtcaactataagatcggtgagacccatgacggcaccgccaccatggactggatggctcaggagcaggagcgcggcatcaccatcacctctgccgccaccacctgctactggcaggggactaagaaccagttcccccagacccgtctgaacatcatcgacaccccgggccacgtggacttcaccgtggaggtggagcgctccctgcgcgtgctggacggctctgttaccgtcatgtgcgccaagggcggcgtggagcctcagtctgagactgtctggcgccaggcggataactataaagttccccgcatgatttacgtcaataagatggacatcatgggcgccgatttctacaacgtgctcaacatgatccacgagcgcctgaagtgcaatgcggtgcctgtccagctgcctatcggcaaggaggacaccttcaagggcatcatcgacctggtggagatggacgccgacatctactatgatgagatgggcaaggacatgcgggtggaggagatccccgccgacatgatggagctggcccaggagtaccgcaccaagctggtggacgcctgtgccgacatcgacgacgagatcatggagctggcgctggaagagaagcccatcccccaggagaagctgcgtgccgctctgcgcaaggggaccatcgagaacctggtagtccccgtgacctgcggcacctcttaccgcaacaagggcgtgcagaagctgcttgacgccatcgtggactttatgccctcccccctggacatccccgctatcaagggcgtgaaccccgacaccgaggaggaggacgagcgtcccgctgacgacaacgcccccttctccgctctggccttcaagatcgccaccgaccccttcgtgggccgtctgtccttcatccgtgtgtattccggcgtgctgaacaccggcaccacggtgctcaactccaccaagaagcagaaggagcgcatcggccgcatcctccagatgcacgccaatcaccgggaggacatcgagtgcgtctactccggcgacattgccgccgtggtaggcctgaagaactccaccaccggcgacaccctctgcgacgacaagcaccccatcatcctggagtccatggagttccccgagcccgtcatccgcgtggccattgagcccaagaccaaggccggccaggagaagatgggcctggcgctggtgaagctggcggaggaggaccccaccttcaagacctacaccgacgaggagaccggtcagaccatcatcgccggcatgggcgagctgcacctggagatcatcgtagaccgcctgctgcgcgagtttaaggtggaggccaacgtgggcgcgcctcaggtcgcctacaaggagaccatcaagaagcaggtggagcaggacaccaagtacgcccgtcagtccggcggtaagggccagtacggtcatgtcaagatccgtgtggagcccaacgagtccggcaagggctatgagtttgtcaacgccatcgtgggcggcgccattcccaaggagtatatcccggcggtcgatgccggtatccagggagccatgcaggccggcgtgctggccggttaccccgtggtggacgtgaaggtcaccctgtacgacggctccttccacgaggtggactcctctgagatggcctttaagatcgccggctccatggccttcaaggaggcctgccgcaaggccaacgccgtgctgctggagcccatcatgaaggtctccgtcatcgtccccgaggagtatatgggcgacgtcatgggcgacctgaacagccgccgcggccagatcctgggcatggaggcccggcccggcgcccagcagatcgacgccctggtgcctctggccaacatgttcggctacgccactgacctgcgttcttccacccagggccgcgggcagtactccatggagccccacagctatgtggagatccccaagagcatcgcggacaagattatcgccgagcgcggacgcagcgagggctgattttcacaggaattacgggaaatttcagttgcatttttcccagtaatacgatacaatgtttgcgatatccatcatatcgcagtcaaaacatcatttgaatgaaatgatataaggaggaaattccaatggctaagcagaagttcgagcgcaccaagccccatgtcaacatcggcaccatcggccacgttgaccacggcaagaccaccctgaccgccgccatcaccaagtatctggctctgaagggccaggctcagtatgaggactactccagcatcgacaaggctcccgaggagcgcgagcgcggcatcaccatcaacaccgcccacgtggagtatgagaccgacaagcgtcactatgctcacgttgactgcccgggccacgccgactatatcaagaacatgatcaccggcgctgctcagatggacggcgccatcctggtcatcgccgccaccgacggccccatggctcagaccaaggagcacatcctgctggcccgtcaggtcggcgtgcccgccatcgtggtgttcctgaacaagtgcgatcaggtggacgacgaggagctgctggagctggtggagatggaggtccgtgagaccctgtccggctatgagttccccggcgacgagatccccatcatcaagggctctgctctgaacgctctgacctgtgagggcggcgtggacgatcctgacttcgcctgcatcaaggagctgatggacgctgtcgacgactatatccccacccccgaccgtaaggccgaccagcccttcctgatgcccgtcgaggacgtgttcaccatctccggccgcggcaccgtcgccaccggccgtgtggagcgcggccagctgaaggccggcgaggaggtcgagatcgttggtctgaccgacgagaagaagaagaccgtcgtcacctctatggagatgttccgtaagactctggactacgtcgaggccggcgataacgtgggctgcctgctgcgcggcgtcgccaagaccgacatcgagcgcggccaggttctgtccaagcccggttccatccatccccacaccaagttcaccggtcaggtgtacgtcctgtccaaggacgagggcggccgtcatacccccttcttcaacaactaccgtcctcagttctacttccgtaccaccgacgtgaccggcatcatcactctgcccgagggcactgagatgtgcatgcccggcgacaacgtggacatgaaggtggagctgatcacccccatcgccatcgagaagggcctgcgtttcgccatccgtgagggcggccgcaccgtgggttccggcgttgtcattgccatcgaggagtaattcaagctccttttggaaaaatccctgcctttggcagggatttttctttttctcgaaggagcccggtagccctgagatccatccggctttgccctacttctgatctgtacccattccgataagaaaaggccggacgtaccggtcgttccttgatttctggcccggaccgggatacaatagagatactgtccgagtggagcggaggtgcgagaatgaagctgctgttggtagaggatgacagggagattcaggagatgctgggggactatctgcggacggaggcctatgaagtggtctgtgcgtccaacgggcgggatgcatgccggctgttcgacgagggcgggatcggtctggtgctgctggatctgatgatccctcaggtcagcgggatggacgtgatggaacacatccgaaagaagagcgtggtgcctatcatcatcctgtctgcccgggacacggaggcggacaagaccttggggctgggtatgggggcagatgactatatcacaaagccattctccgtagcggaggtgctggcccgggtcagggccaatatccggcgggtgacccagtatgcggagccgccggagaagagcatggtccttacagccggagcgctgcgcctggatgggaaggagcggacagtgaccaaggcgggggagcggatcgagctgaccgccaaggaatttgacatcctgaagctgctgatggcgaatcctaaacgtgtgtacaccaaggcccagctctacacccaggtgtggaacgacgcctactgcggagacgagaacgcggtcagcgtccacatcagcaggctgcgcggcaagatcgaggacgacccacgggacccgaggtatgtggcgacagtgtggggcatcggctacaaattgggggagaaatgatggacgatacagtgctgaccgccctgctgtgtgccgctgtggcggcgctgagcggggcggtcctctatcagcggatcgttctccaggcgcagatgcgacaaagtctggaggagatgaccgccgtcctgggcagggtactggacggggagagcggggagcaggtcatggtcttcacccaggaccaggctctgaccggtttgatcgcccagatcaaccggctgctggaggaacggcagagaaggcgggcggagtaccgccggacggagcaggcagtccggcgtatgctcgccaacatctcccacgatatccgaacccccatgacggtggtgctggggtacctggagatcatgcggctgcggaaggagtgccgggaggagctgctggaaaaggtggaagcccgggcgggggaggtcatggagctgatggatcgttttttcaccttagccaagctggaggcaggggatatggagctggagcggtccagggtagacgtaggtgaggtctgtcgggagactgtgctggacttctaccagatcctgacccgccaggagatccgcgtggaagcagagatcccggagggagcggtgtgggggtgctgtgatcgggaggcgctgcgccgcatcctgaacaacctgatctccaacgcggtgcgctacggcggcgacggcggatatctgggcgtgtccctgagagaaggggaggacgccctgtccctggaggtggcggatcgcggaaagggagtcgcacccggagtgggggagcaggtgttccagcgcctggtcaccttggaagacagccgaagcagcggagaggggagcggactggggctgtccatcgccagagagctggcccggcgaatgggaggagacattgacctggagagtgtccccggactccgcactgtctttacggtcagactgcccaaatggcaagacgaaagagattcgtaagaattgcgcaaattttctgaaaagtcctgggactacaatgggaaggtgaaaggaggcagaagacacatgccgtatattctgcaaacggaccgcctgaccaagatcattggagaaaaagagctggtccgggacgtggacctccatgtaaggaagggagagatctacggattcctgggccctaacggggcgggaaagaccacagtgatgaagctggtgaccaacctgtggaagcccaccgggggccgcgtgctgctgttcggagagcccctcacgcccacctcctacggggtgctgaagcggatgggcagcatcatcgaatttcccaccttctatccccacatgacaggccgggagaatcttcagatccactgtgactatatggggtacagccgtcccaagggcgtggaagaggcgctggagcagctggagctggacgacgctgcagaccggccggtggggagctactccctgggtatgaagcagaggctggggatcgcccgggccctgctgtgcaggcctgagctgctgatcctggacgagcccaccaacggcctggacccggcgggcatcaagcaggtgcgggatctgctgaagcggatgagagaagaatatgagatgaccgtgatggtctccagccacatcctcggagagatggaggccatggcagacaccgtggggatcatccaccgggggaggatgcgggaggagatctctctccgtgagctggagggaaggggcacctcttatctccatctgaccgtggacgacccggggagggccagtgtcctgctcagtgacgtgatgcacttgggcagcttccgggtcatgaagggcggcatcatccggatctatgaccggcaggcgtccccccaggaggtggccggcgtcctggcccggcaccatgtggcggtggaggagatcggaagaagatcggagacgctggaggagcactttttgaagctgacatcggaggagggcagcacatgggaaagctgatcgaactggaatggcggaaaaaccggatcgggaactgggtgagatgggcggctctccttggggcggcgcttggcctgctgatctttgccatggctttcctggggatcgccaacgacccggagaccggtgtgcctgacgcggcgccggggcatggagggatctcgtcccccatcgaactgctgaccagtatgtgttttttggtgttcaccggggtgatgctctctgttttcatcgtgggagcctatcaaaacgggaccatgtctcttgtgttctcctaccccgtccggcggcagaagctgctggcggcccagatgctggcggtgtggatcttctgcttcggcgccctggcggcggcgaagctgctgctctacggctgtgtgctggcagggagccggtttctcccctccgccttccctctggactttgacatgacccggggagccttctatgggcagctgctcctgcgctctgctgtgacggtcacagagggctttatcgccttgtttgcggggctggccctgcactcggccagagctgccattgtgacctccttcctgctggttttgctgacccaggccaacattgggagctttaccatggcggacagcccagtatttcccgcggtgctgaccggcatctcgctcctgtgcgccctgctcagcctgcggggggcggagacgcgggacctgatgtaaggaaggtggaaggaccgggagcggccgcagatcagaacagaagaggaggagccgcccattcctgtgggcggctcctcctttgcacgtatggggagaaaatgggacttgcagcggtccggctcagcagccggccatggccagggcccggtccaggatggtgccggcggcctcctccttggacatgaggggcagttcctccgcaccgtccgcggtgatgagggtgagcacgttggtatccaccccgaagccggcccctgccaccttcaggttgttggcgcagatcatgtccaccttttttttctccagcttggcccggctgttctctaccatgtcccgggtctccatggagaagccgcagatgaactggccagggcggcggtgctcccccagataggagaggatgtcatgggtgcgggacagagggatggacagctccccgtccttctttttcatcttgtccccgctgtactgggccggggtgtagtccgccacggcggcggccttaaagataaagtcggcctgctggcaggtgcgggacaccgcctggaacatgtcctccgcggagattacagggaccactgtgacgaagggagggggctccagggcggtgggaccagagatcagggtgacctccgctccccggagcatggccatcctggcgatggcgtaacccatttttccggtggagtggttggtgaggtagcgcaccgggtccagggactcctgggtgggaccggcggtgaccaggacccgccggcccgccaggtcgtgggggagggccaggacgcggaggatgtgctggaccagagtgtccggctccggcatcttgccgggccccacagcgccgcaggccagccggcccgaggcgggggcgatgacctcccacccatagcggcgcagcagatccaggttgtcctgggtcaccgggttctcatacatcttggtgttcatggccggagcgatcagcttggggcagggacaggccagcaccgtggtggtgagcatatcgtcggccagcccgtgggccagcttggcgcacacattggcggtggcgggggcgacgatcaccaggtcggtgcggtcagccagggcgatgtgctccacctgatgggagaagttgcggtcaaaggtgtccaccatggtccggttcccggtgagctgttcaaaagtgaggggggtgatgaactgggtggcgttccgggtcatcaccacctccactgaggcgtggagcttcaccagcgcggaagccagtgccgcggccttataggcggcgatgccgccggtgacgcccaaaaggatggtttttccgctgagcattgcaaatcgctcctttgcatagagcggcgcggggcgccgctgtcgtttttttcattatagccgaccaggcggcagattgtaaagggcagggggatattttgcgcgagaggaaaagaattgcaaagtttcggttaattcctgccttgtattcccaccggcggtcgggtataatgtggcagaataaggacccgtgggcgcgtctccggcaaaggggggctggcgggtcagagaaaaaacgggggccctccccgctgaggtgaacagatcatgctgatcgccattgatatcggcaataccaatatcgttatcggaggcatccagggcgacgccatccatttcgaggccaggatcgccaccgaccgcatcaagacctccgaccagtacggggtggagatcaagaacatcctggccctgttcggggtgaagccctgcgatgtggacgactgcatcatctcctcggtggtgccgccggtcttcaactcggtctacaccggactggtgaagatgacgggaaagcaccccctggtggtggggccgggcatcaagaccggcctgaacatccagatggacgtcccctcccaggtgggcagcgaccgcatcgtcatcgccgtggccgcgctggcggagtatgagccccccctgatcctgatggatctggggacggccacgaccatcgaggtggtggaccggggcagcacctacctggggggctgcatcatcccgggggtgcgcacctccctggatgccctcacctcccgggcggcccagctgcccggcatccgcctggaccggccgggccgggtgatcggcaagaacacggtggactgcatgcgcagcggcatcatgtacggcaccgccgccatgctggacggcatgctggaccgggtggaggaggagctgggcagccgggccacggtggtggccacgggggggatggcccagttcatcgtgcccctgtgccgccgggagatcaagctggagaaggacctgctgctcaagggcctgaacatcatttaccagaagaacgccgccaagcggggggggcggtgagacaaggaagaaaaaacttgcagctgatcataaaaatgggatatgccaggaaggcatatcccatttttaatggaattatctgtatcaagatgctgtcgtcacggagcgaaggaagtccaaaagttcatcaaatcgttcttgatccaccgcctcatatttgctctcgcccagataaatatatccgttttcgaaaacggatatatttccgatctcttcaagctgatcatttaccttgtaaaaccagatctcatatatatgctgtccggtttcaaatcgacgcacaccgaaagaggggccgcagtatcgaatgttcagtgcatcgatcatttcgatcagcggggtgtcgtccaggctgcacgactttgatgaaactgcgtttggcatctccgtgacagtgtagtctgtggcttcagatggctggaaatccaggacattggacagttctttgggagagaacacataatagatccagccaactaaaatcaataccaaaaccagagcagccaatagacccgccgctttatggcgcttattgcgttcacccgctgtcatatgggagtccatcaacaaccgacttccttcaatttattttggtcaatttcaataatagtatagattgtcaatgcgtgtcaatatgttggtataagacgaatttgttttgcggctcccctgctaggccatttgtgagcaaagagcaccgtgatcagaagaacgcttccggccggaaggccggcgtttttttctataggcggaaaaatttttctccctggcggcgcgacctgccggggcgggacatgctctatataggtgaagagacaacggaaaagaggtgaggccatgacggatcaggaattggtagagctgttctggcagcggcgggaggaggccctgaccgggctccaggacaagtacgggggctggtgccgctccatcgccggccgcatcctgggggaagagcgggacgtggaggagtgtctgggggactgctggctccagctgtggaacgccatcccgcccgcccggccccagcacttccggggctatctgggggcggtggtgcgcaaccgggccctgctcatccgccggcggcggggacggcagggggacacggtctctctggccgctctggagctggctgagtgcctccccagccgggaggggcccgaggaacaggccgaggcggcggagctggggcgggccatttccgccttcctgagagagctgggggaggggccgcgtaccgccttcctgcggcggtactggtacgcagacaccgtggaggagaccgccgggcacctgggctggtcgctgtccaggaccaagagcgtcctgtttcggacgcggaagaagctgaaagcttatttggaacaggagggaatgttgtgaaccgaggagaacgcatgatggaggctgtgggccttgtggacccggccttggtagaacaggccgccggtccggcccggcggcacagcgcccgccggcccctgcggaccggcctgatcgccgcctgcctgtgtgcggccctgctggggtcggcgtgggcggccaaccagatcggagggttccggtccctgaaattttttgaggacctgctgctcccggctgagctctcagatgacggtgaggcgttgggggaggcgcactacgacggctataccctggagggagggatagacttcctggcgctggaggatctgccccaggaggcgctggacatggcggcggagcaccccgcctctacggtggggctggacctgacaagctgggaggaggcggaggcatactttggcctggagctgccggaaaacacctatctgcaagaacagctccagtccggttttcgggcggccctgagcagcgacagcgaaggccccaccgccctggagtggacggcggagtatctggattccggcgtccggctggaggtgtgggtgacggcgtacacccagcggatggagctgccggatcatccggtcagccagagccatctgctcccttcggatacccagtacaccacggaggagcacaccgcccccaacggcctgtccgcagtgatgaccacggtggagcagggccctgaagacccctattacgacaaatggggcgcccggatgttccgcgccgacttcgcgctgggcggggtgtggtaccgtgtggacgcctatgaccgggcggagcctcagcgggcacgggaggcgctggaggagctgctgaacggcttcatgctgtaagttgcctggggcgcagcctccggggcgggcggccgcgcaggaaattttaccggtcctcccggcccggcgtcccttgacaggaccggagaaactggatataataccacctgtatcacaggcgctgagggggaggagtaaccgcagttcccatggcagagagtggccggacggtgcaaggccatatggggaagcggcgaagtggccccggagctccgttttcgaggccccagcggggcggtagacagcggcgggtcctcccgttacagaggataggagcgccccgcgaggggaattcaggtggtaccgcggacgatgacaggttcgccctgagccatgaccggctcagggcgttttttatggagggagcgcaatggaatttgtaaatgagacagactatgactggcgcgccctgcgagccctgaaccgggcggccatccgcctggacaggcgctggaggagcctgctgctccgggccatgggggtgctctgcggcctgatcctgctgcggggggcctggacctccggaggaggggcgggtctcctgtatgggctgctgggggcgctgatgctggtctgggccctgttcctcaacgagatccgggcctggctggtggggcggttcgtgatgaagggcatcgcccggcacaccgcccggttcaccgatgaagggtatgtcatcgccaaccagcggggggagcagtcctttgactactcttccgtccaggccctgtgtgaggacgggcgctacttcttcctcatgctcagccgccagcagggcaacctgttcgacaagcagggctttcacaccgggaccgcggaccagttccgggctttcctggagcggaagaccggacagaccatgaaaaagctgtgagacccggggccggagggctccaatcggaatgaaaatacattggaaataggacgtgaacgacatgagaaaagaactgccaaaggtctatgagccccaggaagtggagtcccggatctatgagacctgggagaagaacggctgcttccggggccaccgggaccctaagaagaagccctttaccatcgtcatgccgccccccaacgtgacagggcagctgcatatgggccacgccatggactccaccctccaggacatcctcatccgctttaagcggatgcagggctacgccgccctgtgggtccccggcaccgaccacgcgggcatcgccacccagatcaaggtggaggaggagctgcgcaccaaggaggggctgacccgctatgacctgggccgggagaagttcctggagcgggtgtgggattggaaacgccagtacggcggccgcatcgtccagcagcagaagaagctgggcgcctcctgtgactgggaccgggcccggttcaccatggacgagggctgctccaaggcggtgcgggagaccttctgcgagctgtatgagaagggcctcatctacaagggcagccgcatcatcaactggtgcccccactgtgtcacggccctgtctgacgcggaggtggagtatcaggacaagcccggccacctgtggcatatgcgctaccctctgactgacggttccggctatctggtggtggccaccacccggccggagaccatgatgggcgacaccggcgtggcggtcaaccccaacgacgagcggtacaagcacctggtgggcaagacctgcatcctgcccctgatggaccgggagatccccatcgtggccgatgagtacgtggagatggacttcggcaccggctgcgtgaagatgacccccgcccacgaccccaacgacttcgaggtgggcctgcgccacaacctggacaccatccgggtgctggatgacaacggcaaggtcaacgccaacggcggcaagtacgagggcatggaccgctatgaggcacggaaggctgtggtggccgacctggaggccctggggctcatggagaagatcgaggactactcccacaacgtgggcacctgctaccgctgccacaacgacgtggagcccatcatctccgcccagtggttcgtgaagatgaagcccctggccgaggcggccatcaaagtggtggaggacggggagacccgcttcgtccccgaccgatttgccaagacctatctgaactggatggagaacgtccacgactggtgcatctcccggcagctgtggtggggccaccagatccccgtctggtactgcgatgactgcggacacatgacggtcacccgtgatgacccggactgctgtgagaagtgcggcagcaggaagatccaccgggacccggacgtgctggacacctggttctcctccgcactgtggcctttctccaccctgggctggccggaaaagacggaggacctggactacttctaccccaccgacgtgctggtcaccggctacgacatcatcttcttctgggtggcccggatgatcttctccgcctgcgagcagaccaagaagccccccttccacaccgtgttcatccacggcctggtgcgggacgacaagggaaggaagatgtccaagagcctgggcaacggcatcgaccccctggagatcgccgacaagtacggcgccgacgccctgcgcttcaacctggtcaccggcaacagccccggcaacgacatgcgcttctacaccgagcggtgtgaggctatgcgcaacttcgccaacaagatctggaacgccagccgcttcctgatgatgaacctgaccatcgacgcatgccagctgcccgggaagctggagctggaggacaagtggatcttgtccaagctgaacactgccatccgtgagatcaccgagaacatggaccggtatgagctgggcgtggcggcccagaagatctatgacttcatctgggacgactactgcgactggtatatcgagctgaccaagacccgtctccagggggaggacgaggacagcaaggtgagggcccagcaggtgctgtgccatgtgctcacccagatgctcaagctgctccatcccttcatgcccttcatcaccgaggagatctggcaggccctgccccacgagggggacttcctcatgctgtccgactggccggtggcagacgccgctctggacttcccggaggaggagaaggccatggagctgatcatggatgccatccgtggggtgcgcacccgccggtctgagatgaacgtgccccccagcaagaaggcccacctgacagtggccaccggggagcgggacatctttgtcctgggcgtgcccttcctgaagaagctggcctatgccagcgaggtgaccttcgcccagccgggcaccgccccggaggcgggctccgtcaccgtggtcacccatgcggcccagatctccatgcctctggcggagctggtggacctggagaaggagaaggcccgcatggagaaggagctgaaaaagaacagcgacgagctccagaagctgaacaccaagctggccaatccgggctttgtcaataaggcccccgagcatgtggtcaaggcggagcaggagcgggccgtgaagctcaccgagctggtggccaagctggaggagcagctcaagaccatgtgattcggcacaggagctgtgaacgccggaggataagagaaaacgatctgacgagccggaccgcgggagaccgcggtccggctttccgcgtctttttgaggtggaaaaaaggaaaagctgcttcgggggatctttccggcggccgcttccccgttcctagccccataaggccggatgcccggagccggtcatgccccgcccggtatggcgggcatacagtgtacccccctgtgcggctggctggggcttttcggtatccctttcatcagaaagaagtaaaaaagaattttattaaaataaaaatttaggattgactttaataaaattaaagtatataataaatattgtgaaagggggtaaaaggatggcagtggaactggtgcccgagtggatggccggtctggaggaggaggacctggtgttcatcaaaaaatttgtgctgtcctccggctccctcaaagaggtggcgggacagtacggcgtcacctatcccacggtgagactgcggctggaccggctgatccagaagatcaagctgggggaggacagggcggccgacccctacattgccctaatcaagcgtctggcggtaaatgagcggctggactttgacacggccaagctgctgatcgccgcctataagaaggaaacaagaaaggatgagatgacgtgatgagcggttccataatgacaatattgtttgtgctccctgttgttctgctctctatgctgctgcccctggccctggtggtggcccttcaggtctggctgtgcaggaagggaaagtggctggggctgatcctgcccgccatcaccctggcgatgagcctgatgatctgcctgtcggtggtcggcttctccactgtcaccggcggcgggtccgtgcaggtcacggacgggcacgggaatatcgtggaggagtaccaccgggaggaggagcatcaccagctccagcctgcggatctggccatggtgggcggtgtgttcctggtattcaacgtccccactctggtgctgggcgggatctggctctactacaagaaccgccgggagtggaaggaagacctgaagaaaatgaatatccaggatctggagtaaaaggtggggcgtcccggggagggacgccccttttgcggggatcgcggttgaaatccgttccaaaacatgataatataactcaataaaaagcagatccgccgcaggcggacatgagaggagagtccctatgccgctgcatgaatcaggagaagattatctggaggccatcctggtgctccatgagcagaagggcaacgtccggtccatcgacgtggcccagcacctgggctactccaagccatctgtgagtcgggctatgtctatcctgcgctccagcgggtatatcaccatggaacgggacggccgcatcctgcttaccgaggcgggaaagacggcggcggagtcggtgtacgagcgccaccgcttcctgaccaagtggctgatccagctgggcgtgacgccggaggtggcggcagaggacgcctgccgcatcgagcacgacatcagcccggagaccttcgcctgcctgaaacggcacgcggggggcggggagagctgacgctccgaacagaaaaagtgacgcggcggaccgagtcccggcctgccgcgtttctccttgcctgaggggaaaaagcttgttataataaaaaccaaaatacagatcctgtcgaactgggggaaaactgccatgtctaccgaagaactggtctccggcgtgctggaagggctgaagctgaatgccctggacctgagcgccctgttccgcactgccctgctcattctggcgggggtcgtggtgatccgggtccttctgcggatcgtggaccggatgctgtccagatctcagaacctggggtcagtggggggctatatccgctctgtggtgcggatcgccctgtggttcctcctggtcctggtggtggcggactcccttggcatcccggtggcctccatgatcgccctgctcagcgtggccggcctggctatctccctggcgctccagaacaccctatccaacctggcggggggcatcatgatcctggtgtccaagcccttcgaggtgggggactatgtggaggcggacggggtggggggcacggtcatttccatcggcctggcgtacagcaccctggccaccgtggacaacaaggagatctttatccccaacagccaggtggcggcggccaagatcatcaactataccaagctgggcaagcggcgggtggagctgaccttctccgcctcctacgatgcgccgactgagacggtgaagcaggcgctgggggaggtgctggcccagttcccgcagatcctggaggacccggccccttccatctggatctccaagtacggtgccagcagcatcgaatatgtggtgcgggtgtggaccgccgcgggggactactgggacgtgtattacggcgttatggagggggtgcgccccgctttccagcgccacgggatccagatgacctacgatcatctaaacgtccacctgctggagaagtgagccctcagaccagccgggcgccccgtccacggggccttcagggcatggccagcccgtggagaaagccgtccagctggggagagaggacctcgcccccgatcaccgtgtttttgtagatcagcagattggccaggatgccggtctcaccggtggggtagttggtgatctcgtaggtgtagcgcttcacccgcttgccggcatatttggacaggtcgaagccctgcccgctttgcagggccagatagtcgtcatagctcgcatccatctccttggggatgagcagctcctcggtggccaggggctcggcactgacctcccagccgtaggactggaggtaggccacccggtcctcgttgctcttgaccccctttgggctggggacggcagaggcggacgcctcccgggcggggccgccgcccagggtcagcaccagggcggcgcagcaggccagggcggccacggccaccccgatggtcagctttcggtggcggggcagttttgcagtcaggattatcacagcgcattctccttccaacgccttggtttctactcatgtctatgaggggcgggacaaatttatgcctgccctcataaagtccggacaggagcgcggagacggcaggcaggagggtgcggaggaacaggaggacaagtatggcacaggagcgtctggacaagctgctctcctccacggggcggtggtcccgccgggaggtgaaggaactgatccgccaggggcgggtgtgggtggacggcgtccctgcccggcggccggaggagaagtgtgagcccggagcggtcggcctcactgtggacggagagcgggtggactgcgcccctttcgtctatctgatgctccacaagccggcgggcctcctgtccgccacggaggaccggcggcagaagacagtgctggacctgctgccggagcacctgcgccgccgggggctcttcccggtggggcggctggacaaggataccgaggggctcctgctcctcactgatgacggtcccctcggccacgccctgctctcccccaaaaaccacgtggacaaggtgtactacgccaaggtggagggtcggctggaccggacggacgctgaggccctggcggcggggatggtgctgggggacgggctgcactgtctgcccgcggagctggagccgctgggggacggctcccagtgtcatgtcaccctgcgggaggggaaatatcaccaggtgaagcggatgctggccgcccgggggaagccggtggtctatctgaagcgcctgtccatggggcccatcgccctggacccggcgctggcgccgggggagtggcggccgctgacaggggaggagaaggcgctgctgcggcggggaacagcgggagatccaggtttttcggcgttttgaacaaaaaattatgcaaaacctcttgccaaaaccgggggggaaccgttataataggcgtagtgtacaagtaacacatgggagggatcaatgtgtccagcaggatgttccagggagtcgtactccagatgaaggacggcatcgaccgggtggtgggtgtcattgacgcggacggcatcgtcgtggcatgcagtgagctcaccagtatcggtgagcattggtccggcgcggtggcggccatcaatgccgccgacaacgggatcacccggtatgaggggaagaccttcaagccgctggccggctggggtgctcagttcgattacgccgcttttgtccagggggaggacccggagagcgcggccctgtgcgccatggcggtggtggccttcaacggagccaagacctcttatgaggagaagcacgacaaagccacctttgtgaaaaacatcatctcggacaatatcctgctgggggacatctatacccaggctaaggagctgcactttgtctctgaggtgccccgggcagctttcctggtgcgccagctggggcaggcggatgtgagcaccatcgatgtgatccagaacctgttcccggacaagcagacagactttgtcatctccatcaatgagacagacgtggccctgatcaagcagctgcccgagggggcggatgccaaggagctccagaagatcgccaagcagatctctaccgcggtgaaccaggaactgggcatcaaggtggtcattggaatcggcaccgtggtcaaccacatccgggacctggcccgggcctataaggaggccggcgtagccatcgacgtgggcaaggtgttcgacaccgagaagacggtcatcaactatgagaacctgggcatcggccggctgatctatcagctgcctaccatcctgtgccagatgttcctccaggaggtctttaagaagaaccccatcgacgctttggaccaggagactctgctcaccatcaacaagttctttgaaaacaacctgaacgtgtccgagactgcccggaagctgttcgtccaccgcaataccctggtgtaccggctggagaagatcaagaagctcaccggcctggacctgcgggagttcgatgatgccatcaccttcaaggtggcgctgatggtcaagaagtacctcatttcccggggaatcgaatcctgaaccgaagaacagcacgcccccgcgccgggtccggcacgggggcgttgattttttgtgagaggaggaaaaatttggagggcaaaaatgccaaaatttttttctgggaggggttgccgttccggggcggcgccgctacaatataggagcggaagcgacaaaatggccgcaaaaatccatttacataacacacaaactgtgatacactttgagaaaagcgcatcagccgcccgcccctgggagagagcgtgccaaaggcacgacttgggggagtggcggccgtctggcggagggacacatgatacggttcatcgatgtatataaagaatacgacaacgggaccaaggcgctgaaaggggtctccatgcggatcgacgacggggagttcgtctttctggtggggccatccggctccgggaagtccaccatcatcaagctgatcaccggggagatcgccaccacagaggggcggctgatggtgaacggctacaacatgaacaacatccgtccaggacaggtgccctacatgcggcggacgctgggcatcattttccaggacttccggctcattgagaaaaagacggtgtatgagaacctgtcctttgccatgcgggccatcggcacctccacccgggagctgcgccggcgcatcccctatgtgctggagctggtggggctggagaagaaggcggaccagtatccgggggagctgtccggcggcgagcagcagcgggtggccatcgcccgggctctggtcaacaatcccagcatgatcatcgccgacgagcccacggggaacctggacccccagcgatccctggagatcatgatgctgctggagcgcatcaacgagctgggtaccactctgctggtggtcacccacgagaaatccctggtcaaccggttctccaaacgagtcgtcgccatcgagaacggacggatcatcagcgacgagacaggcgggtattacaacaatggcgagacgatttaacggaaaatactatctcagcgagggcttccactctatcttcacccacggcttcatgtcctttgccgctgtgtgcatgatcgtggcctgcctgctgatcatgggttccttcaccctgctggcggtcaacctggaccacatgctgggggacctggaggacgagaatctgttcctggcctacattgacgacagctactcggaggagcaggcccgggcccttcagccgaaaatcgaggctgtccccaatgtgtcccaggtcacctttgtcacaagggcggaggcattggaggattttaaggcagggcgggagcagaacgatttgatggacagcctgccccccgaggtgctccgggatcggttcgagatccatgtcaaggatatcgagcagatggcggccaccgtgtctcaggtggaggctgtccggggagtggcccatacccaggcggccattgagatcgcccagggcttcgtcatggtgcgcaacattgccacaggcgtggcggctgtgctggtggccatgctggtggtggtctccctgttcatcatcgccaacaccatcaagctggccaccttctatcgcagggaggagatcgccatcatgaagatgtgcggtgcgaccaacggcttcatccgctggccctttgtggtggagggcatgatcctgggccttacaggcgccctggtggctttcttcatccaatgggggctgtatgaggcggtctcccggctgatcctccagaccaacggcctgagcctgatcaccgttctgtcctacgcctccatggcggggaacatcgtgctggtcttctgcggcgtgggactggtgatcggtgtgggcggctcggtggtggccatccggaagttccttcaggtatgagataaggagaagcaggtatgagaaaaaagacacagaggatcgtgatggcggtgctggcagggatcatggccctgctgatgctgctgcccatcgtagccaatattttcgtccactgaggggaggcggcccatgaaaagacgcgctatccccgccatcagcctggcgctggtggtcctcttttccgcctcctttctgctggctctgccaggggcggtgtccatgccggcctccgccgtgactcaggcggagatcgatgcactgaaggagagcgccggcgagctggagcagcagcaaaaggagatccaggcccagttaaacgccatcgccgccgacaaggacgaggcattggaacagaagagcctgctggagcagcagatcaacgtgatccagtcggagatcaacaacatcgacgcacagatcgccaaatatgacgagctgatctcccagaaggaggacgaactggctcagctggagcagcaggaggcggagcagtatcagctcttctgtgagcgggtgcgctatatggaggaggagggggaggtctcctattgggccatcctcttcaacgcggaggatttctccgacatgctggaccgcttcatgatggtggaggaaatcatggcctatgacaacgccatcatggacgagctgctggccacccaggcccagatcgagcaggagaaggcggagctggaggaggcccgcaccgcccaggaggaagcccggcagaagcaggcggacgccaaagccaggctgaagagccagcaggcggaggtagacgccctcatcagtcagatcagcagccaggaggacgagttggaggccatggaggccaagctccaggcggcggccaaggccatggacaacgagatcgcccggaaagagcgggagctccaggcccagctggctgcccagggcgtgaccatcgtcagtgaaaagggcttcaagtggcccagctatgccaccaccattacctccctgtttggcagccgtacgcacccggtcaccgggcggcccaacaaccacactggagtggatatcgccgccgccggcggaacggacatctgggccgccaagagcggcgtagtccttacttccacctacaacagctcctacggcaactatgtggtcatcagccatgccaacggagagagcaccctctacgcccatatgagcaagcggctggtcagtgagggagataaggtgacccagggacagaccatcggcctggtggggaccaccggttcctccaccggaaaccacctccactttgaggtacgcctgaacggacagcgtcaggaccccctgaactattttagaggttccacctttacactgcgggccagtggcaagagcgtgagctacactgtgagctgagagaggggagcgcggcatggaagagatgcggtgtccctgcggcgggatctttcaaagcctggggatggaatacctccgaaccggagctgtaagcgacggtttgctgtttggacgggatgccaacgcttgggcagagggagccatcccggtggaactgttttcctgcgaccgctgccgggccctgcgcttctgcgcggaggaggaatgggtggcccgccgccaggaggaggagcgggagaaggcagagagagcccggagacatgaggagcggctggaacagcagcgggaggaacgggtccagatagccatgaaagactatgcctcgtacagcgagaagcgcctgcggaagatcgcggacggggagacctggagcaatcactgcgaggaggagcgggaggccgcccgccgcctgctggagtacaggacgccccagaccaagaaaaatgacgtcccctgggaaaaataggggacacagacagagacttcaggcggcgggcacaggcccgccgcctcagcttgtggaaaaagcctcgcagagttcgtgcccgcaggcgcgaacccagtttggatccgttttccccggcgacctgtgcgtcggggaaaacactgctcaggctgcaaatgtgagggttgtccgccgcaggcggtcaaaccctgcgcgcggcagactgcatctttctcgaaaaagtggctttgccactttttcgacaatctcaggcggcgggggcagacccgccgcctttctcagtgcccggaggcataggcggggacggcggcggcatatgctgtgggggaggtgaggggcgtgctgggacaggtggtgtaccagagggacgggaaggggactaaggtggtccgggccccgctccatggggtgccggtgctccgagtggcgctggacccggaggggttctgggcccgcagacgggcgggacgggcggcccggcggctggtccggcagggggcggcacgggtgctggtgccggaggatttccccttctgggaggagctgagccgggccggcctgcgccctgtggaccccctgcccctgctccggtcctgcgccgcccctatggctctggcgctgctgcgccgccaaggggaggacccgctgcgggcggcggtggccctgcgggggagccgggcggagcgggatctggtccgggcggcggaggagctgtgccccagggtgcgggatttgtgcctctccgtacagacgggcggcggggagctggaacgctacctccaccgacagtacggtgtggccctgcggccggactgggccggcgtccaggcggccatccgcttcgatccccgggcggaggaggcggggcaggcggtcctctccctgtttgggccggaagcggatctggcggggctggcggtgtcggtccccggcttagagcggcagaaggagggccagtggctgcccctgctggagatcctgtgggagacagggcgtctggagcgcactgacctagaatttacttgacagacggagccgaaaacactataatagcacatactgcatccatatacccattttcatattctggaacgatcatccgccccggggccgccccggagagcggtctgaaaggtgtgcaacgagtcatggcaaaggaatataaactcagcccccagcgcctgaaagagcttcaggacgagatgaattatctgaagacagttcgggagaaggaagtggccgagctgatcaaggaggcccgctctttcggagacctgtctgagaacagcgagtacgatgaggccaagaacgagcagggcaagctttactcccgcatggctgagatcgaggagatcctgtccaactatgtggtcatcgaggaggagccctctgacggcagctctgtccgcctgggctccacggtcaccgtgctggacgaggaattcgacgagactatggtgtacaagatcgtgggctctcaggaggccgaccccatgaacggggccatctcggaggactcccccttcggcaaggccctgctgggcaagagcgagggagaccaagtggtggtggacgcccccgccggacgcatcgagtacaagctgctgaaggtggagcagcgctgagcgccccgccatccacagagataggagagagacaacatggctgaagagaagaaccaggagcagaacctgtcccagctgctccagatccgccgggacaagctgaaggagctccaggggggggggcgtgaccccttccagatcaccaaatatgaggtcacccacgacagcgccgccatcaaggcggattttgacgccatggagggcagccaagtctcgctggccgggcggctcatgtccaagcggggcatgggcaaggtgtccttctgcgacctgcaggacaagtcgggccgcatccagctctatgcccgccgggacgagatggatggggaggagtacgaccgcttcaagaagctggatatcggcgacatcgtgggagtgaagggcatcgtgttccgcacccagcggggggagatgtccatccgggtggaggcggtgaccctgctgtccaagtcccttctgcccctgccggagaaatttcacggcctgaccaacaccgagctgcgctaccgccagcgatatgtggacctgatcgtcaacccggaggtgaagcgcaacttcatcatccgctcccagttcatcaagcatgtgcgggacttcctggacggccggggctatatggaggtggagacccccgtcctgaacaccatctccggcggcgccactgcccgtcccttcatcacccaccacaacaccctggacatcgacatgttcatgcgcatcgccaccgagctgcccctgaagcgtctcattgtgggcggtctggaccgggtgtatgagatcggccgcattttccgcaatgagggcatggacccgaagcacaatccggagttcaccaccgtggagctctaccaggcctacgccgatttcaacgacatgatggatctgttcgaggacctgctctcctccgccgcccagaagatcctgggcacctatcaggtggagtggcagggggagcagatcgacctgactcccggatggccccgcatgcctatgcatgaggcggtgaagcagtactgcggcatcgactttatggccatcaacagtgacgaggaggcggtggccgccgccaagtccatcggcgtggagctgcccgagactgcggacaagacctggggcaacgccctgtatgagtgctttgatcagaaggtggaggagaagctgatccagcccaccttcatcaccatgcatccggtggatgtgtccccactggccaagcggtcccccaaggacccccggctcaccgagcggttcgagctgttcatctgccacagtgagatgggcaacgccttctccgagctcaacgaccccatcgaccagcggggccgcttccagaagcaggtggagctgcgggataagggagatgacgaagccggcatgatggacgaggacttccttaccgccctggagtacggtatgcctcccacgggcggtctgggcatcggcatcgaccgctgtgtcatgctgctcaccaacagcgactccatccgggaggtcattttgttccccacgatgaagcccctcgattgagaaacccttgcagcgcaaggggttgcaggctttttcaacacaaggaaggccggttttacccccgttttacccccattgactgaaaagagggggcggttttacccccagaatttacccccaaactaattgaagagaatgccacatgagaaatgcccatgacgattgagtcatgggcatttttttaggaattgcgtataagtattcaacatgagcgacatcgcggatattaaaactgcgcctatgtttcgtccatccatagattctcgtttgagcggttttcgaaatcttcttgttctgccggtgttgctggacggaccatagtcttcccgcaatcaggacaggccaccacatttgtttcagaaaagagataatggcaattatcacacgcataaatcatccatatcaagcctcgctttcgtgactaaagtatagcacggagcgaggcttttttcaatttagacaggaaggaggccggtgcgatgaaatgcttgctcaaatatcagtggatcaaactcccccgtaatcaactaccgcccggaaagggcatcatgggcatatgggctcgcctggcttccagggccgccttccgaagtgggaaggcaacctactgcggctatatcaacgaagtgacggttggaacctgggctggcggtattgtaggccttaaaagcatcatggggatgaagcggcggcagcaggctttggagatgatggaccgtctcgcagatctttcctatattgggtacacactggatccaaaatcgaagaaacttacatacaagatcacagattgggttgtaaggtgctctggagagccctgtacgggccatgaggccgtttacgtgacagaggggtatggtttcctatgcctgcccagaaacgtcacacagcgccttgtagagcaaggctattcatttgatgagtcagacgcatggctggacctttggtgccacacggtatggcaggagccgagcaatgtgttctctcatatggcgccgtcagtccaatttgggcagtacggtgcggttttgaccttggagttccttggcaggcgttggagatgggaaaagacgaaggtctggcgctttttcagaaaacacgcggatgccttcccgctgtataagctgccaggttcctttggatgtctggtcttcaatgccgcttatcccaccggtgaaagaataccgcagcccgccatggatcaaatagaacgtattttgagtgaaatacgtattttgggcagaaatgcgcgcaacaaaacatcaagcgaccatgcccaactctgcaaactggttgcgtggtatagccgtaccattttgcagcaggagcagacaaaaactggccaagcatcagcggtggagggccgtgttgcacattcggactgtaataatacgcgtgcgtatttttctccgtgtaagattttagagtatgtatgggaggactgccaaggtgtcacttcatgcatggcgcgatttgaatttttccacagtgttttgcctcgggccggacctgtggatcaggataacggaggtattgaacatgacagatttgaaggcatccccttgtggtgaaatgtcagatcagggacaaggcccttctcaaaaactgctgcgcgaccttttggaacgcagagggcttatagaagactccagcatcagaaatgagaaagcgcgggtagctgaaaaggaactgcgccggaatatgtaccacaacacgcaggttatgcttaaaaactatcgtgatatcgtttgggcgctggaatgctttcccggtgagactgcccaggaactggaacagcctttgaaggatgtggatgcgcttctcagtgcggtagacgctcagattgctatgggaaatgcaaaactggagcaccgcctgctcagcatccgtaagtcacggctgcttctggaccgaatcaacgaagcgctgacggtgctacgccataagcctggaaacggagaaatgctgtacaatatcattttccagacctttataacgccggacaagcctagtcactcggaaattctgtatcgattggatatctctgaacgtcactactaccgcctgcgtcagcaggcagtgaatatcctctccatacgcctgtggacagctccacaggggtgcctagacgcctggcttgagatcctgacactcttggagggctgatggcaggaacgatggcagaaaagtggcggaaaaatggcaaggtcggtgcggctgacaggaggagtacaaatgtgctatcctgatatcgtccaaaactggacctgacggcaagaagccgccttgaagcgattttactggtcgctttgaggcggctgttttgctgtcaaaacaaaaaatgaggaggtacgcaaatggcgaacgacgagaagaagcaagacctacggagtggggtccaccggcgtttgggggattggctccatatggcgatgatcgcctgctatatggctgtgctgttcgtacagcctgctgccgcggcagacgatgatatgtggacgcggttttcagagattatagcgaatgtttacggcgaactgctgggaatctccacaattgttgccgtcacggcagctgcggtagccttgttagtacgcatgatttcccgcaatgagcgagctgtagcggaggcgacgagttggttaaaacggattgtagtgacatggatcgtgctgaacaccctgggattcattgttgcttacctgcagccgctcatcgaaggcggcaagtacacaccccccaaatgataagtgacaaaattactgtacaatagacaaaattatgctcctcaaaattccaagctgcacgaaccaccgtggattccatgatgctgcgaatggcacaaatcgcgtggaatcatggactcggcttgctggtcattgacgagatattttgtgaaaagcaatcgacagtgcatcggttgcttttttatggaaaggggaatttttatgatttatcatagaaactcagtgtacagtaattttgtaagtttaccacacggacagaagaagcacccatctttaccaagcctcagaaacaggcgcagtgtatataaattttgtaataaagcctgcatatttgaggcaatcagtgtacctattttttgtcactgaacaccaaaccgtgatctcaagtagtgctacatcaaaatgattgaggaggacctgtcaatgaagaaaaaaatcttttccatctctgcatcactcctgcttttgactatgttggtcatccctgctgacgcaaccaatgtagatgttacagatccggacgctatgctcccggttgatatcatccttgaccaagataatcgggaaatcaggaaagtgtacgatctctcccccaataccgatccgtccacattgcctatgcagcagtttgaaagggatggcctcctctatgaatgcacagatgtgttgcgtgaggtcatcatcggcagcgaaacgcaggtgattacgcagacggaaacggtggaaagcgacaagaaagatatggagacgattttatcgcttctgccacaggaaaaggaagttaccacagaagaggacttttccgggactctgcacctggatttggacagtatcaaaactgagccagccggctatggaagttctaccaagccggtgaccgctacgcgcacctatccaaacttggcaagccaagatatcaaccacctgccaaagagcattacggaggggggcagaacgctcaatctgcaagatgtccaatggcaaacggataacacctataacgccgacgactatgagatcggcgaccgctttactgcggtttgtacctatggcggcagcaaaacagtcagctatgtgaccggctataccacaacggctgactatacgggcgaggtttaccgcactggcgtcacggtaatccgttatacggttattttcacaggtactccgattgagccggttttatcagaagaaacgcaggatgctggggaaataacaagttggctgatggtgttactgccggcactgggtgctctcggcattggcgcaggcggagcatatttctttatgaagcggaaggagcgaaaaatgtatgaagaactgggtgagaacaatggcgctgttgctgggcatcacggcgatgatgatgacgccggcactagcggcggattatgagtttgatgcaccggacggcggcatgtacgcacctcccacctcagttgaccaagtgatcgtggtcggtggaggggtgactgagagcagcaatattgaccgcagcaagaacactgctatcatcgcgccgccttttggcagcccggaatcctaccagcccggagctggtacggttctgatcccacaggcatccacggcaacagggaacacgggtggcagtgatacagtctaccttccccctgcatcttatgtggatggtactcccacagaggacacgagcctgagcagcaccaaatttacgcttcctgatgggctctactatacagatgggagcattggtcggctaaaaatccctgttttggggttgtccgtcaaagtttatgagaatgagagtcttgagaacctcgccaaaggggccggccactttaagtctacttcctgctgggatggaaatgtggggcttgctggtcataatcgcggtgtggcaaaccatttcggaaagatccatactttggagaacggtgacaaaatcacctataccaccaaactgggcaccaggacctacgaggtattttttgtggggcagatcgaggaaacagacttttcaagactcggtcggacaagcgaaaatatgatcacactgattacttgcgttcggaatgtgccggagatgcgctggtgtgtccaggcccgggaaatcacctgactaccaaacttttgttgtaaaattcctctctgtccggtagaatataagcaaagatacatgagaggaggcagtcagtatgaaaaaactatgtttggtggctctaagcatcaccttggccgtggtactcgcctgtccggccctggcaacgtcctcagaagaggaaattgcagcggaatatctgaaagaacaggggattctggaaggagaccaaaacggagacatgaacctcgcgtccggtctgacccgggcgcagttggccgcagttctgacgcgactaaatgggaatcaggaacatgtgcaggcggaacaggaattttacatcagccagtgcaagttcccggatgtcccggcatgggccagactctatgtaggctattgctatttcaacagcctgatggtcggctacgatactggggcctttggcgctgatgacggcgtgacccctgctgcggcttgtacggttgttctacggtacatggatcttccagatattcaatgggattacaacaccgcctgccagacggctcttgaccaagggctgaccacagcggaggctgtggctaaaactgagattacccgcggcgatttggcaatcatgctctatcgggcgctgggcaataccgattttgaaggtagtaccgttacggaagaaccggagggaacaatcagcaggaacacagatggctccatcaatttgccagcagacggctctcaatatgtgcctcaggaaggcgatgtgatccgctgcgacgatggtaccaattacaccatcaccgatgtaagccggtgggacaaaaatatgtttgcttccggaccagtgggcgagttgcctgagccgacctgtgattggtctttgatgccccaggttgagttaccggcaccagaggcccggcattattccatcaatgatcatgagtaccttttcgtgcgaaatctctatgagacccgacgaatgctttacacgctttataacgccattggggataatccagagacatggcagaacggtgcgcccgtgtcccacccaagtggggccccaaaggtacaaatctatctgagtattgacgatggactgaacccgcgagtgttctggccatggcgcgcaaatcaaatcattgacctgttcaactcctgtccgccgggaacataccgcatggaggcgtgggatgtctacaaggacggcatcttccagcggacggagtacaacatccatgtaagataggccgctgtaaccaagattacagcggacaagcggtatacgtgagtataccgcttttttaatttccaaaataaatcaaagaagaatgccgtgaacccgaatgccattgagccgggggcgcggtttttttctgcccatttttggaggaacaacatgaaaaaacgatttctaagtattctgttggccatggtcatggctttttcaattttgccgacggcatcgctggcggcgggttcggttgaggaagccctcggagagatcgatatctataacggcgggcaggaactttcctacctgatgatcaatggccgcgtccgaaccctgatctatacctactataactacgtcaacgccaaaggagaaattaaagagattccggcctactgcgtcaatcccaatactaccggtgtgccgcaaacggttgacgttggggagagcatcgaatacttggctgaggagaaaacgtcggatccgaaagtgcttggcattgtggccaatggatatccgactcgttcgctggaagaactgggccttgagaataaataccaaggctattacgcgactaaaatggcgttgtggtgttatctcctcagtaattgggacatcaacaacctcaaggtcaattcggcgctcagtggcgtggaactgcagcgcgcacagaagatgctcgctgcggcaaaggacatctatgcccgcggcacagcatggaatgaagtcctgtcccctgaagtgacctgtacgccggatcgggatactgcctacgaggtcactatcgacggcaagcagtacaaacagcaggtttttacattctggtcaaaaacctgggtgtgtgattatgcagttgaggtttcctttactgaccccggttctgttccccggggcacccgtatcgtggatatgaacaaccgggacatcaccacaattaccactgagggtactggtgatggctatgcgggcaaattcaaggtcctgtatccgctagagagcgttgaaggagaaaccggcagcgtccaactctctttccgtacagatgtctataaatacgccgtattttatgcaatttgccaagagaaggatgaatacggtgaactccaaaattatgtagtcgatacggacccgaccacggaaatggacctctccactttcagcaactacgccgaccagccggtagaggaatacgataccgggttgcggatcatcaagtatgaaacggggacggaaatcccgattagtggtgctcgtttcgaagtcgttggtcctgacggcgattccgtcggtacttttgtgaccaatggggacggccgcatcgagatcccccttagcaaaagcgggaattataccgtaattgaacgggaagctccacagcattatatgatcagcgaggagcctgcccagaatgtcaccgtcgtctacgatgaagtagccgaggtgacattttttaatgacccctacggtactctgcgtattgagaaaaaatccaacaccggcatgaacctgccgggggcagtcatcaccgtcgagcatattgagtcgggacagacctttaccgctacgacatcaagtgcaggcgttgctattttcgatgagattcccttgggtgcataccggattcaggagaagactgccccggtgggctggcagttggatgataccgtctacaccgccacggtggttgctggcgagaccactacaatccctatcattaacgaggagttaccgggattgcggatcatcaagtatgatcgaaaaaatatggtcgccatgcccaatgtcaccttcgccgtctatcgggacggcgaatttttaggcaatttcaagacagatcaatttggtgaaatcttgattgccgatgcagagccggggacttaccgggcgtttgaggtagataccggcgatgaagggcacattctggacaccaccccccaggaggtggaactccatgctggggacggcattaaggagctgttgttcttcaacgatgtcaagcccggattgcggctggtgaaggtggattcagatgacccctccaaggtcatcccaaacgctgtattcgagatcaaatcggtggaggggacctatggcccccaggagttccggacggacgaaaatggagagatcgacctttccatgctcccccctggctcctatgtagtgactgaaaaatcctgcgatggctatgtgatcgacgaggcccagcgtatcatcgagctgaagcccaatgaagacgcccagttcgttttcaccaatcatatcaagccctctttgcagctcatcaagctgagcagcgatggctcccggctggccggtgtcacgttccgcatcgccaagatcgaggatggcagccactacctggaccgcaccaccagttccacaggtgagatcctggtatccgatttggagcctggcgtttattctgtgcgtgaattgtcctctgtgcaggaccacatcccggacgataccgagcaccatgtagagctgtttcccggccagaccagcacgatcactctgactaacgacaagcgccccaacctctatatccataaaaccgacgccgacaccggggagcctattgagcacacggtctatctggtgaaaggtgcagacggccactccattgcggaagtggagacggacgaaaacggcgtcgctgtggtggagaacttgctgcccggcgtcgtggaggtcatcgaaaagtcagtcccggagccctacctgctggccgaggattctcagatggtgacactgttccccaaccgggatcgggatgtctatttccaaaattataagcgccccaccatcgagatcatcaaggaaaattcaatcacacatgatcgaatcgaaaatgtgccgttccaggtctggtatgcctccaacaacactgctaccggagagtacaacgacctgggcgttttctacaccgatgaagagggtcgtatcgtgctctccgacccggacctctccctccgtgatggttggtttcgggtaaaggagctggagccggcgccgggatttgctctggcggacccggacacgcaggaggcgtttatcgccgcaggcgaggggcacacattccgctttagcaaccggcctctctcggccatttccgtatggaaatatgacagtgagaccggggccgctattgagggggctgtgttccaggtccggtatctctccggcaacacctccggcaccggcggaacggtcatcggtacctaccgcacttcggtaaacggctctttcaccgtcacgggctgcaaggccggcacttacatcatcgaagagctctccagtgatggctctcatgtgatcgacaccccgcctcagacggtgtacctctccggcgaagatcaggaggttgttcaggtctattttggcaacagtcccaagggctcgctgctgatcaaaaaggtgtccagtgccgacaactctccgatttctgatgttcagttctttgtgaccgaaagcgacggaacggtggtgggtgacagcaacggctatttcactaccgattccgcggggaccatcctcattgagggtatcgaccccggcaccacactcgtggtcaaagaaacccgggcgaaagatgggttccttctggacgacacaccccagactgcccaaattaaggccggccaaactgttaccctcgaattccggaatcaacccacaggacagctcattatccacaagctctctggtgatgacaggaaaacgccgcttgaaggggtacagttcaaaatcacatactccgacggaagttttgtggatgccgacagcgggcagctttccagcaacggcctgtattggagcaactcggcaggtcagattattctttccggcctcacgggcacagtggtggtaacggaagtggaaagcatcccgggctatacgattgaccccaatacgcagtcccaaaccgtggtgatcaatcccaatgatacacaggagttgtatttttacaacaaccctataggcggcattgaaattatcaaggtcaacgcaagcaagacatccgaaagaattcccgataccacctttgagatccgccgcatggatgacgctctggtggataccatcaccacagaccggaacggcagggcctatctctccctggaggacggctcctattacgcgcttgaagtcgaggccaatccggacttcgtattggatgatacccctcattacttcgaggtcaaaaacggggaagtgaccaccctgcgaatcaaaaatgaggccaattccggtattttgatccataaggtggacacctccggcgagggaatctatggcgtcaagttcctgctctacgacgaagaccgtaatcccattggggaatttacctctgatgacgaggggtgggtctatatcacagccgacgacctgccggatggtgccaacaccagtggccggttttatctgcgtgaactggaggctgcggagggctacatcttagacgaggagtataagaccgtctatgtgcgcccaggccgcacggcggaaatcgagtgggtcaatacggcgatcactggacagatccagatttggaagaagtctgctgacgataatccgatcaacggtttccctgccggtactccgttggagggtgcggtatttggaatctataacaaggccaatgcccttgtagacaccgttgagagcgacagccggggcctggcggtttcaaagccgctgcctttgggccgctataccgtgaaagagatttccagcccccagttctactcggtcagcgatgaagaggtgacggtctatctggagcatgaaggccaaatcgtgcaggttgagtacctgaatgagagcgtttataccaatgtgtctatcagcaagagcggctacacacaggtcgtacctggccaggagatccgctataccttcaaggatatcgggaacaactccacagtcccgctggacagcttttattggcgtgatacgctgcccacagacgccgtccggttggataagatcatcactggcacctactcggcccggctgaactacaaagtcgtgttccaaaccaatttgaacgatacgcagcgcgtactggccgacaacctgaacacacaaaagaactatacgctggacgcctctcctgcggctctaggacttgcctccaatgagtatgtgactcaggtcaccttcctgttcgggcgtgtcccgggcggcttcaaacaggtggagacgccctatatttactgcgatgtcctgtccaatctatctcacgaataccggtttgccaacaaatgcgatgtgggcggcatgtggcaaaaccagtgggtgcaggcgaccgaccgctgggtgactatcatctaccgcggcggtcctgtccccactctgcccaggacaggctattgatggtatccgactttgatgggggcggccgatgggtcgcccccaccccttttgaggttacaaaagcatgttagattggatttttgaggggatagcgaactgggtggccagcgtgatgacacagatcatggatgctatatccggggtgtttcttgacgcgcttggcaccgatatgaccgcaatggaagagtacttcccgtttgccgtcagtgcttatacggttatccaatacacagcgtgggcagtgctttttctggtggtggtatggcagttattccgtgcgttcagcggtcccctgtccgaaacagaggagccgctcgctctgctggcccgaggtgcaatctttgcgatcctgattggatatgcaaagcccattttcagtctcgttctggacattgcacgagcgccttatacagcgctcatggaagagactatggacccgggcgactttacatttgcgggaatccagcagactcttaccaatgggttggctaccatcgtatctgtagccacggtggtaggactgattttgttgatcattttcatgatcgctttggcatggaactactttaaactgctgttggaaaccgtggagcgatatgtcctggtaggcgtcctttgctatacatctccgctggcatattcgatgggggcttctaaggcgacttcccgggtctttcaaagttggtgccgaatggttggctcccaacttctactgctggttctgaatgtgtggttcctacgggcatttgactcgtccgttggccaattcattgcgaatggtggtgctttgagcagtggtcaaggcagcgtcttcttgtggcttttctgcgcactggcacttctgaaaatcgcccagagatgcgacagttatctggcggctatgggcctatctgtggcacagacgggtagcagcatgggaatagagatgctgatggctgcccgggcgctgactggtttctccaaaggcggcagcagcgctgcctccgtgtttggaggcgcggcgaagagcggggccggggctgccgccggtgcggctggcggtgtcaccacaggcggtattttgtccggctttatgagccacgtgaagcccaacagttttgtgcgtgatgccgttgtggacggcggaaaacgcatgggagttggtggcggtgtcggctttgttggccgggtattcggaggaatggcagcccgaaatggtgcaacattgaccccggagtcggtgtcatcagtggcaacacggatgcccaacgtatccggaacaattgcaggggacattgccaatcgtagcctcaacagttatatgccgcacctgacaagcggcaaagccgccgggatgacctacgctgatacagagattactggcggccacatcagcaccaatgcagtaggaccggatgggcggcaggccaaggtggacttttacaacacggcccagcatgatgtgcccaccaccccccacaccgttgttactgctgcagatgggagccaatggtatcaggtggcctctggggagggaatgggtgcgttctatgccacccccgcattcaccggaaatgtatccgaggcggcgcaggtgtctgaagcgttcccaagcgcaccggacggcactctgctgcggcaggttgatgagagtacgctggaggccatttacccggatggcggcaatagtctctggtacaacagcgcctatttccaggagccggatgcgccccatgaaacaatccagggcgccgacggtttgagttggtatgcgatgactcctgcagcatctgtgccgcaatttgagccggtaccagatggtggaagcggagcggcggagcggtacaaccaggcgctctttggccagtttatgcctggttttgaccagccagtggtgtctgtggatagttccagagctggggatggtattctggaggtgcggcatgaggacggaagtggtaccgcattctatgaccgcgctgtttatcaggctccacgcggcgactaccatgtgtacgaagacagcggtggcagccagtggtatgccattcatggcactcctgccgtggagcgtcggcccgtctatgaggacgggaaaccgctctatgaaaatgacaaacttcaaacatttacagtggagacggtacgctacaagtctactcctgcccggtactccgagccgaaaaagagaccagtcacagagcgtaagccgccaaacagaaaaaaacattgaccatcgggcaggcatacctgggaacgggtatgcctgccttcatatttcggtacaagcgaggtgatctctatgtctgacgaccgacagtttggcgaaggccaggacaactacctgcaggggatacgcagtgcggcagaggcggctaaacaagccggttccgccgccggttcagttggcacggcggctggtgaagcgacggccaacgcggccgcagctacagtgcaagccggtatggagactggcaaagcggcgtcagagatcgccgtcggaacggctgctggcgggccgtggggtgccgtactctcagcggcgtggtctctccgccacacgctctttaaggtcttggtgtttctctgcttgttcctgctgttcattatcattaccgtagtgtccctgccgtccatcgtattcaataatatcttccacactgacccgactaccgttgatccaaatggcccaactgagatgacagccatcttcgatgacctctccgctactgtggccgattgtattcaggctgggtatgatgccgccttggcggaggtagatgagattatagccgatgggggctatgactatgacctgtccatggaggcattggtcaataatgccttagtatctatggactacgatacctgctatatcctggctgcctactctgcctccatgggccagcgcggaacgactaaggcagatctgcagagtaaactcaacgccgtcaccgaccaaatgtatactgtcacttatgaggtgaagagtacccaagtcccggtagagaatgaagggggcgatggggagacgcaggaaacggtgcagtatgtggcctgtacgatccacccatttgaccagtcgattatcctgaaggcctttgacgtggacgtggatgctacatacgatcagttccagatctcctatggggatgcgatcctcaatatgtctaatgcgctgaagatgactatgtatgggaccgccagtaacgggagcgtgccgcctatcagcgacgcggaactgaacttgtttctggccagcctggactgcagcgggaaacgcaaggaactgatgcgctgtgccctctcactggtgggccgcgtcccatatttctggggcgggaagagcgcgccaggttggaatgaggagtggaacacccccaaactggtcactgcggcggggtccagcagcacaggaacgatccgcccctatggactcgattgttccggattcacggaatgggtctatcagacagcgttaggcgtgacactgtatgatgggtcctggaaccagtgggatgccacgcatgccatttcagaagacgaactgctgcccggcgacctcggcttcatggcggtgcccggtacagtcccagtcaaccatgtactgctctacgcgggagaggatgccgacggaaccaaactatgggtccactgtgccagcggcactggcgtggtgctgaactccccagactatgtgacccaataccgacgcaggaatgatattgatttagaaggagatctgcccttggcagacatcacggaggagattggatatggcggatgatcgagagttcagcaatgtctatactatcccgccaaactacactgattctggaaaattgctgggcggtctactggagacacgaaatacagtagaggcatgcattctgcttttgcttgtgggctatccggaattgatgtggatgcatcttccagctactgcaaaagttgttgtgatgaccgtgacgctgttgccactgggcgtcttcgccctgatgggcattggcggggactctctgctccggtttgtcaccaatatggttctgttttgggtacggcgccgccgattgcattacaggaggataggataccactatggcacgacagtcacacacaggaaacgcccgtcggcacaaaagcccaggccgtcggaaaaaagcagccgcccgtctggagttcgtacaggactacattcccctcaaagagatcagaaacgggatcgttgaaactacagatggccggtacctcaaaatcctggaaattgaacccatcaactttctgcttcgctccaatgaggagcagtggggcattatctctacgtttgccagctggcttaaaatttcgcccatgcgcctgcagtttaagtccgtaacccgcaaagcggattctgacaagtatgtggcgggactggaggcggacattgagagcgaggacgtaacggcctgccgggaattggggcgtggtactatccagttcatccgggaggaaggtagccgtgaggcattgtcccgccggtttttcctgatttttcaatacgaggcggtgcgccgccagtccgataacgattatggtgaggtctacgcagcgttgcagacggtgacgcagaatgccaagacctatttcgcccaatgcggcaacagtattgtacagccaaaagatgaagacgcatttgtagctgaaatcctgtatatgtacttcaatcgccgttcctgcgtggaggaccctttccagagtcggctcaaccgcgtggtggtggatgcgatggcggcaaaaaggcgagttgtcggcatcgatccagtcccgaagatccggacatccaactttgtggcccctcgcggccttgacttgagtcatgctggctacattattatggatgggacctactatacctacttatatattcgcaaaaacggatttcctcagcaggtgcggggaggttggatgtcttcactcatcaatgcaggcgagggcgtagatgtggatctgcatctgcaccgcgagatccgtggtaagaccattgatcgagtggcccagcgcatccggctcaaccgcaccaaactgcgagaactgcaggacacctccactgactatgaggaactggctggctctatccaggccggttactacatcaagcagggactctccagccggaatgaggacctgttctatatgtcggtgctcattacgatatctgcccctacctacgaagaactgcagtggcgtaagcagcagatgagtgacttgatgaagtccatggacatccaagtaggtgactgcctgtttcaacaggaggcggcactgcgatccaccatgccatttctctacctcgatcctggtctggagcgcaagtccaaacgaaatgtgcttacttcaggcgcggcctcgacctatatgttcaccagttttgaactgtctgatgacaatggcattctcttgggtcttaaccggcataacaattcgctgtgtattgtcgatccatttaatacaaaagtcaataagaatgccaattttactatctgcgggacatctggcgccggtaagacctttaccatgcaggtgatggcgctcaggcttcggatgcgcggcgtccagtgctatattattgctccgctcaaaggccatgagttcaagcgtgcctgccacaaaattggcggtacctatatcaaactggccccgggttccagcgcctgcatcaacgtcatggagattcgtcctacactcacaccggaaatggaactgatcgacgaattggattacaacgacatcgactccatgctggcaaaaaagatccagcagttgatgattttcttctcccttctgatccccgatatgaataatgaagaggagcagatgctggacgaggccctggtcaagacctacgccaagttcgggattacccacgataacaattctatctatgttgaccagagcaggggagagatcaagactatgccaatcctgggagatctctatgagatactcaaggaaaatccactgactacccggctggccaccatagtcagccgctttgttacaggcagcgcccagagttttaaccgccagaccaatgtaaacctagacaataagtatgttgtgctggacatctcggaactcaagggcaaactgttgccggtaggtatgatgattgcgttggactatgtgtgggaccaggtgaaggcagaccgtaccagacgcaaaatggtgtttatcgacgagatctggaaactgattggcggcgcggccaacaaacaggctgcggagttttgtctggaaatattcaaaattattcgaggctacggaggaggcgcccttgcggcaacgcaggacctctccgatttttttggcttagaggacggccgttatggcagagcaattctgaataattccaagacgaaaatcatcctcaacttggagccggacgaggcagaatatgtgaaagatgtcttgaaattaactcgaactgagatccgcagcatcacacagtttgagcgcggtgaggcgctgatctccagcaacagcaacaaagtgccggtcattatcaaggcatcccgggaggagcagcagatgatcactaccgaccgggctgaactggaggctatgctcaacgaattaaaggcggtagccgatattgcggaaagcggaagcaatggttcttctgcgggtttgactggtggaatggagggaaaagatgccgaagattgaactttacccacataaccaagctgcactcaaccatttggaggaggccctcaagtatacacgccgtgctgcggttatccagcctactggaactgggaagagttttgttgcgctggcttttatagaacgccggccgaataactcgtttttgtatctcgcaccatctacgcatatcttcaatcaactgaaacatcatgctgggcatacagatgtgcttctccatacaaccatgatgacatatcagaaactttgcctgcttcacgaggacgaacttgggaaactggagccggactacattatccttgatgaatttcaccgctgtggggcggatgactggggaagtgcggttgaccatcttctcgctttgtatgttgaatgcttcttaattggatttacagctaccccagtccggtatctggataaggccggcacacgcgatatgtctgaggaactttttcacggaagtattgcaagttattatacccttcaagatgcaatcaatgataaggtcctgccggtgccgcactatgtattgggagatatcctgatgaacgaaagggtctcttctctggaaaccgcattaacgcaggttgcctcttatgggagggctcgtactgctggttattcattgttagaaagccttaaaagaaatatggcagaagcgcaaggaattgacgaaatatttaagtgccatatgcccaatagatttgcaaagttgatcgtattctgccggaatcttgaacatattgcgcaatgtcgggaagacatgcaccgttggctgggaccaggtaagaaaatcagggagtatgtctgccgttcagatgaaaaggccgctgatattgaactcaacgcctttgctggggataatgaaaggaatgcaatacggttgctctactgcgtggatatgctgaatgagggtatccacatcaaggatgtggatggggttgtcatgttacgccctacgataagcccgattgtctatttacagcagattggacgctgtctcgcctgcagttcggatggtagtacatccccggtaatttttgatttggtcaacaactatgagtctgcacgtgttgaagagtctggtcagcgtgtattcaatattgagttttcccaccatcccagcagtgggaaagggaagaacacgcctatacccttttacatgtctggggtccccacacaattcgaagccatccttgagaagttcgatcatctatttacgcgggcgggacgatgggatttttgctactccatcctccaggaattttaccacgaatacggccaatatccgcatagccgcacatgttaccgaggcatcaaaatagggaggtggctatcggaacaaatcctatatatccagcacaacagtctatcagtagcccgaaaggaaaggctggagatgctacctggctggtcgacttttctgattgaacgacaaccaaccagacgtacattcgatgactactataaagaattgctcgtttactttgagagagaagggcacattgatattccacaatcatacataaatccatcgacaggatgtaaactgggcctttatctgacacgtttacgcaacattagaaaaaagaccgataggggacatttatcgcaggaccagatcaatagactgaatgctcttggcatgaagtgggtgaaaagagagcacccatatcgggacttcgattattattaccagcaactgataaagttttaccgccgagaagggcacatcaaagttcccacaaggtttattgatcctgatactggttgccatttgggcaactttatcaattgtgtaaggcaggcaaagaggggaacgggccatgatattgttctgacagaccggcaaattgagatgctcaatgacttagggatggtttggcaagtccaggcatctccattgccatttgatacttactatgaggagctgctccgatactatcggagggaggggcatattagggtgcctgggaactatattgtgccggagaatggatgcaaacttgggaaattcattcagcgaatgagagcaattcgtgcgggcactgcgtctagtgggtttatcacccaggaacagatcgcaaaactggatgcgatgggtatggtttggaatgcatcaaattcaaaaaagaatttagaagagaggagttgcagaaatggatattttcacctcgttgacagcggaggagatcgcacacagcaagcggactgcggagatcagcagaatactggctgaacatgcggattatgactcggctgaagtacacgaagtgtatcaggcggcattgcttcacgatattgggaaaacaatgatcccggtgcgcatccgttgtaaatcgggcagtttatcagaagtagaacggtcatcaatgcggaaacatacgtcaattggacattttctgctgctacaaaccggaacgatgctggggacatcttctgttgtggccttgcagcaccatgaacggctggacggcagcggctatttggggctgcaagatgctgaaattcaccctcatgcaaaaatagtagcagtggcagacgttttcgatgccctgatctcgcctcgcccttataagcgtccgtgggatatccgtcgagtcagcgattacctaaaatcgtgcgctggcgtgaaattggatggtgccattgtcagactgctgctggacaatcttccacaggtattggccctatatcgggacagtacacgtataacctgcaaaatacgtatttctcccatttatacacatagaggaaggagggaaacaaaactatgctgttacaggaagaacagtatatcatccattggctgacagagtatgggccgctgcctaaagcgcaaattgtccgaatgctgaaggacaaaccgcctaagacggcagaaaagattattcgtgcgctcaagaacgaggtcatgctccacgaaatctccggcgggtactatctgggggtggaccccatgtgccagccggatcagcgcatgatccttgccgtatgggtgttgctgcagttcattgacagggtggaccctatggctcactatcccgctacttatccgtcccagattttcttcctcaaagaagatattggatatgagattgttgtcctctacgatggcgaacagcatctgaccagactgcttcagcctcaggaggatctgcggtatatccttgtcctgccacatatcaacatggcgcaggagctggtcttgccatctgcgcctcacctgtttgcgactgtggattacaacggacaggagacgccggatgtacggttctttacggaaagcgagggggacacctatgccgcggtctgagtttgagcgggcgcttggagcagcggagcatcgggcgggaagagcggcggtggaattagcccgtactcgccgtttgctggagcgggaggacatggccggtgcgttcggggcggcattcgcattttccgcggaggtagagaaactcgcgcttcttgcgcgtgtcctgccagcctataccggacatcccaaggcagcggaactgaaggagcagatgctgatggacacgatccccgtggagatgggatatgcaaagcgtgggtggtttcgtttgcagatccctgcactgctgccgaagaaggagtccggctcccccatctacatccagcagtatctctacccggcgctgcggcgctattttgctggaaagccgccggctctctatcaaaattgcgtgctggcctaccgccatgtgtactgtcgggaacgtccggagcgtgcctatcgggaccacgataacattgaggtcaacatggtgacagacatcatcacgctgtacctgcttccggatgatgcgccgcggcgatgcgcccactactattgcagcgccgccggggcagaggatcagacggaggtctatgtaatcccaaccagccggttccccacatggctggcggcagaacaggcgaatgatttggaggaggaaagactgtatgaaacgagcgaaatttgggactaaaaaagtacgggatttgaggcccagtttcaccccatttttccacgtaaatccgaaacgcaggaaaatacctgaaaaatcaagggtttcccaaggtgacagggaggcgttttgcggcaaagagaggaaaagccatgccttaaaatcagacacgaccgggcagtcccaatgatcacactgcgaccgggcagtcatgtttaccgcctgctgcttttactggccattgctggggaataccccatgcgctctctgcatctgttaggcagcagccggacgctggaggaccttgtccaccggctggagcatgtgcaggacttccgcacctccactggggcagaccttggctcctgtaaaatgattaccacaagtgggaggggcgagcggcggacaatccggctgtataagagtgcgctccccctcctgcagaccctccatccggcagccctcgcacactatttagacatcactcgaaatcatcgtttttctgggagtgcggaacatatcgagcgcaaccaccgagtcgcagagacggtggcgatgtgcttggttgcggacgtggagacacgtccttttctactgcctgttctccaaaggcgggcaattcagcaggttgtactggatggggcgagtttttacacggcaaaatccgtgaagcggctggaccatgcggaaatgaacaagacgattttcacacggctcacgggcgcgctcttcagccctggttactgttatgctgtctataacacgcgcaatgcagtgatgaagtggagcggtatgggcgagttcaagacagcacggcatttggaagaattatcccgtatgaatgcaggccccgcccgggcagaccatgcacttctgttgggagagaatatggatttggccctgcagaccttgctggagtcggataaaagcggccgcatagaactgcgttttgaccgtatctatccacacgtacattttatcccaatgacagagcagggaatccgactgctgaggctcctaacgctcccagactggaaagagcgggtcctgtcagttgtctttccggagcagatgcgtacagtgggaccgggcgtgatggagtatgacgctcaaaacgggaataccctgattctctcccacttggacggcgacatcgcacggcttgtgcgggtgcggcaggcgctggagcacagcaaggtcccatatgagatcatgtgtttcccctggcaatgcccattcctgcacgggtatatcggccctcgggcacagctgcgtgaaatcagcatgactgacttggaggcggcgctggggatcggacctcaggcagatgagatctgactggaaggggggactgccatgcagtcgaagtatattcgcacaataggaattgtactcgccgtcatactgagtatggcggcgattttttacataggtgggttggtcaaccaattcaacctcaattatcagaagtggcttgcagagggcgggatcactggcaaagccacaatggacgcgatctgtttttcgccggtgtgctgctggcggagcgccatgaccgcaagcggtctgaaatgcgttgcccttgtggcagtcatcggcagtggtgtatatcttttcatccatttccaagatcgatttggcaatggcgactatgatcctcgcaatttctcccgcagtaagcgggggacctatggcacagcggggtggatgagcgacaaggagatgcgtgccatcctggagatcagcagccccggccatgcgaaggggattatcttaggcaagacggagaaaggagccgtcatttgtctgccggaggatacccggctcaataagcacattgccgtcttcggcgcaagcggaacaatgaaatcccgcggaatcatccgcccggcgctgttccagagtatccggcgcggggaatccgtggtgatttcagatccaaaatccgaaatgtatgcggacacggcagaactgtttcgcaagcacggctatctagttcgggtctacaatctgttacagccggaacttggcgactcctggaactgtatgttcgacctgggcggggacaccctcatggcacaggtgcttaccgatgtcatcatcgccaacacgaagggagatggtgagagtgatcatttctgggataatggcgaggcaaatctgctcaaaagcctgatcctttatgtggatatggactctacccgcaaaccggaggagaaaaacctgccggccgtctatcaaatgatcacccagaacacagaaaaagaactgactatgatttttgatcggctgccgctggaccatccggctaaggctccatacagcctgttcagtcaaggcagtgatgcagtacgggctggcattgtgcttggccttggaaccaggcttcaggtgttgcaaagcgaagccgtgcgtcagattacccgtcgctcggatattgatttgtcactgccgggcaaacaaaaatgcgcatactttatcatcttggacgaccaaaactcatctcttgagtttttgtcgtctcttttctttgtatttttgttcattaagttggtgcgctatgcggacagtatgccggagcagcgatgcaaggtgccggtcaatatcatattggatgagatgaacaacattggcgtgatccctgactttggccggcgactcagcacagtacgctcaagggccctgcagattttgatggtctgccagagcctgcctcagcttcagaaccggtatcccgataatctgtgggcggaactattaggcaacgcggatacgcaggttatgttgggagccactgatgatgtgtcggcgcaatacttcagtgcccgcagcggagacatgacagtggaagtcaactccactatgaccacacgacaaagtatcgcccttgcgcaggttattcctcaataccgctacacagagggaatcggccgccgccgcgtactgactccagatgaggtgctgcgcctgcccaacgatgaactgctcatcatcatccgcggacagaaggttctgcgggccaagaagtttgactttacggaacacccgtatgccaaagaatgcgtgaaggcccatatccgggactacaagcctgcacatcctgaggagaagcccgctccggtgatggtccacccacaagcggaggaaactccaccaccggaaaaaaagaagacggcaaaagagaaaacagcaggtcgcggagcgtctgcagcaaaacagggcgagaagcctgctgctccagctcaaactagcgcgcccccggctgctgcgccgccagaacaaccgtcaaaacccgccaaacggcccaagaccctctatgagagcgctaggccgccgacggatttttgagtaattaaagcacgatgaaaaaacaaaggaggactcaataccatggcaaaaaccaagaaagagattcaggaacagaactctgaagaaaagcaggatggcattactgccggcctgaccgattcggaattgtacccagatgggagcccgcctgcgggcatgatcgatctggaactggcaagtgcgactacattggacccggatgcctcccagactgacgagaatttgggcgaagctgcggatggccaggcaccgcatccccagactgagaatgatggggatgcatcccaagatgaatcgcttcagcctggtgctgaacctggtgaaggcgactctggttcccagactgaaacagaatccagtttggaacctgatgacgttccccagactgagtataattttcaggatgagctgcctcagcctggcgggcaaccaggtaccgaacctggcgaaggtgcctccgattcccagaccgagtctgattcgggaggagattgcgatgagcggcttcagcctggtgaaaatgacgatacgccccagactgactcggaatcagttcaggatgcggaggccggcgcgccgcccgcaaggcgccgcaggagcacccgcaagaaggtatctgaggcggaaccaaaatccgatgcttctgacgctgaggcctccgatgaggaggaaaccaatacagggcagtcccaaaaactccggatgcctggccggcgccgccagagggtcgtctccattgacgccgagcgtaccgtgcagacagatacagaccggctgcgcagcgatctgctggatctggtggaatcccttaaaagtaagaagatactcaccggcacaatccagggtgtggagcggctggcagacaacccggagatgtcctatgcggtcatctaccatggtgacttcaaagtgatcattccggtgttggaggctattgaggagccggaggattatcgcgggcagcctcggggtgatgtactccactatctgctcaataagagactgggtgcggaggtggactacattgtcaagggcgtcgaccaggaaaacaatgtagtggctgccagccgtctggaggctatggcactcaagcggcgggagtattatttccgtaccgaccgggacggcaactatcagatctatgaaggaatccgtgcagaggcccgggttatctccgttatccgggccggcatctttattgacctgttcggcgcggagtgctacatcccgctgcgggaactttcctatcagcggtgggtggatgccgcacagcactatcagcctggccagcgcgtgctggtcaaggtcctagaggtggaccgcagcgaccgcagccaccctcgggtgtccgcatcggtaaagcaggcgatggaaaacccctacgaaaaggccttgaagaaatatgtggtgggcaaccgctacgtgggcaccgtcagcatggtggacctcaacggcgtgttcgtatccctggacggaggcgtcgactgcctatgtacctatcccaagcgcggccggccgccacggggcgccagggcgactgtgcgcatcctcggtatcaaccacgagaacaaccggatctggggtgtgatcacacatatgtctacaactcgataatgcttttgatgtgacaaaaaaaataaaaatcgaaatttgtcacattgatattatcaactttacaatttagaagggatgtgataagatgatgactgggaggtgagttcatggaactcaggaaccgtactcggtatttaaagcaattgatttcgttccaggacacagacctcataaaagtggtcaccggtattcggcgttgtgggaagtccagcctgctggaactgatggaagagcaccttagggaaaacggtgtggcagcggagcagatcgtctctatgaattttgagtctatgcagtacgccgatatggatagcaaggctctctaccaagcggtaatggagcggaaactggcggggaagaggctttacctcttttttgatgaggttcaaaaggtcccccagtggcagaatgcggtcaactcctttcggatcgacctagactgcgacatctatgtaaccggctccaatgcttttttgctctcatccgagttgtccacctacctgtccggccgatatgtggaagtgaagatgctgcccctctcctttgcggaattccttgattttcaagggtacacagtggagtcatatcaatctcccgcaggcggccaacggaagcgggccattgacaaacagggacaaatgatggatttgcgggaactgtttcaggcatacatccgcttcggcgggatgccagccatttcggaaaccgggcttgatcaaaaaaaggtccatatgctgctggatggcatttactctgctgtggtagtgcgggacatcctggagcgcggccgccggaaggaacagcgggccattacagacgcactgcttttgcggaagatcatcctctttctgtccgacaacattgggaacaacacctcgatccgctccatcggcaacacgcttgtgacggagggcctcctggaggaggggaaccgtaagagcaagccagccgtgcagaccatctcggcctatatagacgccctgctggagtcctatatcttctatgaggtcaagcggtttgacatcaagggaaaggattatctgcggacactgggcaagtattatatcgtggatactggccttcgcaattacctgctgggtgaccggggcggtgacaccggccatctgctggagaatatcatatatttggaactgttccggcgtggatacgatgtggcgattgggaaactggacgataaggagatcgattttatcgcaaccagcaacggccccaaaagatatatccaagtgaccgaaaccatgagtgattctgaaacacggaaacgggaactggcgcctctgatggcggtacaggacaactacgagaaagtcgtcattacgatggatcagccgctggataccgacatcaacgggattaagatcgtgaatgcgctggatttcctgctggatggtgaaacacagtagaatttggatagcacttggaatcagggtgaacgcatgaggtgcgttcaccctgattcattttctgcgaagaggagatgaactaagatgaatagaacgagaaagaaaacgggacgggcctgcctgtctctgttggtgattgtaatgttgatgtcagtgttgtgtccagcggctttggccgataccgatggcacagaaccacaactgacacagcagccagatcaactgattctgcagcttggaacgcgctgggcgggtgtagagtttgaactacgcactgacgccggagtattcccggcccccattgttgtagacagcagcggagtactgaccatggatttgggcggcagcaagacctataccctcagctgcctcaattccacggtacctatcccagatccgctcacggggcaaggccaggctgtacaggagccggctgagccgtcacaagacgccgctgcggatgtggcgcagcaggaagaacctgatgcaaactcaggcggcatcccagtcggcacgctgatcctgttcctgaccggcttggccctcgctggggcgggtctggccgcgctctacattgccaaacggcgccagcagtcggtttgtgataactgggaggatggggacgatgacgaatactgagccctgaaattgtcccagactgagatggatactcccagactgaaatgagtgggatttttgcgaaaatcactgtgttttttgtgatttttattgactttttggatggattctgctataattccaatatagcaagatactgcgtagaggctttcgatacgccggggcgccatggcgtcagacctgctgaaatggtgcggggaatcgttacggagccgctgtcccgcggccccacaacgcgcaggtcttgtctgaaaagaatgtggccggaaggccgctgaaatacagtgcagagtcaatggctggatgcgacaccactattccagcgcttggctctgcattgtcttttttcagcggtcttccggtctttttcgtttttcccggttccgctcaggctgatgcgagtctgtcatatgtcattacttcgagaggaggattttagcatgaagagaaaatcaaaccgcagcaaggatagtgtactgccgggtagtgggcgcctacattgccactgcggcagccctgcggttctgcgcagcgcggagggtttatgcagggtacaccaggagggagcgatggcctatgtctgttccagatatccggattgtgattcctttgtgatggcacatgcaaagacattgaagccgatgggcagtttggcgggaccggaactgaggcggctacgctataacgcgcataaggaattcaaccgtctgtaccagtcagggatcatgagtaagcgtgatgcttatcagtggctgggcatgattgtgcaggcaccgatggctcacgcccatattgggcatctgggagagtattactgtcaggtggtcatccgggagagcaggaaactgtatcaggaacggatgggagagaaggagcggttaggaaaggtatctggaggtgaatgaaatgttgaagccgttgacgaatgaacagcaaatcaaggtggaggagaatatgggcttggtggggaaggtgatccaggactgtgtgcatacattgggcacgggctgcatctatgactatgacgacctgttccagattggatgcattggcctatgtaaagccgcccagacggaccagccagggtataacgtggccttttcgacctatgcctaccgcctgatccgcaatgagatctatacacagttggagtacgcaacacgccggggcagggaagtggccaccgatccagatgagatgccgtgttcggtactggacgatgagaccacagaacagcgggaggcaagcctcagtctccttcactttttggatcgagccgaggcagacgccaccggagtggctgcaaaagggatgcaggccatccggctgctcgctgaaggatacagcaaccgtgagattggagaactgtttggcgtaccggccaactatgttacagcgtgggttgctaaggcgaggaaggtcctaaaacggcagagagactatgagtattcgggggcgctttcctgatttgcaccaaagggatggcacgctgttttagactctgttccggtagacaatggctgaagcatgtcctgctttcggctgtctatgcatcagttgatgaacgtgctgcgagcatgaaaaaacgggcccgcgggagcaatgcttccgcgggcccgtttttgcttgtctggtacgaatgattgagtttatctgtctagccagctggggcgtctgaattgccttcttccgcgggcagccacagggaactgtatggaattagagcccggctactctttgcaaagacgatgcgctctttctttgacaacgagggccagcatacctgcaggatcatatagtctatgatgacatctgctgcggggattcctcgtttcatgctgcaatagactatctgccgcagcactttttatatttctttccactcccacaggggcagagatcgttacgcccgacctttactgttttggatggcagtttattgaggcgtggctgctcgtacaactcaaaaatttcgttcggagttctcccgttgtttgaccagagccgtgtgctgttcgccatttccgacagaatatccagaacgatttgcaggtctttccgggaaataaatatcttgcagtcacggagaatattcagatactcaacagggcgtacctccagaagcatggcgaagtggagttccgacatgaccgcattcacatcctcgtggctcaatcccatatcacgtcggaggtattgctccatcagcagtgtggcggcggtttcctcatagtagtcgatatctgcatacttgaggaactcgggcttcgggggaatgtatcgcggcttgcttccaatcctggtcaaaaggtccgcaacatcacggaattcattttcctcgaagccgtgatggactaagtattcctcccatagcacataaccgcacattgaggcgatgtgccggagcagggtggggaaaagttccgcctccgcgagtttcttactgttctggctgttgaaaatggtgatcaggtcatcctggcggatcacgccatacagattaaccgccgccatggcgtaggaatggatcaggttgtcgcgtttcttgcgtgccaggaaactggcggtagccaattcctggtagattgcacgcacatccttcggtacaacgtaaaattgacgattctcatgctgaaaggcctgaagatatcctaggaagggtagaatgccttccatcccctgtgcagccgtttttagtgggtaggcatcggctgccgcgcatttttgaaaaagtatccactctggttcttctaagccgtacaggaccgcttctaaccgctcgggccgcagtaagtcgttgcggattacgccgatcaattcattttttcgcaatttagaggtaccatttaaatggagatttgccgcgaggcggcgcaattgggggatagttttcctcgccagacagttctgcagatccgtgaatggtgcggccgcctccataacatcatggctgagtcctttctgtgccaagtcaattcccccttttcaagcatcatatcatgtttttgaggtcacggcaactgcaaaccgggctgtgaagatcggataaagttgcacttttggtggcaaatgatagatcccactgtcaagagttttccacgacgcattgatctagttggattttctttttgaatgtcagatgatatacccgaccattcagaagaccatagaagcagaatgagtgaacccacatataggcccgccaaggctatgaggggttatttgataaagagaattagatttctcttaattggtgatcgccaccaagtggattgcacggaagccccaagcatctgtgccctcaacctcttttcggagccgtgggagcggtatcatgtgaaaagagaatatccatcgactgtgacaggcggactccttgacaaaaatatcgtaccgtatggatattttctacgtgacacaatactctttttttcaagggacttgcagggcattaaaatttgtggtattattagttagtaaatgctaactattgaatgccaggggtaggagtgcagataagcaaaagtatctggcaaactgcggttctggtattttatttgtactgaatagttagcaaaaactaacaagatgagagggaaactgtaatgctccaatacaccatcgcagtggaaggaatggcctgttccatgtgcgaagctcatgtcaacgacgcagtccgcaaggcatttcccattaaaaaggtcacttcgtcccacagcaaagggcagacgcagatcctgtgtgagaacagattagatgaggacgccctgcgcagtgcgatctccgccacaggctatcaggtcctttccatccagtcggccccctatgagaagaagggcctcttctccttccgaaagtaagcgccatgctggatgcacttttatcctgggacggctggaccgtcacccagttgcccgcggagcaggcggctatcttccgactggagggagcacccccctcggaagagttcccgtttatccaggagtcggaggctctggagatcctattttgccgcaaaggcgggcttattttggaatgggccggccaccggcgtcttagccttagcgccgatcaggtattgtttctcccagtccgtacagaagcgtatcggggccagtttgcttcggagtcattctatggtgcccttattcggatggaagcgaaagccgcgtggtcggccctgcgtgctatgcactccgacttgggagagtccatctcccgtgcctggaatgatccttgtatgctgaaggcagcactctggagcgaagctctgttttctgccctggactatatgcagccgggacatatcggagattactatgtcatcaaggcgctggaggttttgttcctgctccatgcacagcgagaggggctggccttacctccgcagtgtgattaccatacacatagtcagattgaaaccatacgcgagattcagaaatacttggtggggcacctggatgagcgactgacgattcagatactgtcccaacagtttcgaatctccggcacagcgttgaagtcctgtttccgtcaggtgtatggagtcccgattcaccagtatctcctggaacagcgcatggcccaggccgcggaactcctcgctactacgacccagagcgtgctccagatctctacagcagtaggatattccagcgtcagccagttcggcatcgcgttcaagcagcgctaccatatgcctccctcccaatttcgacggaatgcaaataaaaatccatttgcaacggttttcgtccgaaacggatagaaaagtctaagattcgtatgttattatgtgtgctcaaataaggtgccatgtctggcgagggagggactatccaatgaaacaccaccgtttctgggcttggggcgctgtcgtctgcatggtcatggccatcattaccggataccggcaccgctgaatgcgaggtgagcaatatgaatatctataagggagtaggtctgttcgccagcggcgtgctgttcggctctgctggcttcaagctgctgtccagcaaggacgcgaagaaagcctatacacacgccactgccgcggctctgcgggtaaaggagtccgtgatggagacggtcacctctgtccaggaaaatgccgctgatatcttggcctccgccaaggaaatcaatgagcagcgtgcgaaggcggaggaggctgccagcgtagagtgttctgaagcgtaatgcgtaagaaacgagggaggggccgccgggaggcggtccctctcgttctatggaggcaatcatgaaatttcaaattaaacacgaatgccgcggacgaatccgcgttcaggccatgcagcagcgcatgacgctggaacaggccgacatgctggaggcatggctgctgactctgccgcaggtggagcgggcgtctgtccatgagcggacccgctgcgcggtgattgagtatcagggagatcggcaggatttactaagggccctcgccggtttttcttatcagaatcatgcgctggcggaattggtcccgctccacagcagccgggcgctcaatcgtgcctatgaggaaaagctggtgggtatggtcgcgtttaaggcagtccgctccctgttttttccggcaccgctgcggacagcctacgctgttgtgaaagctgttccatacctgttccgagcactccggtgtctgttgcgaagacagctccatgtagaattgctggacgggatttctatctgcttgtccatggcgcggcgggacttcgacacagccagttctgtgatgttcctgctacggcttggcgagttgctggaggagtggacccacaaaaagtctgtggaaaacctagctcggagtatgtctctgaacatcgaccgggtctggatgaaaaccgaaaaaggagaggaactgctcccgctccatcaggtgcaggccggggatcaggtagttgtccgcatgggcggcatgatcccactagacggcaccatcgtggagggcgaggtcatggtcaatcaggcgtccctcaccggagaatccattcctgtccccaaacggcccgggagtagcgtctatgccggcacggtggtggaggagggcgaatgcgtcctcacggtcacccagcagtccggcgagggccgctatgacaagatcgtagccatgatcgaggagtcggagcagctcaagtccgcggcggagaatcacgcggcacatctggccgaccagttggtgccttacacgctggcagggagcgcactggtctatctgctcacccgcaatgtcacccgtgctctgtctgtgctgatggtggacttctcctgcgctttgaaactgtccatgcctctggcggttctctccgccatgagcgaggccagccgcttccatgtgaccgtgaagggcggaaagtacctggaggccgtggcccaggcggacaccatcgtctttgacaagactggcaccttgacccatgccagccccgtggtggcccaggtgatcccctttggtgggaacaaggagccggaaatgctccgtctggccgcgtgcctggaggaacacttcccgcactccatggccaacgccgtggtccaggccgcccgggagcgggggcttgcccacgaggagatgcactcccaggtggagtacctggtggcccacggcatcgccagcacggtagacggcaggcgggtcatcattggcagtgcccacttcgtctttgaggatgagggctgcactgtcccgccgggagagcaggacgccttcgacgccctgcctaagcagtacagccacctgtatctggcggtcggcggcgtactggccgcagttatctgtatctctgaccccttgcgcgtcgaggcggtggatgcggtagctgccctccatgacctgggggtgggcaagatcgtcatgctcaccggcgacagtgagcgcactgcggcggccatcgccgcccaggtaggggtggacgagtaccgggctgaggtgctgccggaggacaaggcccactttgtgcaggccgagcgttcgcaaggccgcacggtggtcatgatcggcgacggggtcaacgattccccggctctgtccgctgccaatgttggtatcgcaatcagcgacggtgccgccatcgcccgggagatcgcggacatcaccatcgcggcaaacgacctgttcgagctggtgcagctgcggcggctgtccatggccctgatgaaccgcatccagtccaattaccgctttgtcatcggcttcaacggtggtctcatcgccttgggtgccttgggcgtcctggcaccggccacctccgccacgctccataacctgtccactctgggcatcagcctgcgcagcatgaccagtctgctgccgccggcaaaagcatgaacacagccccgtctgaccgtatgaacaaggccagacggggctgtgtcttatgctgtgatttgtcgtacccctgcctgggtttgtccacggagcgttggacgggaaagggtcactgtttcgcaactaccaggtacattttgaatggggttacggcctggaccgcatgggggatgccggccggcatgatgacagcctccccggcgttcagcgtgtgcgggacaccgtcaatggtgatctgagcggtgccctccaggatggtggccatggcgtccccgggggcggcgtgggtactgatggcctcgcccgcatcaaaggcgaacagcgtcatccccacaccaggccgctgggccagggtcaggctgacgactttaccgggctcgtacccgacctgatccttcaggggaaagggccgtgcatggggcaggtttttgatcaacggttccatacagatcctcctcagtttgattggatggtaatttgcagcagtttgaaggggccgctcccgccaatggcgtgggtggtctgcgccgggacagccagacaatcccctgcgcccaggcggacctcgtgtccctccaggcgcagaggcatatcaccctccagcacataatagaccgtgtcgccgaagtagcgctcctcactgatgctctctccgtccccaaaagccagcagcgtcatttggcagtgctcgctgcgggaaagggccatgctcaccacgcgccccggctggatggagatgagttccctcagagccgccggctgctgaaccggcagattgcggagaatgtccatttctgagcctccttccgtgttctaaaagctaatatatcacatttccttgtgggacgccattgccgtggcaaccagaccggttctaaccggtgatccgccggatgatctcttggcgcagccgggccagttcaggggcggaggcgtcccgcccctccgggccggggaggtcaaaccactggcagattgcagtggggcgcggagcgagcacggcgatgcgggtcgccacagtgagcgcttcgtcgatttcatgtgtgacaaaaagcaccccgggccgctcccgctgccagatggataacagcatggacagcatctccatgcggattccgtagtccagcccctgaaatggctcgtccatcaggaaaatctcaccgccgaagtggaatgcccgggccagggcgcaccggcgggccatgccgccggagagttggccgggataatagcgttcaaacccctccagccccacagcggtgatgagggagcgcacttccccggcgggcgcttcctcccgcaccagccggatgttttcctccaccgtgcgccaaggaagcagccgggcgctctgaaacatatagctcagcctgccgtccgcaccctccaccgtaccggcgtccggcgccgtcaggccggaaatgatgttcagcagcgtggttttcccgcagccggaggggccaatcaaggcgacgatctcgccccgggacagggtgagggacaggtttgagagtacgggcagatcctcaaagcgtttgcagatcccgctcagtctcagcatggggctccccctctcctggacagaagcaggcacaccagcttctgcgtaataaagcaccctgccaccagcaggaatgcccacgcgatgatcgcatcgggctgaatattcagccgcgcggtggtgatggcgccgccgatcccgctgttcgtggtgaggacctctcccatcaccgccagtttccacccgccgcccacgacgatctctaacgcggagaggaaataggggcggatagagggcagcgtcacatgaagcaggactttccggcgggaaaagcggtagagcctcgccatctccagaagttccgggtctacgccccgcacgccgtggctcaggttgatcaccaccgtcggaatggtggatgcggccacgatgaatacacagggccagccgttaaacccaaaccataccagagccagcacaacccagcataccggcggcaccgactggagcacatggatgaacggcgcccccacatcctccagtttggggcacaggccgaacagcagacccagaatggaacccaccgcaatcccgatcccaaggccgagcgccaggcgcagcagggtggtaccgacggtgggccagaagtccggctcccggatcagccacgccagcgtgcccgcgacctgtggaacgggagggagcaccagaggggagaaacagagcgaggccagctgccagacacccagcagcaggcccacgcccagggcgcggcggagccagagggccgccttaccccgcatagtataacccgtcgttggggagttttccgccgatcatcgaggggtcaaagtcgttgagcaggttatagaatgtatccagttctccccaggcgtcctgggcgcttttgaaggtcaggcccatattggggatcgcggcctccaccacggcggccttcatgcccaggtgctcctcggccagagcggcggcctcggcggggtgatccagcacccactggacactctcggcgtaggcggcctggaactgctctgtcagctccgggttttcgtcaatgaagccctgggtggtgccgaagccggcgttggggatcatggtgtcggtgccggtgacccgctgccactcctcttcaaagctgagcgcccggcgtacttcgctgttctggctcatcgcagatgtgacctgcggctcgatcagggtggcgtattccgcctcgccggaggccagcagggcggctacctctgcggtgctggcgtagacgatctccacatcctcgcccaccgtcagcccggcttcattcaggaaatactgggtcagagcgtccggaggagaggactggagggggatatagacggtcttgccggccagatcggcccaggtttcaaacgcaggatccgtggtcatgaaatacgtgacgccccaggtattcacattcatcaggcgcacatccaggcccttgttgtagagtgtggaaaccacagtgagcgggaaggcgtacaggtcgtgctccccgccctgaaccatggccagcagctcctcgggggagttccacacattcaggtcgatggtcacattctctcccagcagtccggcctccatcatgtgcaggacgggaagcgccgggggcgcggtaggcacacccactgagatggtcaccggctcggcggcctgcgtggaactggccggcggggatgtgggggatgcggcgggattttcggccggattatttccgttggagcagccagccagggcaaacagcagcatcgcagatgctaccagggatgcaagagcgcgtttcatgtgcgactctcctttcaagaattttggttagcaacagctaacctgttgcagcgatatgatagcacccgcaaaaaagcctgtccgttgccatggcaacggacaggcaaaatttatacgctgagaaaactctgatccagaatacgcacctgttggccctgaaaggcgagaatcccctctttctgcatacgccccagttcccgggagagggcgctgcggtctacacacagatagtcggccagttcgccccgccccatgtccagatggagttcgccgccgggcttgacagggagcatctggagataaagcttgatccggttgcggagccggttctgggccaagatccgcattttctgattgagaaaaagggcgctccgccccatttcacggagcaggttggcggtgacctgggctttgtgcgggcaagcgcattcctgctgaagaagcagcgggtcaaaatccagatagagcacctgcacatcggtcagcgcgtcgatctggatgggactgtcctccgccatggagcacaccagagtctccccaaatacctgcccccgccccagccgctcgatggtgaccagattgccgtcctcactatacagggagatccgcagcgtcccatccatcacaacgccgggccgcttctggcactcgccgatctggaggaggatggcatccttacgaaacaatttggtttctccccgaaggcaggccagtacattttgatatttctcttccgggatgccgtcaaacaggcggcactgacgcatcaccgtagtaattgggttcatgagatacctccatgttgccgtggcaatcgacaactgtgctgtaaactgctatggttagtaaatgctaaccgcattatagcgctttgtctggcaaatgtcaacgagcgcggaatgggaggatgacgatgaacggaatcggattggattgtggaaacgccacattgaaactcgtcctgctttctccagagggaacgttcctttgggaaaaaacggcttcccactatggagcggtggttcagagcgcccgccgtctgctgggggagcttttagccgcggacccgggggcctgcggctgcccggtggtcatcaccggaaacgcgggcgaccggctgaaagcggggtgcaatgccctggccgtgctgggggagatcccagccatccacctcggcgttcggctgttggccccggaagcccgctccgccattgagatcggcagccagagcgcccgcttcctcaccggcttggatcagaacaccccgccccggtttgcggtaaatgaacactgcgccggaggtaccggctccttttttgaggatcagatgtcccggctgggactaaaactggaggactactcccgcctggtggggcaggcccgctccatccccaggctctccggccgctgcgcggtcttcgccaaaacggacatcatccaccggcagcaggagggggtgcccacaccggacatcctcctgggcctttgctacgccatggtgcgcaactacaaggcggtgatcgtccgggggcttcccgtggaaaagcctgtggccctgtgcggcggcatcgggcataatcagggtgtgatccaggctgtgcgggaggtcttcggattgtcagaagcagagctgatcttgccggagaaattcccttacgccggcgccgttggagccgcggaggcagccatggagaccgccacctgctctatgggggaactgctggccagtttatgcggcggggcgctggaaggtgggaaccagatgtgccgtcagccggcgctgcgtgtgcttcccggtacacttccgtctgtccccgcggccaccggtaccatcccgccggatgggtgcgtcctggggattgatgtgggctccaccagcacggatctggtgctcaccggccgggacggcacgctgatcgactaccagtatctccgcacagccggggacccggagggggcggtgcgccggggcctggacgccatccatgaacgctttgggccggtgtccttcctggcagtgggcgtcactggctccggccgggagcgcatcggccgtcttatcggggcggacgccgtgcgggatgagatcaccgcccaggcccgggcggctgtccattggtcgccggatgtagatacggtctttgagattggagggcaggactccaagtatatctccctacggggcggacaggtggccgactttcagatgaacaggatctgcgccgccgggaccggctcctttgtagaagagcaggcagcgcgcatgggcatcccattggcggagttcggtcccctggccctcagcgcgcccagcgcggtggagctgggagagcggtgtacggtatttatcgagacagccatccagtctgcgctctctcgtggcgcctcccaggcggaggtggcggccggcctgtgtcggtccattgtccgcaactacctccacaaggtcgttggggccaagcccgtcgggagccgcgtggtgcttcagggcggcgtcgcctacaatcccgggattgtggctgcgtttcagcaggagttgggggagcggctcacggtttcgccctgtttccccatcagcggcgcctatggagcggccctgctggcgctggagtcggtccgcggcccgtcctgcttccacggatttgacacagcgaccggggcggaacacgccgccggcccaggggtggcggagaacatcgccttctaccagcgggcgggggcgctgctgctggaggggtatgaccccatccgggtcccagggaaaaagacggtgggtgtcccctatgcgctggtgatccacaaattcttccccatggcaaatgcgtttttccggaacttgggattcaatgtcctgctctccccgcccacgaatgaggagatcatccggctggcccagcagactgcccaggcggaaacctgttacccggcgaagctactccacggccacatggcatggctggcggaacagggcgtggactatatcttcatgccctctgttcacaccatgaggcacgagtcctcccatgtggagcacaattatggctgcgtctatatgcagactgcgccccggctggcggccaatgccctggatctggagcggcgggggatcgccctgctcaacccggtgtttgacctggacttcgggcaggaggccatggcctccgccatgctgggcgttgggaagcagctgggaataccaaagccgcgctgcctgcccgccctgctgtccggggccaaggcggtgcggcggcataccgcggcagtggagaagcaggggcgggaactgctggcatccctcaggccggacgacaaggtgctggtgctcattacccggaactatggcctttccgacccggtgctcaacatgggaattccacggctgctgctggagcgcgggcataaggtcatcaccctgtcccacctgcccgcccacgacctggatctgtcggaggactaccccaatctgtactggccctttggccagcacatcctgtccggggccaagctcgtggcccaccatccaaacctgtatgccgtctacctgaccaatcacggctgcggcccggacaccatgctctcctatctgtttcggaaggagatgggggacaagccctatctgcagatcgaagtggacgagcatttctctcccgtgggcgtgatcacacggatcgaggcgttcctccagagcctggagggccgccctgcccagccgcttccggcgggcttttccctcgccgcggtagtgcgccgccctactgcggtggctgccgtgccggagagaaccggagggccgctgctcgtgcctgaccttccgccgtttaccgcttatctccgcgcatattgtgaggcggcctggaaaacagagacgcgcaccctgcggctcgacagtaccaccctgccgctggggagggcggaaaccagctccaaggagtatctgccgttcccggccctgctgggcggcatcctgacggcggcggaagtggagagcggcccgtttcaggtgcttctcccctccacccagggcgcggaggcagacgggcaatacccatggggcgtggagtcggtactggaacgccgggggctttgccgtgtgaaggtcatcgcgccggagctggagacgattccggagcgctgcccggagccggatctgctggtccgggcgatcctcgccggcgatttcctgctatgcgctccgccggaacagcgggacgcactggctccggcgggtgtgccgagttgggcggagctggaagccctcgcggcgcacatcggcgccattccggcggagggacggccgctggggatcgtgggcgagccgttcaccctcttcaaccttcatgacggcgtccccgatacgctggaacaggagggctggcggctgctccgggcgccgctgagcgaatatctgtggcttctctggcgggatgcgggaagccagacttgccgggagtgggcgggccgcatagaagcactcggccgtctgctgggcccccgcagcagtttttcccctgaactggagtctctgcgctcctccgcagaccgccttctgcccggatttgccggagccaatggccggtaccggctggtcaaggggctggagctgggcggacggtgcgccggggtgctgaccatggcacccaggtatgaaaataccgccacgatcctggagatgaccggtgtgctggacagtgtaccgcacttccatctggccatggattacgactgggatgagaacgcatggtccaggctcaattctttcctctactatctgagcaaatagaaaaaccataacagaggtgtcttgcagcgactctcggaccagtcgatatttaacctctctaaaatcccatctattcgatcaaagcaacaatactatagtgtaaagaggggagcaaccaatttcttaatagaattgatgaagtgaaccattccttggattttctcttgcaatgcatcgggaaaatatatataataaactcacatagtatctgctgcttaccaaacatgtggtagcatagtttcagtgttgcacagcgtccgaaggccagagagcccttggacgctgtttctttttataaagatcaaaaacataataaccgggccacagagcacatggatcgattcaagccgtatccatgtgctttttatatatcttttctatcctaaacagaaatgaggtgcgaacaatatgtaattcagaaccacaatggcagcactggatggcaaccacatgcctgatttcttggcactggaatttgagcacctgctatgagcccctctgggttacagcagatcataccattgttccagcgtccattgaagacgggaggaaccgtgcaaattgaacgcaaaacgatgaagatcaaaagggaggatattgataatatgagtcacatttctgtcatcgcagccatcgcattacctgagaaccttgaagaggccgctaggtctatcccggatgaggtgatcaagcaaggaatggttatggaacactgcctctactattcgcaagtacagaaccaacatctcgacctagaaaatattgttatcacggatcaacatcgctatgagggcttggccgaggccctatccgatcagatcatggccccatatagtatgattccgaacgaacaaactccgaaagagtttgaggatgaaacggaggcggccatacgcgaatatgagacgaaaagggatgactttgtgcggctgttgaatggccggattgtgcctatatacgattatggattctctaaagactatgtcgtgaaagacgggctaatctgcaaacggaggtttggcccgctgcagcgggaaaagcgaacgaaaaaggccaagaagatgcagttgcttctcgactgtcctttcaagaaagtctatcccgcattcgtggactatgtcctgcaatacgtcggaaacgaattccttaattggcggagcggttacttttacaatccacagggctactggaattcatttgtggtcggagggcgatatcgaaatcaattcctggtccccgtcgattgcccatttgcggtcacaggctcttatggtgtttttgagtatcagcacgatgagcagacctacacaccagaaggatatcgttgggtagccggagcaaaaaagaggaatatcgcctgggatgctctaaaaaagtaccgtgagaaagtgccagttgagcagtttcatcaatatggggcatggtgcgcgcagggaggaggcccagcggaatgccggcttgtacaaatggatgagggcccaatcaaaaagtggggcaggggatgcttccaagggtgcgaaacgctggagcagttcggctctgatatgcattacctgtgccaaatggagccccatgcctgcgtagatgaaaatggttggatcaactacagcgatgattggtccgacagtgacaccgaagtttcagatgaggaaaactggcgcaagaaagttgatcgcttcattgatgcgctcccggacgatacgctgttgttatcgctggactgccatgcttgatacgccaaatatggcagggcctgctgtatagcggaagcaatatcgcacgctcaacttgctacctgaaaagatggaaacaaacaatcaaattcaataggagttgacaaaatatgtatcagtttcacttatccattggggactggagcggtgatggtcatggccgatccgaagatttcaccgtagcgtctaatgcgcctgtggaaacagtgcgcgaagcacattataagatcccagaagttacagaggttgatattgaaagcatctgctcggaatacggagaagatgaaattgacgcagaaacagtccaagttctaaaagatatggggttccagtttgaaaacagttccgggatgggagaaggcattgtcaatgtgccagagatggcccgactgtggatttttcttttgcagaaggccgatccatcattgaaactggaaataaaagatgatgacattcccaatttgcaattttgcggtgctgatgataagggccgacacatcggtaaagtggggtatggactcttttcccgataagaatcttgcgactatcaatgtccggaaactcttgcggccagaaaacagatataagggagaacggttatggaaattattacttctttcaccgcattgaatttggagcctggcaatttgccaaaagaggcttcgcagctcagacagggggacttccaatctgtcctcaaggcgcttcaggatgcttactgcaatacggcttctgatcctgatgcatatttgtacgagacggttgcgccagaaaacattatttttggattgtatgaaccagagaaagttttggagcgtttggatgcatggaaccgcgaaatcagagtcgaatttttgcgggcgatcaaaaacatgtgtcccggtataggagcgggacatcttccgccagaagatgaactgccgatggataccgacatgacataccaacttgtgtgcgcaactcgtgaactggatgacatgtggtatgattttgccgaccatgcggtatatgtggagaatgagtttgggtacccatttttcaggacaatagtggatgagcataccgcggcatgtatcaaggcaaatccagaggcatatctgattgcgcgggttacgccgaagtgattccctcttgcaaaacagtgttatcggatagctgatacagaaacatggagcagacaacaaggaaaggatggattcgttttggagttcttacattataaagcgggagatttccgttccgagtggaggacaggccaggagtatgttcaagcggattacttggacccatggtggcagatcgtggtggggtatccgggcataacggagcaggaaatttctgatattacccgtggcccgctgcggcttggttttgtcaggataaatgacagtttgttctttctcctcaaagccggaaacaatccctggtttgacgcaccttatgaaccgcggtttaaaatgaaccagttggattaccagacaaacatcccggaggggaaaggtgcgcccatgctcatctgcgcggtggatactgcaagtggggaactaaaagagatgcgggtaatctcactcggccacctacagtctgaacatctgcatcaacactgtagagaactggatcaaaagcggccgatgaacccctccacctacaatatgatagtggatcggatttatcagcaatatccaagcagtgacttgatggcaaggctgatccgggcagaagacatcatcatgataccctaagagcggagaagacgaacatcatcgcagatacattgcgtggatcgagtataacgctaaaaaggcagaaagcagccaccgcaggtattgcagaacaatcatagatttcaattacaaagaaaggttttgctgatatgaaacaaagtgtttattatcagggactctgcggcaagaaatggggcatttgggatgtgcagcagaatcaatggcagtttgatatttgtgaagacacgcccatgttggcgacagcacgcttgttccaaaaaattggacccaacgcccgcaaagaacgccgctatgaaccccgtcaattgccggaaaagaaagtatctcaggtctcatgtggaggagggagtacatgacgcagcgcgaaaaagatttattttacgaagtattggaacttctacgtaaagaggtgcgcacctcctccgatttcaggaacagggattggaaagatgctgatgactacatcttcagcgcgctccatttaacgcaaggggatattgctgagatttattccggccgcaggggcttggtatacgacaaaagcgcaatcgagggcttttatcctgtctgtccatcttacgcagaattacttcgcttacatgcggcatatgccgtagggtccgtgacactggaatgcgaactttacaaaagtgcgttgaatgacatgccatgcattcgcgcttactctattgatgagggcttggtgcaacttgtactgacatctgcagacgcgccacagctggaggaattcttaggggagcatattacactgttttaccagccggcaaggaagtggaaggctgccgagatcagcatcctcggttcaaaggcagatggatatgtggtactatattctgcaaaggaagaatgataaattcacttagaaagagtgataaataacaatggattattattttaattttaaagagaaggcagcaaagtactcaaatgcgataggactgctgaagcagcataacattccggaagcgtggccaccaaagatggaggattcatactcatgggaagatgcatgcctggatgaagggtctatgctggctcgggacgatgtcatacattttgcgggctattgctttttatctaacaactggttgcggcctctcgcgtcttggatcggtacccgtaagtgcctggaaattatgggcggatctggagcactttccaaggggctgcaaaatttcggtgtggatatccgctgtacagatgattttagttggtcggaacaacataaatggtggtatgaacacccttggaccagcgttgaacagatcggtgcagttgaagccatccaaaaatatgggaaagaggtcgagttggttctctgcagctggccatacactgacgacgcctgctaccattctctgatgtcaatgcgagagataaaccccacggccatgatgatttatatcggagagggggccggtggctgtacagtagatgagaaattcttcgaaaccgctattgttgtaccagatagcgaattccaaaacgcggtcagggaatatagatctgcatattgcatccatgaccgcctggtgctgatcaaatagtttttatgttagccgtccatctacaaagaaatcagttttctaggaggaaatatggaagtccctgatttacgggatatggtggaagatgaagtggcgcacaaagattttgaagcacaggtggtagacaaggcaattcgctatatcagggatagtgaaagatggatacagttgcttgacttggtagttgaagaaacaatcaatgccagtctaaaggcagaattgcgtagaagttggaggcagtaatggaaaaaagaacgatttgggtgaagcccagttgttttactccagaaattgagatgattattcccatcccggaggaccgcgatgcggaggaatacattgatgaattcttggacacaattttatgtgaagatctaaagtataacgtcgagtgggatttttcagacggaatctcataaaggcttcagttgcttgtcacacgtcaagcgattgtgcttttatctatgtgatttcttcgatttaatgcataccacaaaagaaacagaaacacccgcagatttaaaaaatctgcgggtgttttttgtgcttcggcatcacgtgttattccctaaacagagggagatccgaaaaaacattgtgtaatttctcttcgtcaaaggggagatattccgcgatggtcaggcccaccacatcagactggctggtgatagtgtgcagcatatgggagagttgctccattgtcatctggcctccactgctgccatccccagtcagagacggattggcaaaataggtggagtggaacagccagggatccagtacgtcaatgtccaggtggaccaggatatggtcgaaacgccgcaggaaggattgaatctcctcatctgaaataaagtcctctgtctgcaccttataggtgactccgctctcgttcagaaaacgctcctgataatcgtggaggccctggagtccgacatataagatctcatcggcccggaacttggggtgcttcatcagcgtggagagttctttgtcaccgtgccccattagggaccccagcaccatagcgtgagcattggggtatccgtccgccggcgtggaaacatccggatgggcgtcgatccagatgatgcccacattgctgtagcgcccgtgcagatagtcaaagggagcttgagacacgatgcagtttccgccaatggtgataatcttgtccggctgggccgcctcgatcacctgtgccgcccggcggatgccttcggtcacttcctcccgggcgcggataccgtccttcaccgtcctctcttttccatcgggcggtgcgatttcgacccgcaatagaggctgattctcgttggcgggcaggatatgggccagcaggttggcaccaaagtaataggtatccagaccgccgctcaagtgatctggatagagcaggcgaatggttttcatgattttcatctctccttatagtgtaggggtgtaaaaatttgattattgttcaattagatttatgcggaaagaaatgactgttaggacgatggccttttctgtgcggctcagatacgcgactgtgagattggtggccaatggggcccagactgtacgcaatacacccatactaatataaagacttttcagatcacagcagatataggtcctttcactcgtgctgtagacacgactttctttcgacttactttccagtaccagtatagcgcaaatactctggtgattcctcaatatagagagaagaaaatcgtccgatggctcatcccaaagaggaagaattgtttttgcgtgatgcttgatatcacatggatgaaattttgccccaaagtgattagaaatttacatccagtatttttgtattgccgcaaaagatttttcgctaataacatgttcaattttacaggcatcttctgtagcggtcttttcatccactcccaacctcatgagtagttgagatagaacagtgtgacgagtgtacattgttttggcaacttccatacccttcgctgtcaaagagattccaccggtgtcatccacagaaacatagtcatcccgtttcaaaattgacagagcgcggctgacactgggcttggagtatcccatctgctcgcctacgtcgattgcacgcacgtggctctttttctgagagagtatatagatcgtctccagatacatctggccggattcataaatcgacatagtgacctccattagttcagttttttcaattatatcataaatcgtagcagttttacaatcattttgattttcgagatggataagagttgccattcaaaagtgaacaatctgtaaatatgactcttgacaaaaacgatggtttgcgatatattatgtagccggttagaaaatgctaacttatttcgtgagtcgccgccagcttttgctgactgaaatataaaatgagagaataggtgaacgaaatgactttgaaagatgccgtagaagaaaaggaatacattgtccggcaaattgacaccgatgacgaggagttgaaaacctttctattttctcttgggtgttatgagggggaacccattacagtggtttctcatttgaaggacagttgtgtcgtttccatcaaggacggccggtataacattgataaccagttggcagatgcaattttgatttgatggatctgatctgtgccgctgatgccgacaaagggggggatcagcggcacgaaataggggtttactatacataacggttagcgaatagcaaccgatgtgtgttgtaatatagagaacatcagaaagaggaggaagatacccatgcgcattgccttaacaggcaacccgaactccggcaaaaccaccatgtacaacgctcttactggacggaatgaaaaggtgggcaactgggccggcgtgacggtggaaaagaaagaacaccccatcaagaaggcctactacagtgggacagaagaactcatcgccgtagatctgcccggtgcttattccatgtcgccttttacgtcagaggagagcatcaccagttcttatgtgcggcatgagcaccctgacgccatcatcaacattgtggacgccacaaacctcagccgcagcctgtttttcaccacgcaactgttggaactgggcattcctgttgtggtcgccctgaacaagagcgacatcaatgcaaaaaagcagaccaccattgatgttgccgctctttccgccaagctgggctgtcccgttgtggagacggtatctatctcctccgagggtctgaaagcggtggtggatgcggcagtcgccttgaacggcaaggggcagaaagccccttacacccagggcgatatcgacctgaccgataaaaaggtcgtggaagaggccgaccgcaagcgttttgcctttgtcaaccagatcgtgtccaaggtggagaagcggaaggtcctcacccgtgagaagggcaccggggacgccattgacaatatcctcaccaacaagctcctgggtattcccatctttgcggtggtaatgttcctggtgttccagatctctcaggtctgggtcggccccctgattgcggacacgctggtagcgtggatcgagacgttccagggatatgtgaccgagcttctggccgacgccaaccccctgctgaccgctctgctggctgatggtattatcggcggcgtgggcgctgtggttggcttcctgcctctggtcatgatcatgtacttcctcatcgccctactggaagactgcggctatatgtcccgtgtctccgtggtgctggaccccattttcaagaaagtgggtctttccggcaaatccgtgatcccctttgtcatcggcactggctgcgccatccccggtgttatggccagccgcaccatccgcaacgagcgcgaacgccgggcgaccgccatgttgaccccgttcatgccgtgcggcgccaagatccccgtcatcgccctgtttgccggcgccttctttgacgacgcgggctgggtgagcttcctcatgtatttcaccggtatcatacttattttcctgggcgctctgctggtaaacaagatcgccggatacaagaaccggaaatccttcttcatcatcgagctgcccgaatacaaagtgccttccctggtgtttgccttcaaggccatgtgcgcccggggctgggcctacatcgtgaaggctgccacgatcatcctgctgtgcaacaccgccgtgcagatcatgcagaccttcacgtggagcttccaggtggccgagactgccgacagctccatccttgcctccatcgctggaccctttgcgtacctgctggtccccatcgtgggtgtgctcagttggcagctggccgccgccgctgttaccggctttattgccaaggagaacgtggtgggtaccctggccgtctgcttcgtgggcctggagaacctgatcgataccgatgcgctggagatgatggaaggcgcaggcgccgaggtggcgggtgtcatcgccatcaccaaggtagctgctctggcctacctgatgttcaacctgtacacgccgccctgctttgccgctattggcgctatgaactctgagatgaagagcgggaagtggctgtgggccggcatcggcctgcagctgggcaccggctacacggtgggctacctggtttaccagatcggcacgctgatcaccaccggctctctgggcgcgggctttgcccccggcctcatcgcggtggttgtctttgcggcgatccttgtctacctgtgcatgagaacccagaaggatctcaagagtgagtatgcgttaagtggggcgaagtcctgatgattgatttcattgtagttgcagttcttgtggtcattgttgcggctgccgctttctatgtctacaaagcgaaaaagagcggtaaaaagtgcattggatgcccggacggctgctcctgtggttccaagaaagatagttcccactgcagctgcggtaagggtcacaactgatatgtgaaagagaaggttgcggcttttctgttggaaagccgcaacctttttctacacgtatgctatgattcccgttgccttgtaaaacgctaggaaggacgacgctgctctatggtcttgaaagagacaatggaaaactacgtaaaagcgatttatagcttgtcgcgctggggggaggtccgtccttatcagctggctgattatttatctgtttcgcgccctaccgtatccactactgtcaggtcacttgtcgaagagggatttgtctgcgtggacgataggaaagaaatccacctgaccagaaaagggttaaaaatcgccaaagagatgatggaaaaacacaacgtcctgttcaatctgctggttagtcttggtgttgacgaaaacattgcttccagcgatgcatgcaagatggaacatgcgatcagtgccgaaagttttttggctctgaaatcactaactcgcttctcggactgaatagcagcagaccaatgaaaggcatgataatcttcttatgcatcattaaatgattttgaattcgccctattaacgcgattacaaatttttctcattttgaatgtgcagggggcactggaaattttgaaattctgtccttggcatagcaaatacaactcctatgtaaagaaaaatagtgccctgcacgtaagactagttacgtgcagggcaccgctcgcttggttttattttgccatctcatttgacagattgcaagaagttagtgaatctgatctggaaggtggcggtcaatcccagtcggcgtcccaatccaggatcgcgccggtcacggcatcgatttcaaactcatattccatccagccgctgcgcatctcgccctcgtaaagcacacggccgtcatccacctccagcttgaactcggtgtaaactcccgtggtaccggcggcctgctccacgatctgcttcgctttcgcctcgccaatgtagtcgctggccttgctggaaaccgtgtaccactccacatcaaagtcaaagcccaggatcgcgccgctggcggcgtcgattttgtagtcatattccttgttcccagagaagaattccacgtcgtacactctcatgccgtcgtcatagtccagctcgacattgatgaataccgtgtccgccgcagccacgcccgcgtgttccagggcgatggacttggccttctccgcgccaatatcggtattggcctgggcctggtaaccgcccgccgcataccattcaatatcctgatcgaagctcacgatatccccggtggcggcattgatcttgtagtcatactccttattgccggagaaaaactccacatcatacacccggaggccgttctcatagtccaggttggcatagataaacgcagtatccgaggcggccaagcctgcgtgcttcaaagcgatggatttggccttctccgcaccaatatcggtactggactgagacaccgtgtcggaaccggtcatgtgccattcaatatcataatcgaagccgagaatagtgccggtagatgcgtcgattttgtagtcgtactccttgttcccaaacagaaattccacatcgtattccatccggccgtggtcatagtcctgcttggcgaagatccaggacaccttggaagcatccaccccagcgtgattcagggcaatctccttcgctttggcctcgccgatataggacgcctgttggagatggggaaccgcctgatgggcggaggcgttcaccgccattgagggaacgagcagtgctccggtcatgagcaccatagcggtgcagcctgccaggatcttaggaaaattctttttcatcataaagtcctcctaaagttgttgttccagcaatttcgggggggctgtttttttgctgttcatctatataacgcgcagacaaagtgttttattgcatcgggcagaaatatttttcttagacagtaaagatatcctagcgttcttttttactccccggctttttgggggccagaagcttattgcatttgcagcgttcccgattgacgctaaatatacctgtgttgtctgtgagagctattcctgaattcgccgcaaaatattcaggttcctctatcccagcgccacatcaagtgccatcatcagagtgaaccccacagcgaaggacagcgcaccaatatctgagtgctttccctgggacatttctgggatcagttcttccactaccacataaatcatagcaccagcagcaaaactcagcaggtaaggaagagccgggaccaccagtccagcagccagaatcgtcaatagagcgcccaggggttctactgcaccggagagtacgcctcccgcaaaggctcggggtttactcattccctccgctcgcaggggcatggagataatagctccctcggggaagttctggatggcgatgcccaaagacaaggccagagcgcccatcatggtgatttgaccgtctccggctaggtagcctgcatagaccacgcctacagccattccctccggaatgttatgaagggtgacagccagcaccatcatggtagagcgccgcaaccgcgtatgaggcccttctgcgtggtgactcttttgatggaggtgtggaatcagatgatctaaccccagcagaaagaggatgccagcccaaaagccaatgaccgctggcagaaaggccaaagaacccgccccggaggattgatccatagcaggaatcagcaggctccagatagacgcagcaaccatgacaccagaagcaaagccggtcaacccccgttgcacccgatcccccaaacctttcttcaggaaaaagacgcaggcagaccctagcgaggtgcccacaaagggaatcagcaggccatagataaccagtgtttccataggatcagaacggccttaaatctacgtttgtttttaaacgtggctgtaccgcccacaccagtgtctgccactgccttttctgcaaatggcatccaccgtctagggctgtgggggataaatgggaaagatcagctttaatggggaggttctgtgatccaaggatttccaggtaattgaacataattgccctcttttctagttgcggtttttgcgaacataacaggatgcatcttgtggttagccataactaaccgcagaataattatataaaactacacgtactctgtcaagaggacaggttgagacagggataaaaactcccccagtttctattttcgctttgttttttgggaaaccaaccccgttccaccctgcgggtttgctctttcaactcccagattcgccatatgcaggtaacgcccaacggtctcggaagaatagagaaagagccctgaccgaaaagtgcggtgaacaggtagagtagaccggcaatcaaaaataccagccaccctccctatgtgaagtggtactcaaaccagatcactaaggggcaagatgcctcaatcatcacaaggaacatcacgctgataactatgccctcaaattataatttcacacacagtattccaaactcaataacataaacttccggagaagggaagaagggatctttaaggactagtatagcctgccccttgctttcaaagatttttattgacacagttacacatcttcagttaaatgaaccgtaactgccatccaagatagttgcggatttattatctgatgaacaaatccatccgtatattgtcatgattttatgataggggcttgacaaatacagacgctcgttttaagataatatcgttattaaataatatagttatcgaaagaggtgaacaatatgcgccctgtaaacgaaaagctgcgggcggatctgctggaggctgggaagcgggaatttatggaaaacggcttccggggagcatccttaaaaagcatcgcggcttctcttggagtaacgactggggcgatttaccgctactatacggacaaggaggcattgtttgacggactggtgagagagcctgcccatgagctggtagagcggtatcggacccttcaacagacctttgctggaagaaacttggaggagcaacttcaaaagctcccggaggtgccggacaaggaagcatcctggatgatggactttctttacgaccactttgacgcattcaagctcatcgcctgctgttcctccgggacaaaatacgagcattatctggataccctggcggaaatcgaggaccactccggacggctgttggtggatcgaatggtggacgccggctatcccatccggcgtctggatgatgagctgatccacatcatgtccaccgcgcttttcaatgggatgtttgagacgatccgccatgatatgccgcgggaaaaagcgatggtttatatggatgatctgcggaatttttactccgcgggctggttccgtctccttggaattccctttgaataaagggttttccttttgattctaagttagcatttactaaccaaaagaaaggggttttaggttatggatcacaagaaagcgccctcaccctttgctgtgctgtggggctgggcaagtggtgagcacggtggattttatgcttcggtagccctggcggtgctgggggtggcctgcggtatggtgccctacttctgcgtagccgctatgattgggctgctgctggaagggggtggccttgcggattgtctgccctggtgcggccttgctctggcgggctatgggggaaaggcgctgttttccacatggtctaccagcctgtcccacacggccacctatcacacgctgcgccgggtgcggcaaaatctgctctccaaactgagccgggtgcccatggggacgatcctggacacgccctccggccagtacaaaaccaccattgtggaccgggtggaagggatggagcccaccctggctcatctgctgccggagatgacctccaatctgctggtgccggtgagcatcgcggtctatatcttcgtcctggattggcgaatggggctcgcctccctggtgaccacggtgattgggatcgtggtggcttcccagagcagcaagacttacgccgtccgctggcagggcgccgtggaggtgggccgccgcatggcaaatgccatcgtggagtatgtgggaggcatccaggtggtcaaggcgttcagccagtccgccgggtcctacaagcggtactccgatgccgtgacggaaaacgcccaatactatgtggactggatggcggataaccagaagtatatggcggtcatgcaggcggtcatcccctcggtgctgctgcccgtcctgccggtgggtctgctgctgtggggcggcggaagcctgagcacagctgtattcctcaccatcgtcgtgctgtccctggggcttaccggaccgctggtatcggctatgacctttgtggatgaactggcggtggtgggcaccaatgtgggcgagatttctgccattctggacgccccagagttgaagcgtcccacggcagagacgaagctgaatgggctgggtatccggctggatcatgtgtcctttgcctacaagcaggaggacggtgaagtgctccacgatgtaaacctggacatccggccggggacagtgaccgctcttgtaggtccctccggctccggtaagagtaccattgccaagctcatcgccggcttctgggatgtgacgggcggctctgtcgccttgggcggtgtggacctgcggaaaatcccgctggaacagctcaaccgccagatcgcctatgtatctcaggacaactacctctttgaccgcacggtgcgggacaacatccgcatgggccgtctgaacgccaccgatgcggaagtcgaggcggtagccagggctgccgggtgcgatgatttcatccgtcagctggatcagggctacgacaccatctgcggcgggggcggcggccacctgtccggaggtgaaaagcagcgtatctccatcgcccgcgccatgctgaaggatgcgcccatcgtcattctcgacgaggctaccgcaagcatcgacccggagaatgaagcggtcatccagcaggccatctcccgtctgacgaagggcaagaccctgatcgtcattgcccaccggctgggcacggtagccggcgcggacaacatcgctgtagtggaaggcggccggatcgccgcccaggggaagcaggaggagcttctggcctcctgcccgctgtaccggcagatgtggcagtcctatctgggcgttcgggacggagaggaggaataagagatgttcagtgtgcttcggaaaatttctgcctttgcaggcagccgcaggggccttttgaaaaaatccatgctcgtggcgttcctgggggctgtgttcaccgcattccagttttgggccctgatgctgaccctggagattctggtgggcggcgcgaacttgagcatatggcccgtgatcggcatcatgctggtttccgtggcggggcggaccgcctgctcgtactggtccaccaacgcggagacggagacgggctatttcatggtggcggaaaagcgggtccatatcggggaccggctgcgctacatccccatgggctacttcaacgacaactccttgggcaacattaccgccgtagttaccaccacactgggggatgtggagaacaacgccgcccgctgcctggtcagcgtcatcggcggtttcctcaacaccctggctatgtgtctggcgatcctgcttgtggactggaggctcggtctgctggctatcgcgggcatcctggcctatctgctggttacggagttgagccagcggtccctgctcaagaccggccctgcccgccagcacgcccagatgaagctggtggaggcagtgctggagtacatccagggtatgagcgtggtcaaggcctatggactggacaaggacagcggccaggccgtgcagaaaactgtggatgaaagctgtgaaaaggccctggggctggagcactccgtagccccctggatgggtctgcggcagattacggtgcggctgttcgccgtggcgctggccgtgtgcgctctggcgctctattccggtgggagcctgcccctgacccggtgcctgctgatgctcgttgcctcttttatgctctatgcggaactggagagcgccggcaatatggcggacaatctccagatgttgggcgcctccatggataaggccaactccatcgacgatacgccggtgatggatattgacggagcggaacttcaaccggaggatgcctctgtccggtttgaggatgtctctttcgcctatggggagcggaccattctggagcatgtgagccttaccgtccccgccggcagcaccaccgccgtggtggggccctccggcggcggaaagaccactctgtgcaatctcatcgcccgcttctgggatgttcagggcggcaggatcaccgtgggcggccatgatgtgcgggagtataagctggacagcctgatgaagaacatctccatggtgttccagtcggtgtatctcttcaacgacacggtggagaacaacatcaagttcggccgcccggacgccacccatgagcaggtggtggctgccgccaaagccgcctgctgtcacgatttcattacagccctgccggacggctacgacacggttttgggagagggcggcggctccctctccgggggcgagaagcagcgcctctccatcgcccgggccatgctcaaagacgcgcccatcgtgattttggacgaggcaacggccagcgtggacccggaaaacgaggcggaactccaggccgcgatttcctctctgacaaagggaaaaactctgatcctgattgcccaccggctgaaaacggtgcgcaatgccgaccagatcctggtcctgaacggcgggcacattgtccagcggggcactcatgaggaactgattgcccagccgggcctgtatgctgacttcgttcatgtccgggcccaggccaacagctggaagctggaggcttgatacagcggcttgtccgcctgccggactccgttgtatcatgggctggggagggacttctatggaattgaatttggaagggattgcagttggaggggcctctctgctggtgattggggcctttcatccgctggtaatctggtgtgaataccacttttctcaaaagatttggccgctgtttctcctgtgcgggctgatctgcctgggcttggcgctgtttgtgcagggactgctctctatccttttgggacttgtgggcgtggcctttctctggagcatccgggagctgaaagaacaggcgcggcgggtagagcggggatggtttccccaaaaccccaagcgaacttaacccaggagcaccgaggcatattttcgcagcgcgttagaggaggtggtgtggttgattgagtacaacagccaagagaaacaagacagcttgagtcatgtccgctttgcggacgaggagctgattaaaacccaggtcctgcagggggaggcggctcagactatcattcaggggaagaattgttctgtctacaagatggaaaacgagaccggagagggcgtcatcacccgatacccggtgttccctgggattgaactgctctatgacgatattcatatgtcctgcggggtggcgcaccgggaggacccccgggccgacctgctggagatcaatcactgccggcttggtcggtttgagtgcgaattttcagacgggagcgcggtctatctgggagagggtgatctggccgtcaatgtcatgaccaaccggacccgtgagacctggtttcccctgtcccactaccacggcatcaccatcgcggtggatattccggtggcggacagggtgctgcgtcaggtatcggaggcgctgggagaagggctgtactgtgacctctttgctatgcgggaccgtctgtgtgcctgtgactcctgcttcatcatgcgggccactgagtccatccagcacatcttctccgagctttaccacgcgccggaggatctgcgggcaggttatttcaaactcaaggtgatggagttattcctcttcctcggctccccggagatcacggcacacggagaagaacgcccgtatgtagaccgggcccaggtagaacaaatcaaatcagtccggcagtatctggtagagcacctggatcgccgcattaccctgcagatgctctcccagaccttttcctttccattgacctctatgaaaaagtgcttcaaggaggtgtacggaaccaccatcaatgcttatctgcaagcctaccgtatgcacacagccgcggggcttctgcgggagacgaaactggatgtgacggagattgccggccgggtgggataccagaacgccagcaagttttccgaggtgttccgacagcacacaggacacaccccaacggaataccgaaaaactttttgtcttataggagcagacagcgtcctgcgggagtggtgaaacaactgaaaatcggctatgatatccttgtacgcgggggcatctgccagaaagcgcatcgagttcggtgcgctttttccttgacggatgattagcaataactaacttttcggaggtgatactatggtacaacggaccaggcgctatctcattcggagggttgttgttgtcctgctgactttgtttgtggtcacgcttctttctttcctgctgatgcgcctctctcccattgatccggccacagcgtatgtgaagcgcaactccgccattgtgacccaggagcagatcgacgaggcccgcgtcatgctgggcctggacaagccgctgccggtgcagtatttcgattgggtggtggacgcgctccacatggacttcgggatttctctggggacgggaaacccggtgacagaggaattggcgaaaacggtgccggttaccctaacggtggtggcgtattccgccgtaatcatgtcccttggggtcctgggggtggggatgctggggtatctctggcggcagaaggccggaggcatgattctctcattcctgaccatgatcggcatttccgtgcccggtttctacctgggcaccgcctttattgacctgtttgcggtgcggctgggctggatcagtgtctcggggaacagcggctttacccgctactttccggtggcgctctgcctgtcggtcctggggatctgcttctatgggcagatgctggcggcctctttggaacgagaaatggagcaggactatgccatgtacttgcggtgccgcgggttgcgggagggtcgcatccttctgttccatgcctttccccacgccgtggtggacctcttacccagcttcgcccagatgctggggctgtgccttgccaatgcggccattgtggagcgggtgttctccctgtctgggctgggctacctgattattgacgcggtggtgaagcgggactcgccggtgatccacgccgcagttctggtgttggcgctgacactggtacttttggacacagcggcggagcttttacaatatggcctgagaagcgatatgcgggccgtgggaggccgggcatgagaaaacattcttttgtagcaaaggctgggctgattctgccgcttctggtgctctgcgtttgtgcttttggattcctgctcgcccccaatgatcccgatctggtggatttgaccaagaaatttctatccccttgttcgcagttccctcttggcacggacaacctggggcgctgtgtgctgtcccgcctgctctatggcggacggaccacactggggatcgtcctggtgggctctgtcacagtctccgtgctgggaacgctgatcggcctgctcatgggcggcggaaagaacggcaaaaatctgattttggagggagtgctgaatgcggtcaccgcaattccgcctatcgcctacctgattatcttcattgctgcctggggcaacagcgtgttcactatggtagtggcggtgtcggcctccctgcttctgcgggtcatcaagctggttcagacacggactgagatcgaacaagggaaagcctatgtgatgtgcgcggtggcctccggtgcgaggccgcgccgcatcctgtttgtccatatcctccccaatctggtctgggatgtcctccactttatctgcctttcctgcgcggatatgacgctgtccatcgtcagcttttccttcatcggcctgggcatgggcgacaatgtagtagactggggcagcatggtatcggagacgcaccactatctgctctcttatcccggccttacgctgtacccggttttgatgattgtggtgtgtaccatggcattccatacgctgggacgctggattgaaaggagggtgtccgctcatgcttgaggtacaaaacttatctgtgacagcccggaacggcacccagcttttgaagcagatctcttttcaaatcgagatcggagaggctgtgggcctgaccgggcagagcggagcgggcaagaccacgctgctcaaagccctgcttggcattttaagcggcggctgtcaggtcagcggcggcacgatccaggtggatggacaatctctgtgggccttgtcccctcggaagcgccgggaactgtgcggaacgaccctgggctttatcccgcaaaatccaatgactgcctttgaccccagactcaaactggggcggcaaatggaggaaaccctgcggctgagaacaggcgtttccggaaaagaggcggtggagcaggcggaggcgcttctggcggaactgggcctgtcccagccccggcgggtgctggacagttatcccgcccagctctccggcgggatgctccagcgggctgcggccgctttgctgatggccctgcatcccaagtacattttagccgatgagcccacctctgcgctggacgcggaaaatcgaacgcttttgctggagcttctggagaagcagcgggaaaccgccggcatcctgtttatctcccacgatgttgccgcactccgcgccctctgcgggacggtctatgtgatggagcatggaatgctgaccgaacagggaacaatgcaggagcttctggaacacccaaaacaggcgtggaccaaggaatatgccgaagcaaaccgcccggcgagcagggagggatggacatggacggactgattgccgaacatattagcaaaacttacgctggcgcacatgggctctcttttgccgcgctccgggatgtgtccattcatctggagcccggctcctttacctccctggtgggggagtccggctccgggaaaagcaccctggcccgcctgttggtcggcctggagcccccagatcaggggacgatctctctggatggagaggatacctccggctggagcactgaggactggcgaaaacggcgtacaaaactccaggcggtctttcaggatgccagtgggacgctgaatcccatgcgttccgtccgcagcaatgtggaggaggcgatggtcaaccttacctccctctcaaagcggcagcgccgggagcgcattggtaagctcatggagctgacccacatggaggaacggcttttggaagttcccgcccggcagctatccggaggggaacagcggcggctctccctggtgcgggccatgtccatccgccccaagtacctcgttctggatgaagtgctcagtggcttggatctgatttccgccgatgccgtcatgcgtgttctggaacaatatcaccgggagtttgactgtgcttttctgcttatcactcacgatatggacagcgcctaccgcctgtccgacaccattctcacgatgcaagccgggcagattgtccgtgttggcataaaacagtaacgaaaggaagaaacccatgaaaaagagacttctatctcttgccctttgtggcgcactgctctgcggcgcactggcaggctgcggtggaaatgagacgccctccacctcgcaggaatcatcccccagccagacggcggaggagcccaagatcctgaccactgcggtcagcgcggagctgaacaccctctaccccctcaacatggatgtgcagaacaacatcggcacaaaactctgctatgaaggccttgttaactatgagaatggggagatcgtcccctgcctggcggaaagctgggagttttccgatgacggaaaggctttgacttttcatctgaaggaaggggtcaccttccacgatggaacgccgttcaatgcggaggcggtcaagacagactttgagtttgcacatcccaatcccaatttcagcaatatctccgccgcggccaagttggagagcattgaggtcgtggacgagtacacggtgacattccgttatcccaatgcctacttcgcctacctgatggacttctgctatccggaaaccatggttctggtatctcccgccgtgctggaggaggggaactaccagtccatgaatggcgtggtaggcaccggcccctatgtgtatgaagaaatcgtggacggcgactatgtccgctttgtccgcaacgagaactactggggagaacagccctactatgatgaggtcattgtcaagtacattcccgacgcctccgcacggcttcaggcgctccagagcggtgagatcgacctgatctacggcagcgcgcttctgacctgggacgactaccagcaggctacctccctccccaatatcgctggcgcggtggcggagagcgactcaaagacccgcaatctggtactcaatgcctctggtgttctgtccgacttgaaggtgcgcgaggccgtggcctacgccatcgacaaggagaccctctccgaagggctgacctacggcgaggaaactcccgccgaccacttgttccccgacggcatcccctatacggatgtggagctgaatgtggtccgtacctatgaccctgaaaaagccaacgcgcttctggatgaagccgggtgggtactgaatgagtccaccggcatccgggaaaaggatgggcaggcgctgtccctgaaatacacctatgactccggggacgctctgaacaagtctctggccacagcagtcaagagccaactggcggcggtaggtatcaatgtggagacggaaggccaggagatgatgacttggtggcaggagggtgttgccggcaactacgacctcatcatgtggaacaccgagcagccctataccagcccccacaactacttcattcccatgctgtcccgttctccccatgtgcccagcctccccgctgtggaaggcagcgacgagttcctggctctgattgaggagttccagactacggatgacagcgccagggtccaggagattttcgatgaactgctaaacttcgacaacgacaatgtgctggatctgcccctgctgttcgtcaaggatatgattgtttacaatacggacaaaatcgcaggctatgatttttccagcacgcccatgttctttgatgtgcggctgattcaacctgcggagtaacgaatcacagcatctattataaggcaacagaatatacaacaaggagccggcctgctaagaccggctccttgtcaaaggaaatgtttccaaaggaaaggggcggatttgtttggcgttgcaccagtccggcgaggactacctggaggccatattactgcttcaaaaggaaaaagaaatggtgcgctccgtggatgtggcccggcacatgggggtatctaaaccaagcgtgtgccatgcagtcaatagcctgaaagatggaggcttcctcgtgatggacgaggatcgctttctccacttgacagatgtggggcgagatgttgctgaaaagacctatgagaagcactgctttttcacccacctgctgatagacgcaggcgtagagcccaagaccgccgagcaggacgcttgccgcatggagcacgctatcagcgacaacagttttcagaaaatgaaggcggggttacagaacaagtaaaaggcggcctatccttcgagaccattgagggtgatataatagggaaattgttcatattatcggtcgaagaaattgtcgctaatagaaatctgtggtatattcctaataaggggacataccgcagattttgctgtatcataaatagaaaagagatggttttattgaagaatatggtagtttatgttaccataatacggggcaagacaaaactaactttgcggagtgatgataatggggaggaccgattttaatccagaatggtacggcgcacaggcgaaagtgctgacgagcaatgaagatcagatggttgtagattatggctgtaatggtcgtggtatcgttaaaagttataaattgtttgatggcatacaactttgctttctcgattttgaaacagatgaatctatgaaagcccagaagttcaacccagatattatccaggttactcactgccagaccggacggtacgaatgtgaatttaccaatcatactgtggcatatttaccgaagggctattttagcattgcagcaacagcgtatttaccggcttcattttcttttcccttggggaagtattatggcgtcagtcttgtcatagaccgtcaggcgctttcggaggaaacacgccggatcatgcagacaattcccatcaaccttgataaaataggcgcaacacttggacttgaaacacgatggtatgtcagcgatactccaccacaattgcaacacttgtttttagaattatatacagccgtcgaagcggagacaaccggctattttaaaattaaggccctggaactgctgtaccacatggaacagcttacccgggttaacgggtgcgactcaaagtattttgataagaagcagatacaagcgacaaaagtgatccgggaatatctcatttcccatctggatgaaaaagtttctctggagcagttggcgaaagaggtacacttgaacctatcggttttccacttgatattttcccatatatatggggacactccatacgcatacctcaaaaaatataaaatgaatttagcggcccagtggctttcggaaaataagatgaaaatcggtgatattgctttggaactgggatatagcaatgcaagtaaatttgcgaaagcgttccaatcagtatatggaatattgccaaaggactatcgaaaaaacagctagtcaaaggcagacattgtttaagacaaagtagcatccatgaacttgtaggtatctttgggctattttaagtctaaacgcggagatatggagtagcagatactttcaaggattggtagaatgaacggcgaggttagcatttactaacctcgccgtttttcaatttaaggagggttcatgctatgtcaaatgcaaagtcgaaacaggcaaagccaaagacgggtttggcacgatgtatggaattggcttctgacagaaagagccttgtatttttagctgcggttctttcgtcactggcggccattgcttcgttcatcccgtacatagcgatttatttcatgatccgctcaattatcggtgttttcccgaatcttgaccagttggatatgggaatggtcatgaattatggctggttggcgcttaccggaatcgtggcgaatatcctgttgtattttctggctattttcagctctcacatggcggcatttggaacactgtacgagctgaaagttctctttgcagaccatattaccaaaatcccacttgggtatcacttgacaattggtagcggccgcctacgcaagatcatggatgaaaatattgaaagcgtggagggttttattgctcaccagtttcctgactttgttgcttctattaccgcccctattgtcatggttatcatcctgctggctgttgactggcggttcggtcttgcatctctggtcggtatcattctggcgtttattgcggagttcattggctttggtagccgcgagatgaaagagaacatgggcaagtatcaaaaagccctggaggaaatgaacaacgcttctgtggagtatgtccggggaatgtcggttgtaaaggcgttcaaccagacggcatcttcgttcaaaaaactcaaagaggcaatcaccggctatacggaatgggttctcaagttttccctgggctggcagaattgtatgcctgcctttaccacaatcatcaataatgtttacctgatccttgtccctgtgggcatcctgattggcaccagaacagatgattttgccggatttgcgatgacctttatcttttatctgctttttataccagcaatttccggtgtgctgaacaaaatcatgtatatttcagagtcgttcatgcagatcaacgggaatgtggccaggatggacgagatattgaacattccagaaatgccggaaacggctcatcctaagaaacctgtcggagacgatgttgttttccatgatgtcagcttttcctacactggggataattccgagaaagcactggaaaatgtatctttttcagcaaagcagggacagatcacagccattgtcggcccgtccggcggcggcaagagtacgattgccaatctgatttcccgcttttgggatgtgtcctctggcagcattaccattggcggtgtagatgtgcgtgatgtggcagaagacgatctgatgcgccaagtcagctttgtgtttcaggatattttcctgttcaagcagagcgtcttggataatatccgtatgggcaacccttcggccagtgaggaacaagtaatcgcagcggcgaaagcggcgcaatgccacgagtttatctccaaactgccggatgggtatcatacagtggttggctccaaaggtatccatctctctggcggtgagcgtcagcggattgcgattgcgcgggctatcatcaaagatgctcccattatcgtgttggatgaggcaacggccttcagcgacccggagaatgaatacctaatccagaaagcatttgaaaagctgatgcaggataagacagttattatcatcgcacaccgcctctccacgatccgcaatgcggataagattatcgtcgtggaaaaaggccatctcattgaagaaggaaatcatgacgagctggtggctacaggcgggcgctatgcacagatgtggaaccactatacagaagcgattggctggaaaatcagcggaaaggtggtgtaactatgagcagattacaaaaagctctctttttgtcagacaagggttacacagatctgaaaaaagcaatcttcgcctgcacattgacgaacctcgctatgcttctgccgttctgtgtaactgttatgatcttcagtgaaatcctgacgccctttgtcagtggtggctccatccagtggaaccatatctggatgctgtggggcgcgggtattatttcggccatcctggtatttctggccgccaaaaacgattaccgcaaaacctatattgcctcgtataaggagtcaaacacgacacggctgcggattgcggagcatcttcggaaactccctatgaatttctttaacaccaaggacctttccgaactgaccacgaatatgatggcagattgcagcagcatggagtccctgctcagtagcacgattcctccgctgattgcaaacggtattacggtgaccctaacctgcatcctgctggccttctttgattggcggcttgctctgtgcgtattcatcacggttccgattgccttcctcattatctggctcagccggaaccagcaaaagaaactgtttgaaaagcaggttgacgcaaagctggctgcttctgaccaggtacaggaatacctggaaggcatgaagatcatcaagtcctgcgggctgtccggctctcatttcagcgcgttggataaagctctagtggcgatgaaaaaaatcgccatcaaggtagaaatggctgtcggcgtgttcatgtccagtgccagtatgattttgcaggcaggcattggtatcacaatctttgtcggcgctatccttttgacgaatgggcagattgagcttcttccgctgcttatgttccttctgatggtaacacggatttacggcccaatcttgtcaatcttggcaaatctttcctcattactgaatttgaatgtggtcacaagccgtatgcgtaccctgttcactactcccgcaatgaacggcaacgagaaaacggtcccgaactgcgacattgagctatcccatgtgacctttgcctacaatcgggaagatgtcattaaagatgtttcctgcaaaatcccccaggggagcgtgactgccctcgttggcccgtccggttccggtaaaagcacgatttccaaactgattgcccggttttgggatgtccagcagggcaagatcaccgtgggaggaaaagacatcaagagtatggagccggaaagcctcatgtcttatatgtcattcgtgttccaggatgtgaccctgttcaatgatacggttatgaataatatccgtcttggcaatccaaacgcaacagacgatcaggtaattgctgctgccaaagccgcctattgtgatgaatttgtccgggagatgccggacgggtatcagacggtcctcggtgaaaatggcagtacgctttccggtggtgagcgccagcgtatttccatcgcccgcgccttgctgaaaaatgcgcccattattctgcttgacgaagcaacagcatcccttgacccggagaatgaaattctggttcaaaaggcgattgccaaactggtggaaggcaagacggttattatgatcgcccaccgcctccgtacagttgtagactcggatcagatcctcgttcttgacaatggccgactggtagaacatgggacacacgatgcgctgatgaaaaagaacggattgtaccacaagctgttccatattcagcaggaaagccttggctggacagtataactttgggggagaagcattgactgggcaggctgttctacaatatgataatctgtgtattgacccaaaccagcgtagggtctttgtgagcgggcgagctgtgaagttgaccacgatggagttcaatattctatattatctggctttgcacccccggctggacttttacccgggagcagctttaccagtatgcaatgtccgatgattttgcttccggccttgaaagtgttaccaacaggatctacaagatacggaaaaactaaatatcaatgtgattcaaactgtacacggatatggttatcgctttgaaaagtaagggaacaagaaaacggcctttgtttatagcaagggccgttttcgatttgtgcggataggaaaacatcaataactccaaccaaacggaataaagtcgtctaaacggaatagacaggcagggaagtcctcggtaaaatacatcatgtgagatggacgcccggcgtcctatttttcacgaacgaagttagcataatctaaccaaaaaggagagaacattatgtctgaaccagtcaagagccgcgggatgagcggcaaagatgtcattaccgtggggattttctccgccatttactttgtcatcaactttgcctttatgcttctgggcgggctgcacccgctgctttggatcttgatgccgggctttatcgctctgtttaccggcattccatatctcatgatgtgcgccaaggtgcagaaggtgggctccgtcctgttgatggggctcatcacgggcctcatttactatgtcaccgggcaattcaccgtcgtgatcctggtatccttcgttctggcctgcggcttggctgaaattacccgtgtcatcacccactaccggagcatggccggcaacctggtatcctttgtgctgttctctgtgggcatggtgggctctccgctcccgatctggctgatgcgggaagacttcctgcggcagatcacagaacaggggatgccggcggactatgtgaatactctggcggccctttcctccaatgggatgctgattgttctgttcctggcccctgttgtgggcgcaatcattggcggcatccttgcccgcgccatgttccgcaagcactttgaaaaggctggcctggtgtaagatggggaacggaaagaaatcgatctttgacccgagagccggactgtggatactgatcgccgccaatatcatcgcgttcagcgaccatactctgtgggtggaactggcactgatcgctctgctgctggcgttgatgatcgtccacagaagatttacaatggcagtcaaatgggctgttgggtattgtgccctgctggtctttcaacaggtgatcctgccggcgtcgcctatgatcatcgccaccagcttcactatctttgccacctatacccgccggatgttcccctgcctgatgaccggatcgctgatgttgaaatgcacccctctgcgctacctgatcgtagggctgcggcagttacatattccccagaagctgatcgtggctatttccgtgacactgcggtacttccccgctatccgggaggagatcggccacatccgggacgcgatgaagctgcggaatatccgggggctcagccgcttggagtgtacggtgatgcccctcatggtgtccgctacggagacggcagaggagctctccgcggcggccgtgacccgaggaatcgaaaatccagcccggaagaccagcgccgtgtccctgcgtctaatgccagcagacctgacggggatgctgttggtcctggccttgctgataggctcatttgtggtacaataagggggagtgacgatgataggtttggaacaggtttcctttggctatggagaaaaacaggaaacgctttcccaggtcagcgccactgttgcccgcggagagtgcgtcctgctgtgcggggcctccggctgcggaaagaccacagtgacgaagctgatcaacggcctgatcccggcttttactcccggatgccgtctggagggacgggtgatggtaaacgggcttgcgccgcgggaaacacccatgcatgaactggcccggcgggtaggctctgtgtttcaaaatccaaagtcccagttttttaatctggacaccgacagcgaactggcctttgggttggaaaatgagggccgtccgccggaagagatccgccgccgtgtggagcaggtcgcggaaacgctgcatctccaggacctgcggggaaaaaacatcttttctctgtccggtgggcaaaagcagcttcttgcctttggctccgtctatgccatgggccccgaactctatgtgctggacgagccgacggccaatctggatcaggaggccattgcccgccttcacgaccagatctccgctttgaagcggcagggctgcacaatcgtggtggcggagcatcgcctgtactttctcaccgatctcatcgaccgggcgttttatcttcggagcggggtgctggagcgcaccttcaccggggagcagtttcgcagcctgccagacccggagcgggaggccctggggctgcgtactctgaccccggcggtatgcacgctcccctctgtggaaccggctggcaccaaagaaggtttatctattgaggggctggcctgtgctttccgcaaggaagcacctgtattccgagacctgtccttttccgcccgccccggcgaggtggtggcgatcaccggacccaacggcgtgggcaagaccaccctttcccgctgcctttgcgggctgttgaaagaacaagcgggacaaattctgctgaatggaaagcctctggatcgaaaaggccgccagcggtcggctttctgtgtcatgcaggatgtaaaccatcaactgttctccgacagcgtgtggggagagtgccagatgtccgcgccggaggcatctgacgatcagatttcggaggtgctggacagcctccacctgctgtcctttcgggagcggcatccgatgtctctctccggggggcagaagcagaggctggcagtggccacggcgctgctgtcggagaaaccggtgctgatttttgacgagcccaccagcggtttggactatgcccgcatggtggaggtgtccggggtgatccgcagtctggcaaggcatgagcggatcgttctggtggtcacccatgaccaggaattcatgcagagagcctgtgaccgggtgctgcgattgtaaaaggagaaatttcatgctggagcaagtaatggcagacaacggattccctgtcccactggtggagggcggagactgccgggtctttcagtttcacagtggtaccggagaggggatcatgacacaatgcgacctgttccccggcgtatccctgatgtacaacgatttccatatggagagctatgattccgcgttccgtacaacggaggatctgctgtgcattgattactgccgccaggggcgcatggagtaccctgccggcccggatgcgtactcctatgtggaggcgggcgacctgaagctggaccggcggctggagcaccagggccattttaccttccctcttgcccactatcacgggatcaccgttggctttgcgctcccccaggccgcccaatcgctgaaggagtggatacgggaatttccggtggatctggcccggctccagaataaattctgctccagccgccatcccaaggtgctccatggggcgccctctattgatcacatttttcaggagctctacgcggtgccagagcagatcaagctcccttatttccgcatcaaggtgctggaattgctcctgtatctggacgcgctggagctgccaaaggatgcggaaaagccttacttctataaatcccaggtggaaaaagtgaaggctatccatcggttattgacgggggagctggaacgccactatacgattgcggaattgtccgaacggttttctgtcccggctacggcgctgaaggagtgcttcaagtcgatttatgggcagcccatcaacacctatatgcgtaatttccgcctggaccaggccgcgcttctgctccagcaggagcctcaaatgggagtggcagagatcgccggccgggtaggttatgacagctccagcaaatttgccgccgcattcaaggaagtcaagggcaagacgcctctggagtaccggcgggaaagccaataaatttttccgtccaaacgggaccagaccggcaggacggagcggacagaggaagaagaatttcttataatcgttgtagttagcgcaagcaaactacaacgatttttctttgagaggagtattgcacatgaaggaacgaacttggctcggtatcctgctctccttcgccgcaccctgccgggggaagatggccgggtctgtggtactggctattctcagtgtggccgggggcttcgtaccgtatctcggcgtttatcagatcatccggctctttctggagcgtcaggcggactgggagggcattgtattttggtgcggcgtgtgtctggccggctatgccgtcaaggtggcgggatatgccctgtccaccatgctggcccatgtatccgcctacacaattttggagggcctgcgccttcaggtggcggaccggctgatgggggcgccgctgggcgaggtggaaagccggcccattggctccatgaaaagcaccatcgtggaccgtattgaagatgtggagccgcctctggctcacatgatcccggaactcagttccaatcttctgctgcctttggtcgtggtcatcgccatgttcgccatcgactggcggatgggccttgccctgctggtgaccatcccagtggcgctcatccccatgaccttcgggatgcggacctataacaagaattacgccgcctacatggaggccaacgcccatgtgaacagcgtgatcgtggaatatgtagagggcattcaggtggtgaaggcgttcagccagggggagcggtcctatcagaaattcgcccaagcggtggcctccttccgggacttcaccatgggatggttccgctgcacctgggcttccatgaatctgtgcctgtccattctgccgaccaccctgctggggaccctgccggcgggcgtcgcgctctatcaggcggggatactggacccggcccaggtgacgctctgcctgatgctggccctgggaattgtgtcccccctgatgagcgccaccgccttcatcaactccatgaaaagtatgcagtttgcagtgaaggacacccgtgaactgctgaatttgccccagctcacgcaagcggagcagaatgtccatctggaaggcagcagcatccagatgcgggatgtatctttttcctatggcgggacggagggcaaggaggtgcttcgccatctgaacttgaccatcccacagggaaaattcaccgccctggtgggaccatcaggcggcggcaagtctaccatcgcccggctgaccgcccggttttgggatgtgacgggaggctccatcaccctgggcggacaggacatccgcaagctcccgctgaagcagctctcccagtccatcagtttcgtcacgcaggacaacttcctctttgactgtcccctgaaagagaacatccggctggggcgtccgggggcctcggacgaggaagtgctggcggctgctcaggcggcccagtgcgaagaattcatcggccggctggagcatggctgggatacgacggccggagacgcgggcaagcagctctccggcggggagcgtcagcgcatcgccatcgcccgcgccattttgaaggacgcccccattgtgattttggacgaggcgaccgccttcactgatcccgagaatgaggacaagatccaacgctccattatggcgctttccagggggaaaacgctgctggttatcgcccaccggctctccaccatccagaacgcggatcagatcgtggtgctggagaaagggagcgttgcagactgtggcacacaggaagaactgttgggccgctgcccgctgtatcagaccctttgggcggcccatgtgggggcacgaaactgggcggtcacatccggcaaaaaggaggggaattgagatgtttcacagcgtaggacgcattatgggatgggcaaagaactatcgaaagcgaatgattctgggttttgtgtgctcgtttttcgcaacatggtgtaccgcagggccggtgatgctggcggcctgggccctggggcggatgatcgggaacgcctggggggagaatgagctttccggctctctcccatggctgtgcttatctggcatcgtcgttctcatcctgctgcggtttttcttcacctattggaaaaaccggcttcaggagagcatcggaacggaacgggcggcagagcagcggatggaactgggagatgtgctgaaacgggtgtcccttgggtactttgccaaaaacaatctgggggacattttggcggcgctcaccacggaactgagcacgctggaactccagagcatgaagatggtggacgcggtggtaaacggttatattcaggtagccgtgatcctgctgtgcgtggcgattttctgcccgcctgccgcgctggtggcgctgatcggtgtgctggtgtccgcctttgccctgcggggcattggccgtcagagcgcccgcaccgctcctgtgggccaccgggctcaggaggcattgtccggcgcggccgtcgaatacatccacggcctgccggtagtgaagtcctttgggcaggacggggtttctgttcagcgattccgggatgcctgccgggataataaggccatccgcattaaaaacgagtttgggttcgtcccctggaactgcctgcatctgttcgctctgcgggcggcatccgtggggctggtgctcaccgcgggccagcaggctttggtgggaactttaccgctcccgtatttcctgatgattgccctgttttccttcaccattttcggcagtgtggaggccatcaatgacgcggcccacatcctgtcggtgacagattcggtgctggaccggctggaggaactggagcgcaccgacttcatcgacaaggacggcagggagataaccccagagcagttcgatgtgtccctctcccatgtatccttcgggtatgggagccgcgaggtgctccacgatgtgacttttaccgcgccccaggggaccactaccgccattgtggggccgtccggctccggcaagagcacgatatgcaatctggtggcccgcttctatgacgcggaccgcggctccgtgtcggtgggcggccacgatgtgaaagaattcacctgtgaaagcctgctgcgaaatatctccatggtctttcagaatgtgtatctcttccaggacagtgtggagaacaatatcaaattcggttgcccggatgccacccatgagcaggtggtggctgccgccaaagctgcgtgctgccatgacttcatctcggccctgccgaacggctatgacaccgtgattggagagggcggctccaccctctctggaggagagaagcagcgcatctccatcgcccgggccattttgaaggacgctcctatcgtcatccttgatgaagcaactgccagcgtagacccggagaatgaacacctgatccaacaggctctgtccgctttgacaaaggggaaaaccatcctcaccatcgcccaccggctggctaccatccagcacgcggatcagatcctggtggtggaggatggccgtatcgcccagcggggtactcatgcggaactgatggcccagggcggcttgtaccggcggtttattgagattcgggaacaggccgagggctggagattggcgtgaagaaaagagtgaaacgacaacacggcacatcacttcatgcctccggcgaagactatctggaggccgtgctggtgctccaaaaggaaaagggcatggtacgctctgtggatgttgcccggcacatgggagtctccaagcccagcgtgtgccacgcggtagctaccctaaaagaaggaggcttcctcaccatggacggggacttcttcctccgcctgaccgatgtgggcagggaggtagccgagcagacctatgaaaaacattgctttttcacacgcctgttagtggaggctggtgtcgagcccaaggctgctgaacgagacgcctgccgcatggagcatgtgatcagcccagccagttttcagaaactgacggagttgtaccagaaaagccatccaagtacagagccgaccgagaatgggaggcggtttgatgcgaaaacagatcctgctgattgatgatgacctgcccctttgccggaaactccgggaggctctgcaggacgataccacagaggtccggtatttcattgacacagcggaggccctggacagttttatgcggcaccggtattgtctggttatcatagacccggcgctggaagatatggatggccgggaactgcttcggaccatgcgtcaggccaaggtggtcccgattctggtgctcaccggtatactatcattggaagatgaaattgaacttctttcattaggagcaacagtctgtaactcaaagccgattgacctgcgccgctgcactgctcaggctcatgcactcatccgcctctatatggagtcggaacatacagagaagcaatattataccttgacctttgggacagaattggttattaaccctttgcatcgtcaggtacatttgaaagaaagggcgatacagcttactcggagagagtttgatctgctgtacctgctggccagccgtcctggacaagtattttcacgagagcagctctacagccatatctggaatgctgacacagagttcggcgtagatgaagcagtacggtttcaaatcaagagtctgcgaaagaaactgaccagaacaagaggcagttatattcagaccgttcgcggaatcgggtaccgatttgatagtgaaaaagagtaaagaaacagcaagggaaaatcaccaatttccccttgctgtttctctatggtatatccggaaggcaggaaatcctcctggaaaactccctgtttctacactttcggaattgtggtagaatgataagtacagaatggcaaatcaaaatttgaggagttataaaatttgaaagggactgccgcactaaatgatctgtgtggcagtcccttcttgttgttaaactctgttgctcacatagcggatgaaaatcagtttgtgatagcagtcaccagataaatccagccttctctgcattcactacaaagtacggctgttccttactcctcccagggtgttgccactaacggctccgctgggtcatagggaattcggataaagcggtcgagcttttccggagagaagcggctttcataaatgtgccggtgctgttccatcagcacgctgtcgtccaccggctttttggaccagtagagcgtcttgtagggcaccccgaataaagcggtctcatacccggcggtttttgcgccattacgggcatagaagcccaggcgatgctccgccattacgggatcgggagcgtgggagggaagctcgctttccccgaaaatagtcagatccggctcctgttccagcagcatggacaggagcagcgccccgatccccctgtttcgatgatccgcggagacgcacaggtaatccagcagggcccagcccggccgccccagccacagaaaacaggcaccaacaatctcatcgccgtcaaacaggcaccaggggcggtagagcccatcccgccacagttcctctatggattgcaggggcttcagctctgaggcgggaaacgcctgtttcagctgcccctcataaacagacttgagttgttccgatgtaggtatccgtaattccatcgccattcccttgctatcataaataaagtgtgtggagaaatcagctttaacagagcggagggcttttattcactccatcgttccgtagcggatcggcacatggatgctgcccagatcccgcaccgtctgttccccggacgcccagaccggcttcaggtccacccggatgatttggggattttcataggtcttgaaatagtagaccttgttcggaaggtcgatcatggaagtgtactgggtgtagtcaaaggtcccgttggccgtctttaccacgccgttgggcagggtgacgccctccaggatgtgaaagcctgcaataacggcttcctgcatggtctccggctgcaccatatggagcttctggaacgcggtcctgacgaaacgggcgggtggtgtgtagcccccgggcaggacgctcgttccggcggcctgcccaaaaggctccatccggaaaccaccccaatccgcctgctccgtctgctccggcgcggctccaatgtagctgcgtaaattcgtcatctgccaggggaaatccgggctgttggtcagaacgcccaccgggttttcataggcgttcagcccctgtttgatctgctccaccacgaggcttttgccggacaggtcggtgaagatccagtgcagcggcgcgacggtcccggtcagtttgtcctgaagccccaccagggtgatgtcggccagaagctcccggaggtcgtccagagaggcgcagaggccgaggacatagtgcaaaaagtccagggctgggacctgcgccttgccgctctgttgggagaacggcgggaagtcggcatatcccttaaagtacagcgcgccgcccgcaagccccttttcattgacgccatcaaacaggacatagagatttttgaagtggcggctgatccccgcgaccgcgtaccggtcagtgagctgcctgcccagcgtgttttcccaggtggagccggcgggaaagaccgcaaggcgcgggtccagaatgtagtggaaatccattgtccggccaaacacattttcatgctgctgatttaagaaattgattgcagtacacataaaagaaaccttccaatttttgagtcttgatggaccgccctgttttaccgtcagggcgttttaccatttatagcccacatcgctgaacgccagcacaaggctgtcgatccccagcaggatcagataggccccgatgacaaagcccatggacaggaacgcgagggccggctggagcagcatgaggaagccgagcaccagcccgatgatgttcaggatcaggctgaaatagtagtacccgctgccggccacataccggatgatccccaagtgggtcaggcgggagatgcagtgcatgatgaaccatagggggaagaagatcgtcagcgcccaggccgcggcgccgggatagaccatcaccagcaaacccgcgatcacgctcaaaatgccgctgaccagagctactaccggcccgaagccggtatgacgctccatcttcacatagaacacaatatccgcaatccctgtgataagggcgaacacgccgtagaccagcacggcgccggtcagcacgctgcccggcctcagaaaagtgaagatgcccagcacgatcagcagaatgccgatcatcagttccatccatccaaatttagagcgacacctcattttgctcaacctccgtttcctttccccgcggtatatcctgcgcgctgactgcttccagggagagaagcagggcgtgattggcggcctgcgccgcgaaatccagtgagtattccgccagcagtagggcctcctctgcggacagcccccggcgccagacttcggagaacgggccgtcctgctccgcacgctcccggtcgacgaacgcctctatcgtctcataggaggacgccagtttcccgaccatgggagagcggctgaacttcaactttgtctggaacgccagacggtccgcttcatttttctgccgcaggcgggccaactcctggccgagttgttcgcggcttgccgtttcgctgagctggatgctcccgtggagcagcccgaactcccggtccagttcatacagtttcgcggacagaatttcatgtgacatgatccgcacctcttttcccttttcatgcttttattttaatcagggcggggggctggaacaatagccagaaaatgaagtgtgtattgacagaaatgccggagtgtaaaacttttttacactccggcatttctataaaaagagagggttattgtctgggggagatctcccccgcaacaagctgatggacaatatgaacgatgtggtctaaatcgccgctgtcagcctcggtccagtttttgaggaggccgaggaccgcctgactgtggtagcgcatcacaagtttcaagtccgcatggctgcattgagcgtacaggccgcgtttttccaccacccgcaggaaaaatgtgaaaagttgttcctccaccatccgctcaatctcatcccggtagttggtttgaaggccgtgctccacataggggcgggcgttcagtgccagcaggaacaggcagcgcagccccttttctgcgttcccttgggtaagcgtttcctcgaccatcttatccgtgccgcgctccaggacccatttcaacaggtctggaatatcttcaaaatgatagtaaaaggtctgccgggtgatgctgcattcatccacgatgtctttcaccgtcagttttttgaccttcttttgcatcagaagccgcttcacggcctctgcaatcagttcctttgtgtcaactgccacccggacatacacctccgtttactgctttgaaaatattatacacagtaaccgcaaaattcacaagatgccgttactctgaacagcggctaaggcgtatcaaggcggagacgctctaaatgtttcatgcgccggtactccagcggggacatgccgaattgctttttgaaaacggatgcaaatttgctctggttgatgtatccgacccgttccgccacctcagataccgaaagtcggctgcccgtcaacaattccgcggattttctcattctgacctcccggagatacgccgatatgttttgcccgaagacgccgcgaaaataattcttcatactggtttcgctgatagaaaacctcgcggccagttcccatgccggatgatactgccgcaggtcggctgtgatgatctgttccacctgttttgcaatgctcacctgcgtttctgtaaaataggcgcagacttgggacggagggatttccttctgcgccatcaacagcgaaaacagcgccagggaatagatcttcatctgcattacagcaaagggcataggctcatgatacagtgaccatagttttttcaacaattcttccgcgtcggggacagccttggagatgtaggtgcttccattccggcagtaccgctccacaacgcagtgaaagtcaagtccgaattcctccagaagccatgcgctctgcgctgcaagcgtatcaagctctataaagaactccagcccctcgtagatgcggcgtggatagacatactgcctttgagcaaaatgctctgtcagggatagatccccatccgtcacatacacaaaatttccgttgttcagaatgatctcacagcgcccagtaacgcagtagttcagaagcagcggccctttttcctcggagccctctccgcacagatccggtgctgtccagagcggagcgtttactgagatataggccagcgtcaatcccgagaaaagcgggaaaaatgtcacagagccttttccatccttcccatttagaaaaagtcccgcgctgtattctccccgttcgatagatattccgggaacttcaacgcattttcggatgatttcatcaatgttcataggtacacactttcctcttggatactcaagaaacggaatgctttttatccattataggcttgaaatttctcattcgtcaacctaaaaactcgatgttgattggagctaaaaagttgttcggttgtagaaacaccaatctgggtgtggtattctataacgaggttagaatacgctaaccaaaaagtgcggaggtgtacttatgagtaacaaacttcaggcaaaagacttgatcagccttggactgtttacggtcctgtattttgtcatcggctgctgtgtcgcaatccccatcgggtttgtgccaattttccttcccgtcctgggggcgctatgggcgctgatcaccggcatcccattcatgctgttcctgacaagggtgaaaaagttcgggatggtcaccattatgggcattttgagcggcctgctgatggggttgaccggcatgggcttctggggcgtccccctgggggctgtttttggactgctgggtgatttgattttgaaatccggcggctataagagcgccaagaagagcctgctggggtatgcggtgttcagcctctggatggtgggtacctatatccccatgtattttatggtggaagactcctgggcgagttttgcggccagcttcggagcggaatatgcggatcaggtaatggctgtcatgccgatgtggagtataatcctggtaattgcaggaatctttgtgttcgccattttcggtggactgctgggcaaggctctcttgaaaaagcactttgccaaggcgggcattgcgtaatgagcagcgcatcataccccacagtaacagcaagcaagaaaagcatccaactggacccgcgcaccaagctgcttcttctgctgaccatcaccaccctgatgttcagtaccagcaacgaggggatcatgaatttgataaagccacttttgagcctcgtcccatttatcctgatcctctccgagcgacgctttcagacggcggcaaagtacctgattttgtatgcggcctgttttgcgctggagcgtgtggccctgatctgggcgagcgggcttttctcctttgtcctgctggcggtcacatccatcatgacccgctttgcacccggtatcatgatgggcgcctatctgattgcgtccacatcggtgagcgaattcattggagccatggagcggatgcacctgacggagaagatcgtgatcccgctgtcggtgattttccgcttctttcccaccgtcagcgaggagtatcaggccatccgggacgctatgaagatgcgcgggatacgcttcggaggaaagaatccgttcctaatggtcgagtaccggctggtaccgcttattgtatccgtggtcaaaatcggggatgaactttccgctgccgccttaacgcggggtcttggggctccaggaaggcgtaccaacttgtgccggattgggtttcatgtacaggatcttatggcggcgctgttctgcgtcgcctgcttcgctctgtttctgctccagccgcagatcgctttttggggaggtgtcagaggatgattcagattgaccatgtgaccttctcttatggagaagaaacggagcataccggtggtgttcgggacattgagcttcagatcaagcgcggcgagtttgccgtgctctgcggcgagagcggctgcggaaaaaccacgatcacacgcttgatcaacggcctgatcccccattattacgaagggaagatgagcggcggcgtgtgggtcaacggggctgaagtgtcaaaacaaccgctctatgatacggcgaaaatcgtgggcagcgtgttccaaaacccgcgttcccagttttttaatgtagatacaaccagcgagatcacctttggctgtgaaaatctgggccagccggcagaaacaatccgggcgcggctggagaggacggtccgtgatttccgattggaaaagctgatggaccggaatatcttccacctctccggaggagagaaacaaaaagttgcctgcgccggcgtttcgatcatggagccggaggtactggtactggatgagccatcctccaatctggatgcggcatccatttccgacctgcggaaaaccctggctttctggaaaggccaagggaaaaccatcgtcgtatcggaacacaggctctattatctccgtggtctggcggatcgttttatttatatgaagggcggcaaaatcacacgggaatatacttcggaggaatttaaaggcctgtcggagcaagcccggacggaaatggggctacgcactttcgccctggaacaattacaaccgccgcaaacaccgcaatgcacagggacggaactggagctgaagcagttccgctttgcgtatccccatggatcggcaatcctgcacatacaggattgcactattccggccggccgcattgtaggcatcattggtaataacggggctggcaagtccaccttttcccggtgcttctgcgggctggagaagcaatgcggcgaggtaatctggaacggcaagcgataccgtccgaaagatcggctgaacacctgctatatggtcatgcaagaggtaaaccatcagctctttacagaaacagtcctggacgaagtgttgatcagcatggaggagccggatacaaaacaggcagaggaaatcctgtcccggctggatctcctcccgttcagagacaggcaccccatgtcgctttccggcgggcagaaacagagggtggccatcgcatccgccattgcgtcaaagcggtctattctcttttttgacgaacccaccagcggccttgattaccggcacatgaaagaggtcgccgctgttttgcggcagctcagcacggaaggcgtcactgtttatgtgatcacacacgatctggaactgctgctggactgctgcacggacatcatccatttcgcccagggaaacattgccggccaatatcctatggatgcgggcggcctttcaagggtctgcgcttattttatgggaagcggcgcctaaagtgtggacagcttctgtgcgcgccggtactccaacggggacatgccgaattgcttcttgaataccgctgcaaactttccctgattggaatagccaatctgctccgcgatttccgcaatggggcggctggtgtcctctaaaaattcagcggcggctttcatacgggcctcccgcagataggtggagatgttctggccgtacaccccacggaagtagtttttcaagctggtttctccaacggagaatttttccgccagcagacgcacggggatatgtttccggagatctgcggtgaggatttgttctgcttttttggcgatccccacctgaagttccgtataaaagccgcaggtttttgaagggcgcggctctgtatggagcagttcgtaaatcagttccagcgtatagatgcgcagataaaagagagacggctgctccgacagtgcccagagtttgtggaaaatggcggtaagtgtgctgtccgcctcgttgatataggtcttttgtctgcggcaatagttctcacgcagcagagtaaaatccagctcaaaagcggacatcagttcctgggcgtgatgagagagctgttctatatcaaaatagattttaatgccctgataaagccttgttgggaaaatatagccgtcctgggccgtctgctcactgacggcaaaatcattttccttcaggtatatgtaggctccgtcatccagaagaagctcacttcttcctgcaacgcagtaattgatcagcaggggccgcagctcggcattggcctcggactccggccagtttgacgcgtttacctgaataaacgccagggtcacaccgggaaagagcgggtggaagaccatccttccgcggccgtcctcctgctccaaaagaagttcgctgctatttgggccgcttttccactctacgcccaaaacggtatcactgtttttcaggatgctttccatcatgtcgcgcaacaaattttccccctttcgcggcaaaatgattgagtttattataggccgtccccttttaggggtcaatcatcaaacaacgggaaagagaaaactccttgctattcgggcctaaactgtcggtatgtgcatagaagcgtgatttgatctgtgctactattacgacggttagcgttgtctaatccgaaaatcaatcatgtgtaggaggattctcaatgaacaggcttcaagggaaagacttaatcaacatcggtatttttacggcgatctactttatcgtgatctttgccgcggcatctattggctttatccctattttcatcccgctcatcagtgtgatcgttccgctggtcggcggcatccccatgatgctgtttttctccaaaattaaaaagtttggcatgctgactatctgcggcctgctgctcggtattattatgctgcttaccggaatgggctactggtgcatcccaaccggcctgatttttggattgatctctgatttcatgatgaagggctgcggctacaaaaacgccaagcgcgaagtcttgatccacggcgttttctccatgtgggtgatcggcgcgttcatccctattgttgtgacacgggacgcttactatcaaaatctccttcccggctatggacaggaatatgcagacacgctcatggcctatatgccggactggattttgccgatgcttctggtggcggcctttgtcagcgggctggtgggcggcctgattggacgcaaaattttcaaaaagcactttgaacgggcgggaattgtataatgagccgcgagcttcttgccagtcagaaaaaccacagtgggattgttttagatccccgcacaaaattggcggtgctgaccaccatagccgttttcattttgggcggctcgtatgaaggcgtcatgcagtattacatcattgtgctggcggcgatccccctgctgcttctgctcttggcaggaaaatggaaaggcgctgttctctatctcctgatttttgggggaagcctctgcttggaactgtttggactatcctatctgaccggggttgcaaattttatcgcggttgccattgtggggctgttcctccggtttacgccgggaattgtcatggggtacttcgtagtcacgaccacaaccgtcagcgaattcgtggccgccatggagcggcttcacctgccgcagcagatcacgatccccatgtcggtcatcttccgctttttcccgacggtggcggaagaatggagcgccattggggacgccatgcggatgcgcggcgtccgctttggcggtggaaaggccggctctattctggaataccgcatggttcccatgatgatctgctccgtcaagattggagaagagttgagtgcggcggcactgacccgcggcctgggcggaccggtcaagcggaccaacatctgtaaaatcgggtttcgcgcacaggatattgtgttgctcctgatctgccttggggcatttgccgcgcaagtctatgtgtgggctgcaagggggtgaatgccatgattgagtgcagagatgtgtcgttttcctatccggcaagcggccctgtggatgggaaatgcctgacggaaggggcactgaagcatatcacctgtacgattgaggacggctcctttgttcttctctgcggggcctccggctgcggcaagacaaccttgacccgtctgctgaacggcctgatcccccattaccacgaggggacttttacaggctcggtctatctggatgggaaagatacccgcgaactgtcgctctttgagatttctcaaaaagtaggctctgtattccaaaatccacgctcccagtttttcaatgtggacacgaccagcgaactggcctttggcccggaaaatcacggattgcccgagaaggccgtccgcgagcgggtccgccgggtggcggagcagctgaagttggaatctctgcttgagcgaagcatcttctccctctccggcggggagaagcagaaaatcgcctgcgggtcagcggcagcaatcgagccggatatttatgtcctggatgaaccgtcctccaatctggacacttacgcgattgcggatttccgaaaactgctcatgctcttaaaggcccaggggaaaaccattgtcatatcagaacaccggctctattatttacgcgacctggccgaccgtgtcctctatatgaaaaatggagagatccggggcgactacaccgccgaggaattccaaagcctgcccgcagagcagcgggatcagatggggctgcggccgctggagttaaactctttaaggaacatagcggcgccttgtgacaggggcggggactccgaatggaacatccgtcagtttttctttgcatacaagcatcagccggaaaccctgcacattgacgaggctgtattcccctttggcggtgcaaccgcaatcattgggcataacggagcgggaaaatccaccctgtcccgctgcctgtgcgggctggaaaagcggtgtggcggcattgtgcggaatcaggataagatctattccagaagagaacggctgaagctctgttatatggtgatgcaggatgtaaaccaccagcttttcacagaaagcgtgctggatgaactattcctgagtatgagtacagaagatcaggcaaaggcggaggccgtactggctgagatggacctgctcccatatcgggagcgccatcccatggggctgtccgggggacaaaagcagcgggtggccgtcgcctccgcgattgcatcggaacggccgctgatcgtatttgatgagccaaccagcgggctggacctgtttcatatgaggcaggtggcggaggtggtgaacagagttgcggagcatgggagaacagtagttgtggtgacgcacgacccggaatttattttgcggtgctgtaactttgttatccacatggagcacggcgagattcaggaaagttactccctctgtaagccggagggtagagaacatctgccggaatttttcctgaacgatatggaataggaagtaggcggtaaaatgaaactccatgcgtcgggcgaggattatctggaggccgtgctggtactccaaaaggaaaaaggcatggtgcgctctgtggatgtggcccggcacatgggggtatctaaaccaagcgtgtgtcacgcggtatctaccttgaaagagggcggatttctcaccatggacggagacttctttctccgcctgaccgatgtgggccgggaggtagccgagcagacctatgagaagcactgcttcttcacacgcctactggtagaggcaggtgtcgatcccaaaacagcggaacaggacgcctgccgcatggagcatgtgatcagcccagaaagttttcagaagttggccgaattgtaccagaaggcccacccaaatacagatccaaccggggatgggaggcagtttcatgcgaaaacagatcctgctgattgatgatgacttgccgctctgctggcagccccgggacacgctactattgaccgggaaaccgattcttagcctatatatttgaaaatggcgagtcagatgtgaatgtaaatataaatgataaaggcaggcacggaaaatactacgggggagatcttccatgcctgcttttttcataaccaatttacccggacaacagtttattcgggctcattttgtacctatctctggcaggagttgggttatggttccgtctgcatgagcgccccgactgctacctccacaaccgtggaaaaagcgtaaatttagatagccgcttggccgcaactccagttcccgcgttctcgtccttttcatagttagcatcatcgtctgggcagtccgtgagaatatgggttctccacaacagcggttggtaatcgaaaccgctttgccggatctgttcatactcggatctggtatatattgattcgtacacaaaggcgagatttagggactcaacaaagccgcccatcataacttcatagaccggctcaggcgggtcatgcttccagatataacgccattcgtcggtaatatcctcttcattgatccattccaatatttcaatacggtagcacggctgctctgagaaaaacccgtccatcagacacctgcactcctcccatcaatctttcaccctggcatcctgaaaacaaaactggaaacatctaaaccggaaccttatcgatagcgggatcatagatgagcgctccgcatttcctgcagtacaacctgcagcgcgacttacggagcggcgtttctgtttcgcagatgatacattggattttgagcagcggctttgtataatcttcaaatggagccagctgcttatgcgtcctgagatattgctttattcgtctttgctccttgcactccccacagatcttctgataaggctccgcaataaaaaccttcttgcacttcgggcagcatttcaggctcatcctgtacatgacaatcaccgatgcgattatatagaaagaccggcagaaaatcaagatttcttcctgctcaacgtgtccaccgcaattttttcttgcatctcgtgcatgtaagaggctcccggacacctgtcaagaggcggtgtgaacccatggcataaatggaatcttttatgaaggaaatttattggacgtattttgcacagcgatgctataatccatctattagaattttcaagtggataaggagacctttatgaaaaaagaaaaaatcttgttggccgtggcgctttttctgcttgccgtggcgctttttctgcttatcgtagtggctggcggaacatttgtgtattggagggctgtggcggacctgactccggatccagccgaaccatttacagtggtgaacgcagacctgacttacgacggcgtatatatcgacctcattgagcaggccatgattgatgcgaaatcggaagaacagcagggcggctccaatcccgataatttagagctccatgtggtcaaatacaattcggagaccggatatgtggacgggatcaccgcgaccagcgccgggatcacggaccggcagctcagttttgtgtatgggggcgtccagcttgatctgcactttgtaaacgacgttctgatcggctgtcgaaagacctatgaacaagagctgttggatcggctggaaggccagacgttggaatcctgcaccgctgaggagcgggaggcagcggaaaagggtgctttggaagtcattttgaataacgactcctgggaaacagacgaggactatttgaagctggtactggccgactacacggagcaggtgctggaatatcaaagtgagcatccggggctactagttcccaaaaatgattagagatttgtgactgagcggggagtgagagccgtttatgacaacaaaagagcgcgtaatcgtttccgcatataccggcatccggatgtgtgacatggatttgatagaagcatatgtccaagagaagctcggccggccggttctctccaacgaatggggggatcagcgtttccacgagattgtacaagctatggtcgcagaggactttttaatgctctgtgagtagctgtgattatttttccatcaaaagagagggagcgggacaccgtctgcgaagcggactgagccattgactgaaacaagagatccagcaaggggaagcccctgctggatttttatatccaccggcttgacactaatatggacacatatctggcacctacatatacataaacggctgacgcggagaaggcgtcagccgttcaatattttcggatcacatttcaagaccgagtttttctgcgatctcctctggagagaggccggaggcttttgctttttccattacagttttcatggtaacaggatggagcaacttttgcttttgggcctccagaactttaatatcagctttctttttggagattttttcatcgatgattgcgatgcgttcttctacagtacgagcagccataagaggtacatcctttcgtgatcagaagatatgtttatgataatgcggcaaagatcctttgtcaatcaaatttcctcaaaatatggtaagttcgagttgcctcatgcacccaagaaacccttccgcaaaaaacgcagttatctttgatgggtaattgcgtttttgagcgggcagagatttacagcagataaaaaggaaaggtatgtgattgacgctccacagtttgcgtgttatacttcggttagccatagcaaactacatagaagcgctaatttacaatcagggaaatggaggaacgatatgcgtttaggctcttttcagcttcccaatgatgcaagtctgtcctatgcggaatatgggacatcaacgggcaagccggtactcttgcttcacggcttggtgggaagcatatgttcagagggaatggaggggtctctttgcggactgcccatgagggtaatcgctcttgcccgccctggttatggagactccgactacttcgatatggactgcgtagccgactggggccggctgctgactgaattttgggatcacctgggtctccagagctttgacatcgtgggcatctccgccggcgcaccttatgcgtatagtctggcggccctctaccctgatcgaatcggtactgtctatatcaacagcggcatacctgcggtctgcttcccaaatattctggcgcaatatccggctcaggaggcggcgctctatcatgcgttccgcggcatgtcacggcaagaggtggggcaggctttatatgacagttatcttcccctctttcccgaggcggccttgcaagggcgagacttccgggactctatgggcggcgatctccggaatatcggtcaggaagctaaactacaggaagcaccttggggatttgagttatctgaggtgcgatgtccggtagtattactacacgggacagctgattccgaggtgccttatggcgccatggtggagaccgtcaaaaggcttccccatgcccgcatcatcaaactggagggggaagaacacgcatctcccgcaatcacggacagattgatggcggaattgctccagtcggacaatgtataaaaggagagaaagttgatatgagcattcgatacaaactggcttctgcagcgctccgggccgccgggacgaaaaagctgttcgcgctgccggaggaagaactgctggagaaagtgcgcgggatgaaccgcagacggcagttccagatgccaaaagatcataaagcagtctacggtgatcgattgatcctggggcaatatcactgccttaccattcaattgggacaaaagaggacaaaaaaggcgatcctgtacttgttcggaggtgggatgatcgtcggtcctgaccagggcgatattaagacagcgcgggattttgctgtccgcagcggctccgactgctggttcccatactatccgctctgtacagaccactgtatcacagaaacctatgagatggtgcttcaatgctaccgggagatggcagagtgctacggggcggagcacatctcgctggtgggcttttcctccggcggcgcactggctgtcgggcttccgcttcacctcaatgcgctgaacaggccgacggggatgccccgacaggttatcgcggtgtcgcccggcagtattcccagttctcaaaaggagcgggcggagatgcaggcgttgaacagccgcgacgtgatggtggatgccgcctttatggagacggatcggaagattatgacaaagggacagccggtacctgtctatatgctctctggtcccaagggggattttaccggcttgccgccggttcacttctactatggtggggatgaagttctctctgtagtggcggagtcttttgccgatgcctgcaaagcggcgaatgtcccctacaccatgaccatcgccccgggaatgtgccactgctatgcaatggtggagtggtttccagaggggcgtcaggcccgcgaagaaattatagggctattgcgctgagaagggacaccatgcctccatttgttttttgcatacaggactgctattatattcgggccgcctatcaaaatccccgtccgcaccggcacttcgccgcccatgttttgatcgggctggatgggcctttcatcaccgagatagacggaaaacacatgcaggccacaggcattgccattgcctccaatgtcgtccatacagtccgtacagacgccgacctccttgtgattttcatcgatgaactgacccccatggcccgattcgtcaagtacgtgctcctgcagggaatgtcttgccgttccttgggaaaggaaactgcggctgcagtcagcggtttatggcagaatgtccgcacagaggaggaggctgtacgggcggcgaagggtaccgggaatctgctgggtctggagaaactggtgccgccagaggaggacagccgagtgctggctgccgccgcctatatgaaacgggctcaggcactggaggcggtaactatccaggaggtggctcaagctgttcatctgtcacccagccgtctgactcatctgtttcaccaggagaccgggatctccccgcgactctatctggcaaacctgaaactggaacgggctttttaccggatgcaggaggggatgaccctcacagaagcctgcatggccgcgggctttgccacaccttcccacatggcagataccagtcaaaatctgctggggctctccatgtcctatgtaaaggagattgtttcgggctcctacgataccctggaccacaaaacagcagatagacagaagtaccctgcggacctgctgtgatacaatgcccccatctgatccaagaaaggggtattttcatgtcaaacgaattcctcagcggcagttatcagttcaataacagtccgctctataactttcaactcaatcgggttgtcctgtggaaccacggagatccggcagaggtggcggccaggggaaaggagatcacagattttgcatcctgggagcgagtgttaaaggagttatcctatcaggcagaacggcggaaggactgggccgcggcggcgggttacctccgtatggcagagttttttatggtgccggacacgccggagagccgagatgtctatgaccgggcccaggaactgttctatgccaattttgcccaccttttcagcccccagggcggccccattcaccgggatgaggttccctatgaaagcggcacactcccatgctggcggatcacgccctccggagacaagcgggggaccatcctgttccacggcggcaacgactcgcttctggaggaattcacagacctcctgctctatctggcccggggtggctatgaaattctggcctttgagggccccggacagggggctgcactgcggaagtccggtttgacttttacgccggagtgggagaagccggtgggcgcggtattggacttttacggtgcggaggatgtcaccattgtgggcgtctccctaggcggcgaactcgccatgcgggcggctgctatggaaccgcgtatccggagagttgttgcctggtgcgtcctgcccagcatctatggagcgctgatggcggacaagccggcagaaatccgtacaacactggaacagttgctgtctgaaaaacagcgtgagaaggtccttgccctttatacagggctctccgagcaaaatccactcttccgctggtctatccagcacgcgaactatgcctacgggacggcggatgtctacgagtatttgcaaagggctaaggcatttaccattgagcctgtggccgaccagattacacaggatgtattgctcattagcgccagagaagatctgatggttggctttgatctctataaagaagaaattgacctgctgaaaagcgctcgcacactggagttcgcagtgcccggcgcagccatccacggccaagcccactgcaatatgggaaatcctcaatatatcctagacctgatcctgaattggaataaccggttgttacaataacggctgatttataaaaccgcggctgtctcagatggctgcggttttttatgtatatcaggcatgaggtttataaaataaagaccattttcagaaaaaaattctttattctgttgacaactgcatccatgtctgctattcttgttttgcgaccaaatataaaataacagtcgcaaaggaggggcacaatgtcacctaaaattttcagtatcaccgatagggaggagctgcgtgtcaaaatgctggacgcgggcttcgagcttatcaagcagtatggcatgacccacgcctcggtggagaagatcacccaagccgccgggctgggcaagagcaccttttacaacttcttttcctccaaggaggaatttgtcaccggcatcatggagtaccaacgggaccgggtgaagcagcattttgaaacccttctgaacggccgggagaagatgaccgccgccgagggaaaagagtatctgaaactgattgtgttcagccaaaacagtatctaccagtacctaactgtggaggatatggaaaaactccgccgtgcatcctcaccggaatgcgtgaccccggatgatgccgactatgaccagcgggaggcccaaatcctgcacggcctgctggatcacatggagggagtgcggcaggatgtggacctccatgtagcagccaatctcatcaaaatcatggctatggctaaggtcaaccgggagtccctgcacaccgacgccctggaccgcacgctggagcggatctacgaactgttgttttctttgattttcaaggaggacgcctgagcgcgtctttctttttcagcggaagttagttattgctaatcgaggagcgacccatatgaaagaaaaaacgaaaaaagaaaaacagggccatgcccgcctgtttgagctggccggtgcgcggaaaaacaagctgacgctggcctgccttttgtctgtcctctcctccgcggcgcggattgtgccgtttttcaccatctacggcgtggtggtggagctgctggcccattacacggctccggcggaggcagaccaggggaaaattcttgccctctgtgccattaccttcggcgcggcgctggtctatggcgtctgcgcttacgcttcctcagcaatttcccatacggcggcctatgagatcatttatgaactgcgcctccagctgatggaaaagctctcccgtatctcctccggctactttaccggcaccacccagggggccatcaaaaagattgtctccgatgactccgaccagattgaagcgttcctggcccaccatctgtgcgaaatcgctgcggcgatagccacgccggtgttcaccctgctgtacctgtttttcatggattggaggctggcgctggtgacgctgctgcccatctgcatctccctctggatgctgtcctcctgtctcagacagccggacaaggcggcccttcaagcagaacttcacgatgcccaggagcggatgcagggcaccgtggtagagtacatccacggcatgagtgtggtgaaggtgttcaaccggaccctcagcgccttccgccggtacgagggcgacctgaatcacttcaccgatgtggtggagcggacggcacgggccaacgccaggcccatgggcgcctattatgcctttttcggggcgcagcttttgttcctgcttccggcggccctgctgctcatccccacggcagacagctatctggatttcctgcccgtcattctgctgttctttctggtgggcggcggattgaaggagccgctggaaaacatgatgcagatggtgatcctctccagccgcatcctggagggcgtccgccgcatggacaacatcctccgtcagccggagccggatcaggagggaaccggaaatccaactgccttcgatgtggaattttccaatgtggagtttgcctataccaaaggcatcccggtggtggatcatgtctctttccgtctcccccaaggaacggtgacagggttggtcggcccctccggcggcgggaagtccactctcgcccagcttcttctgcgcttttatgagccccaggcgggaagcatccgaatcggaggggtggacatccgggacatcccaccggaccggctggccgacctggtggcctatgtgtttcaggactccgtgctgttcaccgacaccattgagaacaatatccgtatgggcaacaccgcagccaccatggcggaggtagaacaggcggcaaagaacgcaggcatccacgaggtgatccaggcgcttcccaaaggctatcagactgtggtgggccgggacaacgcctacctctccggcggagagaagcagcgccttgccatcgcccgggtctttctgaaggacgcgcccattgtcattctggacgaggcaaccgcctacgccgacgctgagaacgaggccaagatccaggccgcctttgcaaagttggcgcggaacaagaccgtactgatgattgcacaccggctgaaaaccgtggagcgggcggatcagctcctggtcatggagcgggggcggctggtgggcgccggcacccacgaaaaactgttggattcctgtgcgacctatcaaaagctggtggaggccaatcagcggcgggaccgctggagtatcgggaaaggagtggtacgggcatgaaaatcaaagaatggtttcagatgatgaccctgggccagccgtataaatatctgcggctcatgctctggtgtctgtttgacagtattgtgatgtccattccctacggcctgatgctgggggcggtctactatctgctggcccccctggcccagccggggacggctcttccgacaaccgccctctggcttttggtgggaggtttcctggcccagttgatcgcctacttctttatccggctgaaaacctacatcgacgccagcaccggctatgccggcatcatcaaggactctcagatcaccctgggcgaacacctgcggcagctctccatgggcttttactccgcccgtgacgcaggagacctgtccactgtcctgctgcgggactatcagacggtgggagacctgtcccagcagatgctcccccaggtggcggtcatcctgatccgcttcgttctggccgctgtgctgttggcggcgtttgactggcggatgacgctggccgtctttctggtcatcccgctggcgctcccgttcgcgttcctgagcctgcgccggatgggacgaatcagcgcggatctgcaaaatgcccagcgggaagtggcgtccggaatcctggaatatgtcagcggcatccagaccctgcgggccttccatatggcgggcgcccagttccagagcctgaagcgttcctttgagcgggagcgcagcgcagccatccacatggagacaggggcggcggctccggtgagtatgctgggtcggtttgtcctcagttgcggtatcggcctcgtgatgctgacgggggcgtttctgctgacccgcggggagttggagcccttctattatctggcgtttttgatcctgacactcactatctacgagccggtgctgaccctgtttacctttattgcggacttctcccgcacccgccgcagcggggagcgcatccaggcgctgttccaggagaggcctctgccggagccggaggtcagccagaccccacaggggacggatattaccttcgagcatgtctcatttgcctacggggaaaaagaagtgctccatgacatttccctccagttcccggcccggagcgttactgccctggtggggccctccggctccggcaagtccactgtcacccggctggccgcccgattctgggatgtgaccgggggcgctgtgcggctgggcggcgtggatgtgcgggatatgagaacggacgagatactgggacggatcagcgtggtctttcaggatgtctacctctttcacgattcaatagaggccaacatccgtatgggaaagccggatgccaccatggaggagatcatggaagcggcgaaagcggcggcctgccacgacttcatcatggctttgcccgatggctaccaaaccatcgtgggagagggcggctctacactctccggcggtgagaagcaacgcatttcgattgcaagggcgcttttgaaggatgcgcccatcgtcctgctggacgaggcaaccgcatccctcgaccctgagaatgaggtattgatccagcaggcgatctccgctctggtagcggaaaagacggtcatcgtcattgcccaccggcttcagtccattatgagcgcggacaacatcattgtgctggaggacggctgggtggccgagtcgggaactcatgaacagcttctggcccggggcggcatttatgcgaatctctgggcggaacagagccgggctggcatctggcggctataagaataaaaatatctgtagaaataaaattgtcctgccaaggcagggcaattttattaagtgaaggacatatggctttacttggtaagacgagccgccatagccaaaagcatctacagagccgcattgacaaactacatactttatgataatatatcaatgatatatagcggcgatatattgaaaagagttggtttcaatatgactaagtacacagaaacacaacgcaaaatccttgaagtaggaaaagaagaatttttagcgaaaggcttcaaagatgcctctcttcgtggaattgtcaaggcggccggttttacccaaggtgcattttacggctactatccagacaaggcggctctctttgatgcgttggtgtccgaggccgcagatacgctgatggaacagttcaaggcggcccagcgggcgcattatgatctgattacagaggaaaaaacagcgcagagccaggaactgtcgaccgattatctgaattattttatcaattacatttatgacaatttcgatgcattcaaactggtgatatgctgttctgaagggactcgatacagcaactatgtacatgaacttgtggaacttgaagtttcccagacggaaaagtattatcagcagctccggcagctcggcaaggtagaaggcgtagtcaatcacgatctgcatcacatgattaccagtgcctattttacggctgtttttgaaacagtcgtccacgacatgagccgggaacaggcaatagggtatgtcaatgaactggcagtcttttttaactgtggctggagcggcctgttaaggctcaaatgagccttaactttttacagaaaagttagcgataactaacctctgaagaggagttgttatgaatacccatattatctcccgcagccgaaatacgaacccaatcacagttctgatgcagggacaaagcgaccagcagagcatacaaaaaatacggattaggcatttggctggcggatggaggaaactgtatggatgacaaaagtatagaaaagttgctgaagaaaagcaaactggcctcagcgtatgcgatgcttccttctccagaactgaggagggcgattgctatagagtatgggaggctgttaggagaaaacgatctgtctgatccaatgctggccgggcatctcaggacttccattcttccggccgttgcattccaccgctgtctgcaagaatatggatatacccaatctgcctccctcatggcaattcgtgctgcggtattgaaaactgccaaacccatggcaaatatttttcaggggatgggaagactgcctttctttttctcaattttccgtatcatgtgctctatttccacgaaacacagctttggcccgaaaggatgggtatttgagtggaaacggaatgatgcgtatgcaatcgaatgggactgccgctcctgcctgtatgtcgatgtgtttcgccgatacagtgtgccggagctggcacccattttctgcgaaagtgatgatgtaatgtatgggaacatccccggtgttcgatggggcagggaccagaccatcggcggaggagataaggtatgcaatttctgcttttataacgagaaaaaggagggccttcaaaatgaaacaggcaaataaatggacggtcaaggatgtaatcacaacggtgctgctgaccgtactgctcattgtcatccagatggtcgtcaacatggtctgcatggtaaatgatttcgtcagcatggtactgtcggtgggcttcacaatgctgctctgcgcaccggtttatttcctgatggtcagccggatccataagcgttttgtttccttgatctacatgacgatcctaggctgcgtattcctaatcatgggcaactggtatctgctgccctattacatcgtcgtcggcctcatctgcgaggcgatcctttggaaaaacggctgggagtcgaaggggaaaatgacggctgcatggacgatctcaagccttctgtacaatggagtcaatcttctgcccatctggttcttctgggacacttatgaagccttcgccctctccagcggcatggagcaaagttacattgattcctttgtccgctattacacctcagcgggatggcttgcggcgatcattctcttcacggttatctgcggcttcctcggcagtatgattggcggcaaattgattcagaagcacttcaaaaaggcgggcgtactctgatgcggcgcagccaccttgccgtcctgacgaaattatgggcgctactctgtgtgactgttggagtatctctgacctccaacgctgtactgacctgtaccttgaccctgctcggttttacatacctggggtttcagcgaaattggcggcttctgcgttcttttggggtgttttatctcctgttggcagttctcttgtatctaattcgtttccacggattccatatggcgatcttctcggaattctatgtgctgatgctctggaacctgtctccggttttccttgcggcctgggatctcattaccacgccccccggtgagctcgcggcgtttttctcccgcattcatatgcccacgcctgtgatccttggactcttagtcgtattccgtttttttcctaccatgaggagtgaagtaaaaagcgtggggcgctccatgcgcaaccgtgggctgacggctccggcgcagcttgtacgccatccggcggtatcctgtgagtatgtgcttgtccccctacttttgcgatgcctgcagattgccgaccagttggcggtttctgccgtggccaggggcgcggagtatccgggcaagcggggcagttattatgggaaaagactcggagcgcccgactatatttggtctggcgtttggacggccgcaaccaccgtgtttctcgctgtagggggtgttcgcatatgataagtctggggaatgtgacctttcaatatgcgggctgcgaggagggggtaaggaatatagacctcaccatccgcgacggggaatgtgttgtattgaccggtccctccggtggaggaaagacaacgctgaccagactgatcaacggccttgctcccgcctattatccggggaagctgaccggaagcctccggcttgatgaaacagagctcaccacaatgccaagctggcgcatagggcaggaaataggaagcgtgtttcaggacccgaaaagccagtttttctcctcagaactggcgggagaggttgcctttgcctgcgagaactgcggtatgtccacggaagaaatacggcggcgcaccgatgaagccattgttgcgcttggactggaacggctgcgggagcggccactggacgttctgtccagcggggagaagcagcggacggcgattgcgtctgtttacgccttgcggcctcgcgtttatgtctgcgacgagcccacggcgaatttagacaatgaggggactacacagcttgcggaaatcctgaggaagttgaagacggagggcaatacgctcgtgattgctgaacatcgtctggcttggcttcaggggattaccgaccgatatatctacatttccgatggtgcgatccagtgggaaaagactgcggcgcagatgcaggcgcttacctgggaagaacgccaaacctatgggttgcgggagatcaccgaaggaaagtggacaccgcctgtacctgtaaaaccggagcagaatcctatgctctcggcgctccgcctgtcctgcaggcggaagaaaaactggattttttcagagctgaatttttcactgtacagcggacaaatcactgctttgaatgggaaaaatggcgcagggaagaccagcttggccatggtgctgacgggactttggaaacagagctctggagaaatccaaatcgaggggaaacgccttgcggcaggaaagcgccgcagagccgtatggtacaactccaacgatacgggcacgcaattttttacaaacagcgtcacggaagaactgctgctttattcagactacgctccggaacggctggagcgggccagaacattgctgaaaaagctgggcttgtatgcgtacaaggacacacacccagccgctctttccggcgggcagaaacagcggctctccatcgcctgcggcattttgtcggatcgtggtattcttatcttcgatgagccaaccagcgggcttgatggcggcaatatggggattgtcgcagatgtgttccgtacagaagcggaagccggaaaaacaattcttgtgattacccatgacagggaactgatgcaccgttgctgcgatgatgtcgttacgcttgcatagcattttcaaggaggactacatggagaaaaaaagatctgccacagcgtctggagaggactatttggaggctgtattggtgctccaaaaagaaaaaggtatggtgcgctctgtggatgtggcccggcatatgggagtctccaaacccagcgtatgccatgcggtagttaccttgaaaaagggcggttttctcactatggatgaggacctctttctccgcttgaccgatataggccgagaggtagcagagcagacctatgaaaagcactgcttcttcacccatctgctgatggaggctggcgtggagccagaaatagcggaacaggaagcttgccgaatagagcatgtgatcagcgaggacagttttcagaaattggccaacctgtatcagaggagaccttcaaatgcaaggtcaatagaggacgagggggaaatttgatgtggaaacaggtccttctgattgatgatggattgctgtaatagtatttcttcttaaaaaccgcagttgccctaaatgggtgcctgcggtttttttcatcgggtctatctgtctgtgtatggcgatgagaacaagacgcttgacaggctgaacactgcgtgctatattgtaaacatcgttagcgaacaacgataacaaagaaaggaggcaagtatgccgaaggacaagacggaaacccacgaacggatcataccggccgccatgaagatctttctggaaaaaggctttgaaaaggccaccatgcgggagatcgcggaggaggcgggcatcaccgccgccggactgtaccgccactttgtagacaaggaggccatgttcgccgccctggtggagccggtactctctgaacttcagaagtggtgtgagcggacgcggcaggtggactatgactttctggagcagggcgacctggatgccatgtgggattcaggcaatgatttgggcctggtggtggaacagatctattcccatttcaacgagttcaagctgctgctttgctgttctgccgggaccaagtacgcctggtttctccacgatattgtggttatggagcagcaggagacgctggcctacatggaggaagcgaagaagcatggcgtcccggtaaaagaagtggaccccaaagaactccatctgcttatgaccgcctataccaacgccctctttgaagtggtagtccatgacttcaccaaggaggaggccctgcactacctggatacgatgcaccagttcttcattcccggctggcgggccatcctggggctttgaacagccccttttttctacatttgagttagcgaaaactaactaaaatccacaacaggaggtgcgtatgtaaatgaagcgtgtatggacggccaggagccttgctgccgtgctcggcgggtccctgctctatttcctgatcacggtgctggtgatgatgtgtgggtcattttcccccttgttctgggtctttctcccggccatcaccgccgccgcatcggggtggctgtatctgtatctggcggcccgaacgccccggtttggggtaccggtactcatgaacttagtggtgcttctgctgttcctggcggcgggtgagctgtccggctggatggcggtgacgctggcggccggagcggtgctggcggagctggtgcggcggctgggcgggtatgagagcctgcgggccgcccgctggagctttctcccgctggccttcagctccagcgggagtccactctacatttggatcgacccggcccggacggcagccagcgccgcggaagagatgtccccagcctatgccgcggcggtggaggggcttgccacgccggggatgctggtcctgatgctggcggccatcatcgtgggagccgccatcggcgcatggcttgggagcccgctttggaaacgcggtcaggcccgaatccatatcagaaaagcatgagccgtatcggaatacggcggaaaggaagtgcagaatgaaaacaaaacgggaaaatcccctgaaagtcctcttttccttctctggagaggccaggggaaaaatgactggctcggtgatcctggcctttatcggagagatgttcggcatggccccctattttgtggtgaccctgctggcgaaggagctgtatgagggcactgccacggtggaacgggcggcggtcatggcggtgacggcggcggtgtgcatgtgcctgcgggcgtggcttaccggcctgtcctccatgcgcagccatacagtttccttcaccatcctgaagaacatccggtgcgctctggcggataaaatggcgaaggtccccatgggcgtcatgctggagaccccctccggcaccttcaagactttgatggtggacaatgtggggcggctggaggacatcatcgcccacatggtgccggagctgccctccaacctggccgggccggttttcagcatcatcctggtgttcgttctggactggcggatggggctggccgccttcattaccgtccccctgagcctggtgttcgccgtgtgcatgatgcgggggtacaaggagaagatggccgtctacctgcgctcgggcaacgagatgaatgccgccctggtggagtatgtgggcggcatccaggtcatcaaggcgttcgggcaggggagcaagagcttcggggagttctcccggtcggtaaactttttccacgacagcaccctggcctggtggcggcagagctggttctggatggcgggcttcaaggcggtgctcccctccactttactgggcacgctgcccgtgggagcgtggctctatatgcagggcacgctggagctgcccctgttcctggcctgcatcatcatccccttcggctttatggccgggctcatcaaattcggctttgccctggggcagctttcctacatggctcccaacctggaccccattcaggactttctcgccacgccggagcagcgccggcctgaaaagccggtgaagctgggagagcgttccttccgttttgaccgggtgtgcttctcctatgatgggaagaaggaggtcctccacgatgtgaactttaccgcccgcaccgggcagatcaccgccattgtggggccctccggctccggaaaatccaccattgccaagctgatggccggcttctgggacgccacaggcgggacggtctccttcggcgggcaggacatccaaaatattccctttgaccagctcatgggggagatcagctatgtggcccaggacaacttcctctttgacaggtccatccgggagaatatccgcatgggtgatcccagtgccaccgacgcggaggtggaagctgcggccagggccgccaactgccatgactttatcatgaatctggagcaggggtacgataccctggccggagacgccggggaccggctctccggcggagagcgccagcgcattaccatcgcccgggccatgctcaaaaaggcgtccgtcatcatcctggacgaggcaaccgccttcgctgaccccgagagcgaggcgcagatccaacaggccatctcccgcctggtgcggggcaagaccctgatcgtggtggcccaccggctgaacaccatccagaacgcggatcaaattctggtgatcgaccaggggcggcttgccgcctgcggccggcaggaggagctgcttaacacctgccccctgtaccggaccatgtgggagcagtatcaaagcacggcagcttttgccggaaaggaggccaactgaatgttccataccatcaaacggattctggatattgccggagaccagaaaaaatacatctatgcgggcattgtctgcaacatcctgaaaaccttttccatggccatgatgctcatggcggtctatgtggtgatctcccatctggacagcctcaccgccgaggtgatcggacagggcctcggcatcctgatcgccagcgtgttcggccgcttcctgttccagtggctggaggacatctccatgagcgccaagggcttcgacatcttccgggactaccggctggctatcggcgagaagatgaaaagcgcccctatgggttacttctccgaccagcgcctgggcaccatccagaccacccttacctccacggtggtggagctggagcagtattccatgctgtttatcacggacatcaccggcggcgtgtccatgtcggtcatcatcattgtaatgatgatgtttttcagcccctggttctccctgctgtccctggcgggcctgctggtgggcctctatgtgctgggaatggtgcagaaagccgcggcggagcacaccccaaaggtgcaggaggcgcaggaggagctggtcacccagtcgctggagtacatccggggcatcgcggtgctgcgctccttctcccagacggtggggcaggacggcgcggtgtaccagtccttccaccggcggcagaaggcggcgctggatcaggagaaggcagccctgcccgccctgcggctctatattctggtgttcaagctcaccggctgcgccctcatgttcctgtccaccttcctctacctgcagggggccatctccctgacctactgctttttgttcctggtggcgtcctttatcctctactccgagatggaggtcatgggggacggctccttcctggacaagaagatcgccaccgagctggaccggctggaggcggtgaccaacatcccctccctggaccggacggacaaggccctcgctcccggccgcttcgacatcgagctgaaggatgtatccttctcctatggaggaggccggaaggtcatcgaccatgtttctctcaaaatcccccaggggactacctgcgccgtggtgggaccgtccggctctggaaagaccaccttatgcagcctgatcgcccgtttttgggatgtgcaggagggaagtgtctgcgtgggcggcacggatgtgaaggactgcaccgccgacagcctgctgaaaaacctctccatggtcttccaaaatgtgtatctcttccacgactccattgagaacaacatcaaattcggcaatcccaacgccactcacgagcaggtggtggaggcggccaggcgcgcccaatgccacgacttcatcatggcgctgcccgacggctatcatacgatggtgggagagggcggctccaccctctccggcggcgagaagcagcgggtctccattgcccgcgccattctgaaggacgcccccatcgtgattctggatgaggcgacttccagtgtggacccggagaacgagcatctgcttttggccgccatccgggagctgacggcgggcaaaacgctcatttccatcgcccaccggctctccaccgtccgggacgcggatcagatcgtggtggtggaccagggacggatcgttcagcaggggactcacgatgcgctgatggctcaggacggcctctaccgccggtttgttcaggtccgggagcaggccgagggctggcggctggaataaccggttttttaggcgtcgttctggaaggttgcagaaaggccagaggccgccggcatgatgccggcggcctctggccgcttaccacctgccaggtctgctgcttggacatattgacaatcagccattcaggaggaacccagcctataattcaccaaaataaactgtacctgatatttcggctattttcaagtttatatcatcctgaatgagaatatattacttgtccgtaagcgcctgatatagtatattgtggttagcatacgcaaactgatggcatggaggaacgcgcaatggaaatgaaacaactggagagctttgtgaccgcctgcgaacgcggaagcatttcacaagctgcggcttgcatgtataccacgcagccaaacgtcagcaaaaccatccgtacattggagcatgaactgggacggccccttctggtccggagcgggaagggcgtacagcctacggtttatgggaagaccgtactggagtatgcgaagctgattctgagggcaacggctacgatctcctctttagccgtgccggatgagcaggacggtctgcggctgtccacatatcctagcaacatggtgtcacgcctgttggtagacttctacaaaacctggggacctcgaatccatattgagcaccatgagggcaccgtggaggagatcaccaaccatgtccaccaggggatctccgaagtcgggatcgtatatgtggcgcaaaagcagactcctacattccaacacattcttttccacaagaaattggaatttgttcctcagagtgaaaagagcatctgcgtctatgtaggacctcagcacccactgtatcatgcggagagtgtggacttttcagaactgccaaatctgaaattcatgcggggagtacgggatttcttttccatggaacatcatcttgaaacggtgagcatgggagtcattgaccaaagcgttatgaagcacgtgatatacagcgacagtgaccactcgatcatcaattttctgctccacacggatgtttgcagtctaggcctgaattttatgcaccgcccctatgaacaatatgatatcaaaccgttgtccatcaacggatgcgagccgtttctccaaatcggctatgtgctggacccagagcgcccgctctcgccgcaggcctcctggctgatagagcggttcagggaaatgctgtaagggcataacaaatagttatggaattccatgaaaaactggcctctggtaagtcttgactaactgctgtaaaattacagaccgtagtacaagactacaatatttaagactggaggcatttatgaaaagaagaattttttctgtgctgttgagcagcgctctgttgctgacggcgctcgccggctgcgggcaagggggcgaagcagatccaagcggaagcccgtccgacgcagagagtgaaaccgctacgcgggacgagctgatatttgtcaactatcgggatatccgggacctgaacccccacctgtacgccggtgagatgtacgcccagagtatcctttacgatacactggtgagcaatacggaagatggttatgtgggttgtctggcagaggactggaccatcagcgatgatggccggatctataccttcaatatccgggacggcgtaaccttctccgacggaacaccctgcgacgccaacgccattctggccaacttcaacgcgattctggaaaaccgggagcggcacacctggctggagatgatgaacctgctggtgagcgtttcggcgccggacagcgatacttttgtcattgagatgagcgagccgtactaccccatgctcaccgagctggcttgcatccgcccgttcgcaatgatttcccctaactgcatgatcgacggcagcacgatgaacggcgtcaacggctatatcgggacaggtccttatgtgctcacagactttgttaccgatgagtatgctgtttttgagcgcaatgagaattattggggtgaggcgcccgcaattcagaagatcactgtcaaggtcatccccgacaaccagacacgcattatggccctggagaatgaggagatcgacctgattttcggcaagaacatgctggacgctgatgccatcagccagtatgtggacagtgaccggttcaccgtaagcctgtctgaccccacctccacccggcatattgtgctgaacaccacccacgatattttgggagacgtggcggtgcgaaaggcgctccagcacgccacaaaccggcaggccatctccgagggcattttctacggcctggagccggcagcggataccctttattccccaaccgtcccctactgtgacgtggatttggagccttatgcttacgacaccgatgaggcggcccgccttctggacgaggccggctgggttatgggaagcgacggggtccgcgccaagaatggacagaaactggaactggacctcctctacaacagcgacagcgttactgagaagaccatttccgagtatcttcagagcgagtatctgaaattgggcatctccctgaacatccacggcgaggaagaacagtcttatcgtgataacatgaaagccggtaatttcgatatggtgttcaacatctgctggggtatgccttatgatccccagtcctctctggctgctatgcgggccccggtgtatggcgactacgctgcacagcagggactggaggacaaggcggagatcgatcaggccatcacggatatcctcacctccaccgatgagacagagcgtcaggaactatatgactttgttctgacccggctccatgaggacgccgtctacatccccttgacctatgaaaccaacaaggccctttatacctcggaactgaagggggtccacttcggcaccgaccagtatgatgtggatttcgcaagcatgtacttcgagtaatcgtcgatggcatcggggccgcttcttttgaagcggcccttatgctgaattgctttcgctcgcgggatttgctcacgctttccccaggcgtgaagcacacaagaaacacgtttgcgaggcttccacagaagaaaatcacaattttgcaaatatgtaaaaaagaaaggggcatctatgaagcgctatgtgatccgccggctgctgatggcaatccccctgctgctggcgatttcctttgtctgttttgtattcatcaatatgatcccctcaaatccggcggaggtcgtcctccgaattcagcagacgcccattatcacagaggaggcgattgcggagatggaggaggcgctgggcctgaacaaaccgtttctggtgcggtattttgactgggtcctgggctgtcttcagggagatttcggtatcagttatgtcaatcccgcccgcacagtagccggagaactggcccgctgcctgccagccacactgcagttggcggcggcctcgtttgtgatcgtgctggtgctgagcatccctatcggcttcctctgcgctgtgtataaggacggctggttcgataagattatgcggggtttggtcttcatctccaccgccatgcctgcctattgggtcgggttactcctgatgtgggggatcagtgtcaaaatggggcttctaccgaccaacggaaacggtacttggcaacatatgatactgcccgcctttaccgtggcgctcagctacatctctacctatatccggctcatccgcaacaatatgctggagaatatgaagcaggattatgtactctatgccaatgtccggggattgcctcagcggtctatcctggtcaagcatatcctgaaaaattccatgcacacctgcattgtcgccatgggcatgagcatccctcagatgattgccggcaccatcgtggtggaaaacgtgttttcctggccggggctgggaacgctgtgcatcagttctatctttaatcgtgatttgccggtcatccagacttatgtgctgttcatcggtgtattgttcgtggtatttaatctagtgttcgacatccttcagactgtatccgatcccaggctgagaaaggagagctgagctatgggaaaacgctttctgcacaaccgtgccgctgtggtaacggtggcttttgtcctcctgatcgcgctgatcggcattcttgccccgctcctggcgccgcacgatccctatgttacggacatcctcgacaaattcgcgccgtacagcctggaatatccgctggggactgatcacctggggcggtgtgtgctctcccgcctgatttatggtatccgtccaacactgggacttgcccttctgaccatgctggggaccatcgcgctgggcgcgctgctgggcgttatggccggctacttccggggcgtggtggaagaaatcatcatgcgggtggtggacgtgatgctctccttccccagtcagatcatggtgttcgccgtggtgggccttctggggatcaatgtccaaaatgtcatcattgccaatgtgttcatcaaatgggcctggtatgcccgtatgatccgaaccggcgttatgcagtaccgggaccggaactttgtccagttctcccggtgcgtggggatgccggagcggttcatcctgttccgccaccttttgccatccatcacctctgatcttgcggtgctggcttctctggatgtgggctgggccattatcaatatctctaccctgtccttcctgggactcggcgtgcaggcccccaccccggaatggggagccatgctcaacgaggcgaaggatgtactcaccagtaatcccacccagatgatcgcgcctggtattgctatcgtggttctggtgtgctgctttaatctgatgggtgacgccctgcgggacgtgctggaccccaaggaggtggagaaatgaccccggttctggaattacaagatctccatgtcctgctctgcgcacgtcggcatcagggggtggagttggtgaagggagtttccttctcggtatatcctggagagtgtcttggaatccttggggagtccggaagtggaaaatccatgtctatgaaagcggcgatgggccttttggatcatggattccacgtgcttggaagcgccaaattccagggagaagaactgctggggaaaagtgatgaagagctgcgccgtctgaggggcggccaggtaggcatcattctccaaaacccgatgacctgttttgaccccctctaccggatcggagcccagattgccgaaacctttgcggcccacaataactggagcaaggaggatatcctccagcgatctctggagatgctggggaaaatgcggattcgtaatccggaagaggtgttggagaagtacccgcatcagctctccggcggaatgcttcaacggatcatgattggtatcgcaaccgctatggagccgtccctcctgatcgcggacgaacccaccacagccattgacgccatcactcaatttgagattctggacgaattgctgcggatcaagcaggaacaccagacggcaatggtctttatctctcatgacttgaacgctatttcccgggtggcagaccggatcgtagtcctcaatcaggggcttgtggtggatcaaggggatttccatcatattctccatcacgcgaccgattcctataccaagctgctggtggagaagcggacggatgtgatgcgccggtacagccaggtactgggaggaaaggagtgcgcctatgcttgaactgaaaaatatctgcgtcagtttccgaagtgagcgtcaggacaaggtgttcggacatacccgtcagcaggtgctctttgatgtgtccctgaacgtaaaaagagggacttgcctcggtattttgggagagtccggcagcggaaaatccactatgggccgggtgctgtgtgggctcctgaagccagacagcggggaggcgattctggacggtgtgtcggtctacgcctcccgggcgggccggaggaacctgcaaaacaagctcagtgtggtgtttcaagactacacaacctctgctaatccccgcttccgtgtcaaagacatcattggcgagggcctgaccgttcgggaacgccgggagaggggacggctggagcgaaacaaagaaacagccgcccttctggagctggtgggacttcctgctgattttgcggacagatttccccacgaactctccggtggccagcttcagcgggtgtgcatcgccagggcggtggcctgtaagccagaggtcatcctctttgatgaggcgatctcctccttggatgcgcatacccaggtccaggtgatggatctgctgcaggacctgaaggaaaaactgggactgacctatgtatttatcacccacgacctgacctctatcacttatctctgtgacgatgtgctgttcctttatcagggccgtgtaactgaatatctgcccgtcagccgcatcagcgagaccaaggatgagtacgcccggcggctgctggagtccattgtggtatttgacaccgagacttcggaggtggccgtatgattttttgtgggacaacacttttgccgggtgagcggaaaaacgtaccgctcccggtaccggatgctccgcctctgaatgcaatctgcctgtgcggcgccgcacggggcagaacactggttgtcacaggcggggtccatgggtgcgaatatgtggggccccaggcactgcgccgcctggctggagaactggacccggcgagactgtcggggaacgtcatcctcctgccgctggcaaatcccagcgccttctatgccggagccaaacaggtggtgccagaggacggcgtcaatttgaaccgagcctttcccggcgattctgcgggcagcctttccgctcgattggcctttgctctggaaacggctttgtacccggaagccgatttgctggctgatctccacagcggagactgcaacgaggcgcttcatccattggtgttcttccccacagcgggggaggaaatggtcaaccaagtctccctggccgccgccaaggtcctgactgtaccctaccgggtacgttccactgcgaagaacggactttacagctgggcggtgcagaggggcgttcccgccctgctgattgagcggggcggtcaggggctgtggtctgaacaggaggtggacgcctgctgtgaggatgtccgctccctgctgcgacatctggagattatgcccggagggaacccgccgcgggatcagctggaaatcacagaaaccttctatgcggaagctgagtcggagggattttggtacccggcagtaggtttagaccaacaggtccgaaggggagaactgctcggacatctggagacgctgtccggccaccgcttacaagaggttcgggccgagtttgacggcattgtcctttactacacaatcgccctgggcgtccgggcgggagatccgctgatcgcatatggccatccgtaaggaattctggcggctggcctggcccgccgcggcagagggactgttgctgatgctgctcaccgccgccgacctgctgatggtttcctctctgggaaacacagcggtggcggcggtcagtattttttcccaaccccgtatggtgatcctctgcgtaacccgctcctactctgttgcactgagcgcctatgttgcccgccggcgcggcgaggatccggatgagtccctgaccgcctgttcccgcgcttcgctcatgctggggtgcggtctctcgatactgctcctggtcgggacctggattggagccggcccgcttctacaactggccggtgcacaggatgactatatcagcttggcgttgcggtatgcctttcccgccctggtgagtctggcattctccgggccggctattgtccttcacggcatcttggcggggcttggcgataccaaaagcgtgcttgtgtccaatgtgctgggcaacggagtcaatgtcgtcttcaatgcgctgctgatctacggccttggtccattccccaaattgggagtttttggcgccggacttggaaccgctatcggtgctggcgctacgctggcctatacgctggcgcttttcttacggcggcggcatccggccactctgcggggcagaggggactggctgccgggacgggaatacctccgctccctggctccccttgccgcgggcacgttcctggagcaggcggcggaacggttcgggatgttcacattctcccgcctggtggcggatctgggcacagtggcgctaagcgtccacaacatctgcgggagcctgtgcgacatttactatagcttctcccaggggcttgggaaggccagcttggttcaggcaggccaggcgttgggctctggacggacgtgcaatctgaaacggatcggggcggtgtcccgccgggcggcgctgtggactgggggtgcggccacgctgatctatttgctgctccggtcgcccttgcttcggttctaccacttggagggcaatgacctggctctgggctgtgagatcatgatctttgtggctgctgtcaacattccggaggcatgggctatggtccatgcggggctgctccgtggcttggggcataccagttttgtggccctctattctctcatcagtatcgcggtggtgcggccgatccttaccttctttctggtttatgaacttggcctgggattatacggagcatggattgcccttactctcgatcaagcaacaagagcggtatgttccatgctgggagcgcagcagacgattcgtaccaagatgaaggatggctcaaattcataatctccttgatactattgtagcgtcctcatatagatttttctattaccatagatatcgggcgcgatgagattgcaaatcattcaccggttccttcaggcttaggagcaagccgagagctggcggctgtctttcttcctgcctcctggctttttcggtccggcgtgttctctcactctgcttcccgtgggtgggagaacgcccggaacgctgccgggctctgcccggtgctgcggcggaagagctgcgcgaaacggctgggattctgatagcccacaatttgagcgatctggcccacgggcaggtcggtatttgccagcagctgctccgcacgctccatccgctgcccctgaatatactgagtgatggtgcagccgtatcgggcgtgaaaggcatccttcagcttggagacgcccatgcagccgatgcgggccaggcgctccagaggcagccggtccgcgcagtgggcggtgatgtaggccgccacatccgccagcatccgctcatcctcctgcgtcagtgttcgcctgggagctgggtgggcccggtgccgttccaccaccagcgccacggcttccgccaccttgccgtcgtaaaagagtttggcggccagcccctcgccccggtagtcacggacctctttcagcaggcggaccatctccgggaagtggtcggtctggtccagagattgaaaggattccaacaggctttgaaactcctccgaaaactggcggcggaggtagtcctgatagtaagccggagtgatctcaatgccgatggatacgatggggacccggcggtggatgagcgcccggtagggctcccgcccgccgatgaagctcttgacacagccggacaccagccggcggcagggagagaactcctccccggagatggactcgtaccaggtgacgctcaggctctccggccagcaaaactccagaagctgatcctcatgaaaatagaaatcgtggattttgagcatatagaggtcctgctgcccataggtccagaaatagccgcttccaccggggccggcctgacgccagcacaggcccatgcttccatacctccggttgtccggctccggcacaaagccatgctccgccatggccccggcatattgctcatccaatacattgcagctatacattctgacacgcctcctccacctcaatcggccgaatccataccccgatcagccgcatgagcgtggcacgccttgtatctgtgacagacagggagtatgctgttatttggttagtatctgctaactaaaatatcatatccggcctgttccgtcaaggctggtaaaggaggagtgcaatatgaaacagaaagagataagcccggtcaggctgttgctccggtgggcagggccggagaagaaatggctgatcgggtcggtgctgtgcgcctttgggagcgggctgctggcgatcaccgcctacctggggctgtaccggctgatggacgcggtgctgtccggcgcctgcaccccggcggtgatcgcggactgcgccgtgttcgtgatggcgggcaccgtggggcggatggtgctgctgggggcctccggggtgctgtcccacaagggggcctacggcgccctgttccgggtgcggtgcatggtcacggagcatctggcgaaggtgcccctgggcgcgttggacgagcggagcacgggagcggtcaagaccgtgctcaacgaggacattgagaagctggagctgtttctggcccataacctgccggagttcgtggcctatctcaccggcccggtggtgatcttcctctatctgctgtcggtgaatgtcccattggcgctggtctcgctgctccccctgccgctggcgggaattgtgatgggggtgatctttggccgcatgaagggaattctggaggacgccaaccgctccctggtgagcttcaactcggtaatgatcgagtatgtctccgggatgcggctcatcaaggcgtacaacatggggagccggtcgtttcagaagttttcccacgccatttcggaggaaaaccggatctggaatctggtgacccataaaaccgcgccgccctatgcggctttcctgctgctggtggagtgcggtatgctcctgatgatcccagccggggggcttatgttcctccggggctcggtgagcgccagcgtgtttctgctctttgcctatgtgggcggcatgtatttgacggagatcctgccgctccagaagatgtccactacctttgcccaggctctcagcggtgtgggaaaggtgcgggagatcctggagcttccggtctttgaaggaggcgggccattcccggaggaccacggcattgaactggaccatgtgaccttctcctatgacgggaagacggatgtgctgcgggattgctctctgtcggtaaagcagggggaaaaggtggccctggtgggggtgtccggcgcgggcaaaagcactatcatccagctgatctcccggttttacgatacaacaaagggcgaggtccgcatcggcggccggaatgtcagggacatccgctacgaggacctgctcgctcacatctccatcgtgtttcaaaagaccttcctcacccgggacagcgtgctggagaacatccgtatgggcacgcaggccacgctggaacaggtgcgggaggccgcccgtctggcacagatcgacgacttcatcctgtcgctgccccagggatacgacaccaaggttggggctatgggctcacgcttctccggtggggagcgccagcgcatcgccattgcccgcgctattttgaaggacgcccccatcctcattctggacgaggcgacctccgccgccgacccggagaatcaggtggagattgaccgggccattgaaaacctctgccgtggcaagaccgtactcatcgtggctcaccggctgggcgcggtaaagatgtgcgacaaagtggcggtggtggaggaccacaccatcacctgctgcggaactcatgcggaggtgctggaacagaattcttattaccgcaaagcctgggccgactaccgggcggccaggtccatcacctattccgtgaaaggagggcaagacgatgacaaatgaatctccgttccgcaaaaacagggctttttatattggtgtagtgctgaccgtattggagggcatcctctccgggtgcagttatctgtctgtctacatcgtcctcaccgctctggcttcaggaacgattaccgccggaatggtgggagcggtcaccgcggggctcgctgtcattttcctgctgcggctggtcatttacagcaccgggtacacccaggtccagatcggcggggcggcggtgtccaagcgcctgcggctgcttctgggggataagctcaagaagatccccctggcccgcttcacccaggggcaggttgggcagtatgtgaacaccatgaccagcgatgtgggcagctatgagaaaattctgacccattccagtgggaacattatcaaaaacgccgcgctctccgcggtgctggttggctttgtatgcaccgtctggctaccggcggggctgatcctgctggcggttgtcgcgttgctgattcccgacctgtggctgtccttccgggtggtaaaggtgtacggcgtggcgaaaaacaaggtcagcgccgagacggtgagtggcattgtggagtacattgacggcattcagatgttccgggcgtacaacatgggcggcgtaaaaaacaggaccgtcacccaggccatggaggagttcagccgggtgtgctaccagtacgaagccaagggcatccccatcggattcggctacaatatcatcagctggggcagcgtgccgcttatcatggtgctggccgccgggccatgggcggcggggacactgagcggcgtggactatctgatgctctccatgctgcccattttgctgaccaagctcaccgccagtattgccattgatctctttgaatggaagcacctgatggtctccaaaaggaacattgagaatctgattcaggagccggaggaggccggggagggcgcgccctttgccccggagcggcacgacatcaccttccgggatgtgtcgttctcctatatgccgggagagccggtcctgaagagggtgtccttcaccgtcccggacgggaaactcaccgccatcgtgggggactccggctcgggcaaatccacgattttgaatctgatcgccaaattctatgagccgcagagcgggaccatcgccatcggcggtcaatccatccagactgtctccgcagagcgggtgctggcacagctctctatggtggaccagcaggtgttcctctttgacgataccgtgcgggagaacatccgccacgcccggcccacggccactgaccgggaggtggaggcagcctgcagggacgccggatgtgacggctttgtggagaaactggaaaagagctatgacaccgggattggagaaaacggcagcctgctctccggaggagagcggcagcggctttctatcgcccgggccattctgaaaaacagtcccatcctattgctggacgaggccaccgcatccctggacatcgagaacgagctggcggtcaaacaggccattgccaatctgctcaaggagaaaaagaccgtggtgatgatcgcccataccctttccatcgtcaagaacgcggatcagatcctggtagtggcggacggaacaatcaaggagtctggcacccacgaggagctgctggccgagaacggaaaatatgcggccatgtggaacgcagaacagaagatcactgtatagagaagaggtcgcgcctatgaaaaaactccatgcgtcgggcgaggattatctggaggccgtgctggtactccaaaaaggaaaaaggcatggtaaggtccgtggatgtggcccagcaccctggctggctcttcacgcaggaacagatctacgaggctgtatggcacgagtttccgaagggctgcggcgcgaacgtagtcaatatcatcagtcagttctgccggaagatggaaccgggaaaccccatccgcactgccccctacagcagttataagttcgaactgactcctgtaacctgataagcctttttcgcaaaaaacgcaggtatccttgacgggtaactgcgttttttatgcaggcagatacaaaataaaaacggcgctttggtgtgagctgtaatgccctcaaagtgccgtttatgctttatctgggatgtgacgaagaacatcttctaccctgcaagaaagaatgttgcaaaggtcattcagcgttgcggttgaaatattccggttttgcttcaaagaatccaatgttcccttgctgaaggaatagtcctttattagagaataagttgtaattccctttcgacgcatggtgtcccagagcgggtcgtaagtaataatagaaaccacccctttgtgatttctattatatttgacatgctgcctcttgaatattcccggtatatcgggtataatatcttaattacacgattttatacttgttaattcttctcattcaagcgcctgaccatcaacaaaacagcttccaaatcctgatcgttcatcgacttgatgccatttatgatctcctgaaccaaaattggatttcggtattccgcttcctcatcgaaaaacaaacggggcgtgataccgagcgtgtcaatcaaatagagcaattctttcacagatggctgggaatacccggtgacaatgttatgaatatagttcttgctatgccctaaatcataacttaattggtattctgaaactcccttttttaaccgcaattctgtgatacggtttctgataaattccatctccatatgattcctccaccaccattttccccataatacactttcatggtgtgatattagggtgggagtggtgtgtttcttttatacaatatcacttttatagcgtgataatttgataaaataccacacaggaaaagagagagacatatggatagagagaaagaatcgcctccggagagactgccgttctgcttggacgacacagttggtgaaatcgtaagggcaagccaggagtgccccggcgtctactatatcgcagccaggaaacaggacggcaagtttttggcagatgaatactatgtggtggaaaaatcctcgccagccatatcaaaagaggccatggtatatgggaggatgcctgaagaggactcccgtgtgctgctctattcgtttgcggaagagcggcggggatataaaatcattgagtatgagatctatcggtatcaggtcaggcacggaatatatgcagacggacagacctcgcttcgtgatattgctttttacaatatggagtatcatccggaatactttggaacttatccagcgccccttgccacgccgcggggccgtaccgcacgctacaagccgctgatgaacggcgtcttctggatcgaaacaggcacaggagaggaagtcctcgctgtctgctatcctatttggaactgcgacttctcagaaaccgtattaaagcaatcggagcagaccgaagaggatgtgcgggaaggaattgacagcaccttggggtatctgttcttttccaagtgggccagcagcctcgccttgtttgaactatgggggcagtacgaggagttaagggccggcggtctaatcaactaccccgcattgatgaactatatctggacctatttcccggagtacgccgccacatacaatatacagaatcagatggggatgcacgataccttcggcctgctgatgaacgcactgggggcggagatggaattgcagaacgacccgagcaaggtaattgcaatgtcaaaagccgccgggcttgatttcctgaatttttaattgggccgacaatggccagatcaggtgagacaatgaacttggaacaaaatgaagaactggcgaagcaaatccttcgcaccggcatgtacgcaaatctgtatgataaagaaacaacatacgggtacctgacctatttaacctaccgggtggaggacacgctgttcacctggaaaaaggaaagcgatgcggacggtttttgggccgacctcacatgggaggaatatattgcctttttgcagcgggaaaaaacattgcttttggcggcccaaagggtgctgctcagcaccgtgatggcgttccctgtctccgcatttgactttacattggaagaagcggaagtggactttcccgtaacgcgttatgacagcgccgggatgctccatatggcaaagctctattccttcgagaactgcatctcaatcgtggagtttctgatgttccgggcagagagggcgtattatccattatggaaggagcagcggggaccccactacacatgggagctttatatcgtggagctgcttcacagccgaagggaatttgtggaccccttatcaagagccttccgcaacgcactggtccaattggactttctcccggcgtggcagataatctatccgaccattcaaggggatacagagataggatgagtcggagaccgagattatactgtggctgaatcttgaaaggcggtaagggatgcaaggagtgggaagacggtacccaagcacaggtaaaacgcactcctgacgatgatcaatattatcatccagctccgccagaagatagaaccaaacaaccccgtccgcactgtccctgacagcgtctataggtttgagaacctctcaataataaaatgaaaaatccctgcagatttgccgaatctgcggggattttctatttcttattttgggctcaatcggtatccataaaatactccgctgcccgatattccaattccatcaaactgtggatgcgatacctctcaattttgtgtcggagatctggcagtcgcaagaaaaaattcgaccacagttcttgcctgtcatagtccttctgatagcggtccaaggaataattgaacatcagccggtaggacaaggcagccgtgcggagtctgtgtttatatcccttgggcgctctatcccgagaaaacagataagccaccatatccatgatgcgccgctctgtcatataggcgcttcccaatgtaatcgggtgccagcggtagtaatcgtattctgatgggtcataccgctttgacagggaatcgttttgaaacgccataacggatagctcaggatacagatggcagagctgattaagcgcacggatatttttccgcttgtgcgcaatgtgatagtaatagatgaaatcctccaggctgatttgcgggtgggtgacattcagccgcctcatgattccactcctttgtattccgccgcacatggaaaatacttcttgcaaagaaagtataatcacaaacacatataaaagtcaatggtaatactatatttatcacactgtatgaaggccgacattttcgataaaataaaacaaatacacgcgggaaggatttgacgccttggaatacagagtggatgaacgggcaaagcggattgcccgcaagctgcgcaaaatcagagagctgaaggggctgacccgcgaaaaattctgtgagcccttgggtgagaacagcgattactgggggctgatcgagcgaggtgagcagccaatcagcctgcccaaactgctccaggtatgcgaggtttaccagatccctattgagagcgtcgtggtactggactatcaaatacaggacaacggccgagtacgggaggacattgacggacttttgggacagtgcaatgagtatcagcttgaagtgatccgcaaatttatttcggatattgccatgacgctataaagtaccgaatccaccctgatcatcaggcggagttcggtactttttgtgtagtagccatggctgcctgtgaaaacgaccgtccgcaggccggctttaacaacttattttgaacagcaagtaccagtatgatactgtcagggattgcggctgcctgggtatttccccccagcacaatcaacctcactattttgcagttgccgatctgtctgccgcatgactttacggtataacaaaactgcaaccagagccgccagcgcctccgctacgggaaacgccgcccacacaccattcagcccccaggacaaagaaaataccatagccagaggtgggatcacaaggagctgacgaagcagagaaatgctcaaggaatacagtcctttcccaagagcctcaaaacagccggccattaccgtccccagggtggataccaaaaatcccaggcttgtaatacgcagcataggcaccccgacagctatcatggcttcatccgcatcgaaaaggcccataatctgccgtgggacaccccaagcgatcagggtgcccaatgccataatgatggcggtcaaagcgagactccatcggatgacaagatgaagtctccttccttggcccgctccgtagttataactcacaatgggcctcatgccctgaatcagaccattaccaggcatatacacaaaggtttgcagcttgaagtacaatccaaatgctgccacggccaatgtgtggagacccaccagcagtgcgttcaggatactcaccagcagactgggcatcgcggtcatcaacccggaggggactcccactgcgtaaattcttttggcgattccggcatcgatcttcatatcttttcgggtaatacgaattcccgttctggtccgaagaaagcagaacaccgccaaaccacaggctgtcatctgtccagttaccgtagcaacagcagcgccggtaactcccatagcgggcagtccgaacatgccgaagatcagaatcgggtcgaggatgatgtttacaatcgcccctacgccttgcaaaatcatcggtacgaccatgttcccaaccgcttggaacagtttttcgataaatatatgatacaggctgccaaaggacagacagatcacaatgcgggtgtagttgacactcatctgcaggatctctggatcattggtaaacatatgtaaaaatggctcactgccgaaaagcccaaccaatatgaaaataacagcatggatagtggtaaagatgacccccatggaagcggcttgatccaccctgtgctggttcccttcccccaggttgcgagcgatataggcgttgattcctacgccaaagccaacagcgactgccaacacaagattttgcaggggataagccaaagaaaccgcggtaagtgcatcattgctgagccaggccacaaatatgctgtctactacattgtatagagattggatgagcatggacagaatagacggcaccgacatgctcaccagcagtggcaaaatcggttttgtccccattagatttttggcgttagtcaatgcaaaacagcctcctcatattaaaattaaaaggctatatattttcctgtttgtaatcagaaacaggaaaatatatagcccttggaattgttatcatacaaccacgatgtcaagcgttttttatgatagcatccacctatcagaattgtcaagtgatactttactcatgagagggaagctgatgttccagcgttctgtttttatggattagaagtaaactgagcagcatggcaatgatttgggacaaagggacagaaacccaggttccattcacactccccatggcatttgggaggatcaggagcaggatgcagagcgtcaacggctccccatagatcagaatataggcccagagatttttcccagtcgcatagaaataggcggtggtcactctggacacgctgacaaagacaaagccgataatgaagatcggcaggatctgtgccacaagcatcgtcacctgctcggaggcgccgaacagatgggccgcgctgccccgcagcaggaaaaggacgaccgagcagacaaccgctactccaaaggcgaagcgatacgccagatcgcgcaccgcttttgtggtatcatgcttgccctccccataggccaggctgatgagcggctgactcccgtcgctgacgccctgcatcagcagcatgaccacagcagaaatatagctgatcggcgcatagcaggtcacagcgatattcccgccgaaaatcacggcgctcttattgagcaggatcagggtgatattgggcgaataggtcaggccaaagggagaaaggcccactcccagaatgcgggatgcaagatatcccccctctccgtcaaactgaaatgaaggcgcgtgctttttgaggacaaagaatacaaggcagaccagaaaggtcatcgcctggccgattgccgttgcgacggcagcccccatcatcccccaaggcagcacccatacgaacaggtagtccaggacaatgttcgtgataaagcctgtcaccatggccgccatggccgtgaccgctccgcccatgttgcggatgaaaggaaccaggccagttcccgcgatctggaataccgccccatagctgacaaagcgcaggtactcgctgctgtactccagtatctcgccggacgcgccgaacagacccaggatctgaggaccggcgaacaggaacagggcggtaaagagaatgctgaagccgcccagcaggaggatcgccatacccatgtactgcctgccgcggttttcattttgattcccggcgttgatggcgtactcgattgcgccgcccatgccgatgccggtgcctaccgcctgcagaaaagccgtcagcggataggcgatgttgactgcggccagggcgtcgtcccccatcgcatttccaacaaagaacccatcggcaatcgcgtagatgccggacaacgcaaaggccagcatggatgggatgacaaaccggaaaaactctttgcgaatgtgcatttcaaccgcttacctccctgaaatgccggttatagagggcggtgtgctcaatcaactgttccgcccggtccagtcccagccggagccaaacctgtgcctcgtgctcctgaagcgcctgggcgatctgcgccgcctgtgcgctcccctcgggagtcagagaaagtttcctgcttctgcggtcctgctccgagaccttgagctccagccatcccttgtctgtcagcgttttgataatcgcattgacggtctgcttggggatcgcaaaccgctggcagatgtctttttggagcaccgtgccgtcagcctcgacaatcgaaaggatcaccagcaactcataaagggacattccccgctgccgggcccaggtttcatagagctggttggtttcaatccacagggcattatattgagcgctgagctgatgtagttgatccataggccatctccttataattagtctatatcgggactaattataaaatggaaacaggcagattgtcaagacctctctcatcggttggatagtggcagcttaaatttatgggctttgtcccacttagttttttgctgggatacacatgaaattcatgcgcttgacttttgagaccgcttcttttatactgaactaaaaagtacagaaacagacttttgaaaggatcgccttatggataaaatcatgattacgattggacgccaatttgggagcggtggccgtgagattggcaagaaaatcgcccgggagctggagatcccttactatgacaaggaactgctggccgtggccgcaaaggagagcgggcttgcgctggacttcctccaggacatggatgaaaagcatccgcacagcttactttactctctttgtgtggggcggcccaatctggtgctggggaactgcaatatttcggtggagcgtatggcgtccaaggcccagcgggaggctgtgcttcatgtcgccggccaggggagctgcgtcatcgtgggacgtggtgcggactacatcctgcggaacgaaacccgcctgttccgtgtctttgtttccgccggtatggacttccgcattcagcgtgtggtcaaacgcgacggtataacagaggatgaggcccgtgaccggatcaggagcatggacaaggcccggagcgcctattataattttaatacggaacagaaatggggcgccgcacagaattatgatctgtgcctcaatgtttcccagtggggtacggacggctcggtggagttgatcctccgtgcgctccggcaggtatatctggacttgtgctgataaaatagagcggaaaacaaagtcgggctcgaatcgaggctgtctttgctttgctttttatgttttgcgcattatcgggcggattgccgcaccactgtttttgtttatgatagtagaagggctgcaccacacccggagtaagcccaaatatattttgcgtttgtatgtagctggtgtcattattgcaaccgcaaataagatcatcattagtgtggttggaaacactatagtgtctaaattaaatgccgacgaggacaatcccaattggtactgctccgagttggtatgggctgcgtattatagtgaaggcattaacttgaatggcagcaccattcccaaccatctttatatgccggatgagcttgcaagcagttccaaacttacctacagggatgtagaataaagggtggtaagatatgaaagctaatcgccatttgcgtatagctgtagggttatacggtataatatgggtcttgtcagcaattaccttctggctgttctacaaaaattctcaaatggcgatgcttcatgttattgtagtccaatatgtggttatgccagttgtgactcttatctcgtctatttttgtaggcagagcgcatttgccaactaaatatgtttggttgatgccggtttgtttttctgttgcatatctactctacgggctacttaccctctcacttagccaataccttcttgccaaggttatgtctgtccctgaattttttgattttcttactggtcttgtctcctctgcgattggcctgttaattggaattgcttttgggaaaaaatctaagaaatcaatttgatgaaacagtaattcatatgagagccaggccgaagatggcctggctctctttgatttgagtccgatacaagtgaagacggcccccataatgtctatggagcggttggaacacttcataaacggggtgccgtcctctcgtctaccaaagacatgattagcatatctgtggcttttgtcgggaaaaatcaaaagggccaatgtgtcgtataatcacctctttggggaaggtggtcggatagatacgtcctaaaaatacaaaattttcctgcataaaggataaaataagggcggagggtgaacccctccgcccttattgcggaccttcgtccgcactgcagtcacttattctgttatgatggaagcgaatcgcatgaggatcacggccacctgcgcccgtgtagcagaactgtcaggggacaaggtagagccgctggtgccatttatcaggccctcggcgctggcccagctcatagcctcccgcgcaaagccgctaatctggtccgcatcggtatagccgctcaggtcggcctgtgcggttacgtcatgaccctgcgccttggcaaaacggtagagcatgaccgcaagctgttcacgggtgatagcatcatccggtccaaaccgttcgtcgctgtacccgctggcgataccattcagacgcgcccagtagaccgctgtaccgtaatatgcgttcgcgtctacgtcaacgtaggggtagccccaattctcgtcctcaatatcaggggaccctgccagccggtagaggatggtcacaatcatcccccgattagttatgacattcgggccgaacgtgttttcactggttccagccatcaggcccttttcatagacataacgcacagcatcatagaaccagtcgccttcggagacatccaggaacgggttacgccacttcgtctcaatgggcttgaaggccactttaacggtcactttgccgctgggctgcttgaagctccaagtctcatccttgttctgctccacctcaacaggcttgccgtttttgtccgtgacggtcacgtggtctacttcgtagccctcgtccggtgtcggttggatcgtcaccttgtcgcctttctccgggtttttaggcgttacggacacctcgccatgcgcaggcttctccacgtcgggacggtaggtgggggtgctgtggccgccgccgctgggcttcttcgtagctgtcagcgtaatgaccgtctcggcctgattgtattccacatctgcggccttgaccgctttaatatggaagtcgcctgtgcctgttaccgtcacgctgccgtttgcatccaccgttgcgggaccgctgactaccgaccaggtgactgctcctgtgccggagccgccagaggtttgcagcgtaaagttgcttccttcgtagatggggctgggtgcgccggtgatgaaaagggcctcctgcgctgccttgcccacagtaagtacaacggtttgggccgtttttccgccgtagctgatcgtgactgtcttgccattatgttctgcgaccgtcaacaccgttccctgagcaggggcggcggtcagcttgccgctggcccatgtgagggtttcgtttgtgtcatcgttgtagtacacctgtaccgacaaatcgctcaaatccagtgtctgcccgctggtgtaagacaggttggcgggctgggcagtaatctcgattctgctcacggccttttcgggggtggtgatcgctactccctggctgatggttttcgcatagttgctgctgtcctccgcctttgcaaagaagtagtaggtcgtattggcggccagaccagaaaactcacgccctgtctgccagttgtcaggagcttcattcaaggtgttgtatccgtaagtaatcgttgcgccagtatcgccgggttctactacagcctcattcagagtaatcttcgtggggctgtccgcctgcccggtaagcgtaatcttataagagactgtcacctctaccgttcccgtctgcgccgccatattatccgactctacaaattttgcggtaagggtgtgcttcccgctgccgaggttcacctctgcggtgtcgatggtgaaggtcagctcactgccggaggtaacatcttttgcctcggtaagctgcctatcaccttcataaatcgccatctgacccgctgtgggtgcggcaagtgccagcgcattgttggccggggcctcgccggtggccttgggggtcacggtaacggtgatggtgtcgccataggtataggtcttgtccttcttgtccaccgtcactccgccgtcaaactcggttgcagactgcgcgatggtgaaggtcgccgtttttgtgccggtataattgcctttgccggtagcagtgacagtgaccataccggcgttggtgagattatctgcaccgccgttactgttttcatagctgagtttgtagtctgtgccgccgctcaggggttttccgttcaactctaccgtcacagttggagttttcggttttccgtcataagtgaacggcccgccgctcaccgttaccttcgcctcagaaatagaggccaggttgactgtcacctctaccgttcccgtctgcgccgccatattatccgactccacaaattttgcggtaagggtgtgcttccctctgccgaggttcacctctgcggtgtcgatggtgaaggtcagctcactgccggaggtaacatcttttgcctcggtaagctgcctatcaccttcgtaaatcgccatctgacccgctgtgggtgcggcaagtaccagcgcattgttggccggggctacgccggtggccttgggggtcacggtaacggtgatggtgtcgccgtaggtataggtcttgtcctgcttatctaccgtcactccgccgtcaaactcggttgcagactgtgcgatggtgaagctcaccgttttcgagccagtatagtttttctttccagtgacggtgacagtggcctgtcccgcgttggtattatccttataatcaacttcgtaatctgtacctgcggtcaaagttgctttgcctagtttgacgattacatcgggggtttttgcagttccgtcatagatgaatgtcgtttgcgataactcaactgttgcattttgtacatttatcggcatgaccttcagttgcccgattccggtgccggccattaggttgtcgtttccgccaaagtctgccataatctcgtaggcactgccgcttgctgtccaacgatccccggttaaagtgacctgtgttttggcaacgatctgcccgttttcgttctctacatcaacggtggcaaagacagttccgtcaacagagaactccacctgtttcgccccggcagctcgactttgagccttctgcgtcatagtggccacaatggtgatggtatcaccatagcttgcttctgtaacctgactattttctttccagaaggtgacaacagtaccgctttgatacaggataggattaccctcaaccgctccgttgccctggacggtgccatagtttttgatggtgccattgttaatgatcatgccgtttttctggatagttccatggttatcgaccgatccattattggtcaatgtcacgccattgccgatggtaagtgttctgtcttgcagaatggtcagcgtcttgtctccagggatttctgcgtccgtttcaaggatgggattgccataaacctgtcccgcacttccctcgaagatcacgccgctccaagtatctttgtcggtttgagccgatatgctggacgcgataataaaagcgttgccgtgtacttccaaagttacattactgccaccgcttcctgcgccgatgcccgagctcaatactgtatatgtggcagtgatcgttcctccgttgatggtgatggttccgcctgaaccaaagctaccgctaccgatacccgcgccagattcaccaatggcagtgaccgtgccgccgttaatggtgatggtgccgcccgcgccaaagagaccaccaccgatacccgcggcaccgccaccaccactggcagtaatcgtgccgccattgatggtgatggcaccgcctgcgccctcgttcccgccgcctatgcccgcagcaccgttgttatcattacgggcagcgattgtgccgccgttgatggtgatagttccacctgattcacctgcgtcgccgccaatgcctgcctgattgaagtttcctaaggcggtcagtttgcccatattgctgccattggactgggcgtagatggtcaggttagcgccctccccaacgttaatgcccgagttcgcgttcaactcgcagccatccaccagaatcaggtgggcctcaccggtgacggtcggacggttggtcaaagtgactttgccgcaaaccacataccagccgtccaacgtggtcgctcccggcagtaaaaattttgcgttggcggggatattttgcggcgtaccgcttgcgtccaggtatgtctcaccatcggggaatggaatcacagagccgccgctgttggacggaatactgccgtctggaccaaccatgattgtgccgttgttggtcaaagtgccgctgatcgttccataagtgctaattgttccattatttgtcactttgttgctgatcgcggcgtcggcttgattggttatcgtgccgctgttatctaatgaaccgtcgattgtaccgtgattgataaccgtgccgtcggcattgttggttaatttgccgtaaatcgtaccgtaaatgtcaatcgtgccgttgttagtcaatgtcacgctattgtcgatggtaagggtgttctcctttggtacaatcagcgttttgccttcggggattgccgcttccattttaaggctgggactgccataaacttgtcccgcattcccctcgaagatcacaccgctccaattatttttgtcggtttgatccaacaatatgctggatgcgataataaaggcgttgccgtccgggccggtactaaaggtgcatacgctacccgcgtagccattgccgatacctgcggaatttgtacctcctgtagcagtcactgtgccgccgttaatgatgatgtctcctatatcctttctactgtaatagccgcttccaatacctgcaccgccaccccatcggccgctaccacctttggctgtgatattccctccgtttattatgatttttttagccgtaccatttgagtttccaccgatgcctgccgcctcacttccgccggtggcagtcactgtaccgcccttaattgtgatggttccattctcagcaccgccgatgcctgcttgtccgctgcctcccgtagcgatcagtttgccggtaccgccggtttgtccatagatggtcaggctgttgccctcgccatccaccccgataccgctcttagcggtaagggtgttgccatccgccaaaatcaggtggacatcgccggtgacggtgatgcggtcggaaatttccacatcgctgttgacaacataccagccgccgctccattcagccgtctggttatcaatcacggcgacattgtccgcagtctgttcctcgccgttttcgtccagatatttcacattatttaaggtttcaatggtatttgtcagcccattgaaaaaagcaaacaggctttcaaaaatctccgccccggtgatctgggctttctgctcgtccgtcaaagcattgtaagcgtcataggccgcctgaactttctcatgggccttctgctgatcctctggggacatggcctgtatgtcttccaaagagggcagggcgtcgatctgtgcctgtaccgcctttacctgttcgccaacttccttgccctcgcactttgtcaaatctgcattttcactgccgcataccgggcactccttattgattgcgccctcagtgcagggtactgcacagatacatttggtttcctcctgcgccggttcgcccttgcaggcggccaggtccgcgccttccgctccgcatacggggcaatcggcgttgatttgatcctccatgcaaggcacctcgcagatacattctgcttcctcctgtactggttgacctttgcaggcgtttaagtctgcactttccgcgctgcacaccgggcagtcagcattaacctgatcctccgtgcaaagctccgtgcagacacattcgtcctcgtcgggctgaggcttgtccgccggttcgccgccctcttgtgagttgcagatttcacacacaaaggtacagggctggcccggttcggcgggagcataaccgcactcggcggtatgctccgggtgatgttcgcacaaaccttctgtatcagtcgcttctaccgcccatgcattcgctggcagggtggaacatactactgcgcctgccatcagcagggcggtaattcggcttatcagtttcattttgatcctcctgttcctgtgctggcctatcaaaaaacgcaaaaaggaagcggtcatccatccggtcggaatggacaactgcttcctggattattgcaatatataggcaacacaaaaacaggcagatttacctctgtctgtctgtctgtcgtgagtttattccataagagcattatttgtcaaccccctttttttctttttctctgtatcatttccgtgatgtcgttgcgtatctgcatatatctcattttaggtataggaagttcttctccggtaatcaaagtcaatttataccgttcaatctttgccacatagttgcagttcacaaaatagcttctgtgcagccggtaaaagcaggatggcaattccgcttccagttccttaatggaagtctgcacctgccgtttctcattgaccagatgcaggacgctttcccgttccaatgcctgtatgcactgtatcatactcatttctataaagctgactgagccgttttctttgaccgccagacggcggttattgctttttccgctttctcgcaatagacgctgcacatattgataggtttgtctgctcacctgaacaggaaagatttcgtcgcccaccaattcgttatactcattggaaacgtgcatgtggtacagccggtagccctcgttttcctgcctgtaacaaaatgtgccccgctgttttacagtgcagatgattttagcctgctccgaagcgtacaaggtatattctcccagcaccataagctgcccgccgctgccagtttcgatttgacggaaagacggttcctccagctcaaagggcggcataatgaacccgtttttgaactgcgccttaatcgcctctgcgcccgataccaagaggtttccaatactgagccacacgcagtcatcggcaaggacagaaaaaaagcggctccgtattgaggtgataatattcccgcaaaatatacagggtatcttcacaaacggtttctttttttatctccacagacaccctccgttcccatgatttttcaccagaatataccctgaaaagaggtttgtccatagattttgcaccaatagggcatataatgtgttgaatgtgcaaggttcgcttaaagagctaccggcaagggctgttcttgttccgcagatacaggtccagcggtgaagttgtggcatttggggttcatggcaggagatcgcctttgtaggggccaccgatgcgggaaagaccaccatcaccaatttgctcaaccgcttttatgatattgcggacggcaagatccgctatgacggcatcaacatcaacaagatcaaaaaagcagacctgcgccgctctctgggcgtggtgcttcaggacgcgaacctgtttacaggaacggtcatggagaacctgcgctacgggaatcccaacgccacagacgaggagtgcgttgccgccgcaaagctggccaacgccgacggctttatacgaatgctgccccagggctatgacacagtttttgaaagaggatggaagcggactgtcccagggacaacggcagctgatttccattgcgcgggcggcggtgtcgaatccaccggtcatgattctggacgaggcgaccagctccatcgacacccgcatggaggcgctggtgcaggacggcgtggataagctgatgaagggccagacggtgtttgtgatcgcgcaccgcctttccacggtccaaaattccgacgtcatggtactggaccacgggcgcatcattgaacggggcagccatgacaggctgatcgcggaacggggcacctactaccagctctataccggagcgtttgaactggaataaatccatgatgcgtccaaacgggtacattacctgaatcgtgaagacaggagtattgggcatgtgggcaaagcattactcacggcatgaaatccggtgctggaggtactgacttttcatggtccttttgcccacagcttcgtttgataaatacaatctgtctccttgacatcatggaggaatatatttagaatttaaggcaggagaatagctcaaactatttgagtccaatggtatgaagtcaagtgggtgaggaagaaaaaaattaagcgaaacagagtaaaaagcactgtgtaggtagcaaaaaggcaacacaaatctaaaccctgccccctgagtttttgaaacagggcgatttcgtcagagcggcaagcggtgtgctcagccctccggcgggatatacaggcggttgtctttcagcagccgaaagaccaaccgaaccagttttctggcagttaaagcgagtgctcgtttgtgctggtacttgttgacctcttttaatttgaggttatagtagcgccgaaactcggagtcgcatcttctcacagagttggctgcttccagcaggtagtaacggagatagcggttgccggatttaatcatcctggaatgctccgcctcgaagtcaccagactgatttctgttccagacaaggccagcgtatttggcgacagaggcttgggattcaaagcggtggatatcgccaatttcagcgatgataccagcggagtagaccttgccaataccggggatggatgtcagcgtgttcgggatgatttcaaactggtgttcaatggccttgtccaaaaccttgacctgcttctctaaagcccgtatggaagcaatagatacggccatggcctggtttacagagttgttcacggtaactggcagacggtaagaatctctggctgcactgcgaatagccttagcttttgctgctgggtcagcgaagttcctgcccttttcatcaatgaagacagtcagttcatccagattggcgttcgccaggtcatccacagtttcaaactgttccatgagcgcaatagtagtggcgctggtgttctgaatgtctttgtcctgggccatgccggagcatttgaggaataagtagttggcgaaccgctgcttttcacgggtcaaattctgaataacatcaaatctggccctggtaagggtttgcagggctttgtagcggtaatcgtccatgtagacctccctgttgattctgccaaaacggagatggtcggcaatcacaaaggcgtccacccagtcgttctttggcaggtcagaataggcttccttgaacttccgcacctgcttgggattcagaacatggattttcctctgaaaccgccccaggctgccatcctcacgaagagcgtagaccaagctgtccccgtagatggaggtggcctccaggccaatcaccacatcgctgagctgcatggaacgaagtgccgacacgattctctctgacaacagcttagcaccgccaagattgttttgcacagagaaattggagtgcttgctgccgtccggcttcatcaggtaggccacattgttcttgctgctcacatcaatgccaacgaatagtggattcacaattttcacctccccatgtggagatttcaggccagcaggctttgagatacccatgataaccggagcatcctcacccttgcttattagaatcattccagagttggtcaatgcgatagccctcactgccaacagggcgaccttatctctggcaaacagccaatgagtttgcagctaacttccggctcaggggaacagactcaaactgaagtagccttttggctcaactggagatgatagaacttgaccctgctgtcctacagctattgtatcacgggcatctcagagcctgctgatacctgaaatatttgctttgaaacttattatacaaggagatgaacacatatggatattggatcggatggcgtccggcatactgtcattacctttgaacccttcctaaagcggaaagagctttgtggcttgacagacgcacagattggaaaacgcttcggtttaacaaaagataccgtaaatgcaatgcggttacatgacgaggtgccgtttaatacggtccagaaaatttgtcaggaactacattgccaaccgggtgatattatggaggcattagatgtttggatcatcccggcaaccaaggaaaagtaggaagcgtttctggcgggctgcttaaaaagcaaatacatctcagtatgataaaaagcgccctgggccgtccaaagttggaacggcctggggcgctcatcgtattgtcagcgctcatcacagggaaaccaagcccgtgccggaatccgtgattacaaataattgacggccagcatgacgataccaagaagcgcaaggatagcgccggtagcccggttgaggacggccgggctggccttgttggcaaatttggccgctatccgcgcccacaggagggtggagagcacacaaaatatcaggcaccaaatatccggagcaccgccaatggcaaagtggctcgccgcgccggtgagcgcggtgaaagtcataatgaatacgctggtgcccacggcggtcttgagctcatagcccaaaacgctggtcagcaggagcagcatcatcatgccgccgcccgcgcccacgaagccgcagataaagccgacgatcacgccgcaggccacagactggaaaaaccgcttccggggactgaccgcatccatagactccttggcggtcatcacaggccggacgaggaacttgatgcccaggaggagggtcataaatacagagaagccgcccatggtcgcgttggggagaaggctggcgacccagcttcccaccagggtgaacaggagaactacagccatcatcacaaggccgtttttaatgtccaggtttttgtttttgtgatagatataagcgctgaccgcgctggcgagcacgtcgctggccaaggcgatccccaccgcctgataggcaggcagatccaggaacgtgatgagcatgggggaaatgacggccgcagcgctcatacccgcaaagccggtccccaggccggcgccgatcccggccacgaagcagatgaaaaaggtgtagagcattgcttaggcatctcctttgaacgcaaggcgcagattttcgccgatgcgggtgaaggcggattccagggcggcccgctcctctgtggtcatcccctgggaaagctgtacgcgcaacgcggcctgagcggcctgtccgtcggctacggcagacgaggaggcaggcagaaggcggaggtgggcgctctttcgatttccggggaggtagctccgctccaaccacccccggcggatcagggagtgaatcgagacggacacatgggatttggtaagtctccgccgctccacaatatcggcggcggtatcataggccggcgcgttggccaggaagagcaggatgtccagctccatccgggtgaggtcccattgctgagcgatggggtccatcgtctgatcatagagccgcttgaacagaaaaagatgatcccagaattccatcctcgccctccttccccgcaacataaacagcaggcgcattattgttctattcagaactataatgcagtgtaaaggaaaaaactggttttgtcaagagtggagcttgatgggaggtgttatcctcttgcacttccctgattgaacaaaaattcgtgtggagagccatgtatgacggacaaaatccagtggggcacgggcggctcggcggagttgatcctccgtgcgctccggcaggcatatcccgacttgtgcgaataacataaaacagaaagtaaccaagaaaacggcctttgtttcatgcaagggtcgtttttgattgccagccctcttgacagttcagactcaaagtgctatattcaaaacatcgttataaaacagtgttttgaaaaaggaggaatgacagtggcaaaacaaaaggcgggcgtctatgacaaggtgctggagtgcgccaaggaggagtttttgtccaaggggtttctggacgcttctctgcgcaccatagctcaggcggcagataccagcaccggctctatctatacccgcttcggggataaggaggggctgttccgggccatcgcagagccggtggtggatcagttcaagtccatgttccgcagggtacaggaggattttcaccagctcagcgaggaggaacagcgtgcggatatgggacagtacaccgcccgccatcaggaggaaatgctggactacatctacgaccactttgatgttttccgtctgctgctggacggggctcacggcacccggttttcctgctttctggacgaattggtggacatagaggtagagtacacctacaagtacatggaggtcatcggctgcgagagcgtcaagtccggcctggtgacggaggagtttatccacatcatcgtcaccgcctacttcaacggcatgtttgaggtggtgcggcataacatggaccgcgccgccgcccaccgctatgtcaagatgctcaaccgctaccacatggcgggattttccaccgtgttcgatcctcagtcctgataagaggctgtgcctttgggtgcagccctctcatttgtacaaaagttagcaattactaaccaaaaggaggaatttatatcatgaaacaacaaagtcccatgctccgtctgtgggagctgggagagggacagcagggcggcttgaagcgggcggtcctgtccgctgtggtgggggtactgtttgggatgctcccttacttcgccgcagcgcagatcatcctgggcctgctgaaaggggaggagagtacacaatactacctgatatggtgcgcagtggcgcttgtgggctttttgctccgggccaccctgtattccctggccctgtcccaatcccacaaggccacctttgctatcctgaaatctatccgggagaaagtgctggagaaactgccgaagatgcctctgggtacgattctggacacctccagcggccagatgaaacaggtcatcgtggaccaggtggagagcatggagcggcctctggcccatcttctgccggagatgaccgccaatgtgctggggccggtgtgcatcctgatttatctgttcgtcttggactggcggatggcccttttgagcctggtgtccatcccggtgggcatggctttcatgatggcggtgatggccggctacggaaagcagtacgagagctcggtcaaaaccacccaagccatgaacagcgccattgtggagtacatcggcggcattgaggtcatcaaggcgtttaaccagggcaagcagtcctatgcccgcttctctgacagcgtaaaggccaacgcctcctacttctaccactggatgaagagctgccagatgccggtctctttggcccgtgccatctcgcccaccaccatgatcaccattctgccggtgggctggctcctctataccggagggagcttgcccatcgagacctttatcaccaccatcgtcctgtccctgggcattgccgggcccctgctggccgccatggactttgtggacagtctcgctaaggtgggcaccatcgtgggctcggtggatgccattttgaacggagcggagcaggaccacggggaaacgccggcggagttccagggccgggatattcagctctcccatgtgtctttcggctaccatgcagacaaggaggtgctccacgatgtatctctcaccatccccgccgggaccatgaccgcctttgtagggccctccggctccggcaagtccaccatcgccaagctgatcgccggcttctgggatgtgacctccggctccattactctgggcgggcaggatctgaggcatatcccgttaaagcagctctacgaccaggtggcctttgtatcccaggacaactacctctttgacgagagcatacgggagaatatccgcatgggccgcccagcggccaccgacgccgaggtggaggccgtggcaaaggccgccgggtgtgacgcctttatccgcagtctggaacacggctatggcacggtggtgggcggaggcggcgcccacctgtccggcggtgagcgtcagcgcatcgccatcgcccgggccatgctcaaggacgcgcctattgtggtgctggacgaggcgaccgcctacatagaccccgagaacgaggccgtagtccagcaggccgtgggcaggctggtagcgggaaagaccgtgctggtcatcgcccaccgcctcagcaccatcaccggcgcggatcagatcgtggtagtcaatggcggccgcatccaggatgtgggcacccacggggaacttttgaaaaactgcccgctgtatcaggagatgtggcgggcgcatatgggcgcaaaggagggagagcaggcatgatcggtgttttgaaaaaaatctgggactttgccggagaggagcagggcaatatccgaaagtccatgattttaggcttcttctacgcggtgttccacatgttccagatcgcggccatctatgtggtggtgctggccctggtgggcggctccacagactccgccccggcatggcaggctctggggcttctgctggccagcattctgggccgggcggtcctcaaccgcttcagccagctccagcagacccacgccggctactttatggtggcggacaagcgcatttccatcggtgacaagctcaagcgggtccccatgggctatttcaacgaccagagtttgggagaactcaccggcatcaccaccaccgttctggacgaggtggagagcaccggccccatggtgctggtcagtattctgggcggcctgatcaattccgccgtcatgctgctgtgcgtcctgttctgggactggcggatcggcctgctggccctggcggggatgctggtatatctggccctcctctccggaatggagaagcagtccgccaagattgcccccaagcgccagcgggatgaggcccggctggtggaggcggtgctggaacagctccagggcatgagtgtcatcaagtcctttaacctgacgggaaagggtgacaagcgggtgcggcaggcgctggaggacagcagggcgaacaatctggcggtggagaagctgttcactccctatatctggggccaggagatggtcctccacctgttcagcgtgctgattctggcggcgtcggtggggctgtgcctgacggaagccatgtccctcgccaacgcactgatggcggtcatcgtttctttcctgattttttcccagatccagtccgcgggcagcggcgtgtccgccctgcgtctggtgggcagctccattgaccacgccaaccaggtggacgacatcccggagatggatcagcgcggcacggccatccgcccggagagccacgagattgtattcgaccatgtgaacttctcctatggaagccgccccatcctcaaggatgtgtcactgactatcccagaccggaccaccaccgccattgtggggccttccggctccggcaagaccaccctttgtaacctgatcgcccggttttgggatgtggacggcggccgtgtgaccattggtggccgggatgtgcgggagtacacactggaatccctcatggagcaggtgagcatggtgttccagcgggtgtacctctttgccgacacggtggagaacaacatcaagttcggctgcccgggcgctacccatgaacaggtggtggaggccgcaaaaaaggcgtgctgccacgacttcatctctgccctgccggatggatacggcacggtaattggcgagggaggagccacgctttccggcggggagaagcagcgcatctccatcgcccggtgtctcctgaaggacgcgcccatcgtcatcttcgatgaggccacggccaatgtggaccccgagaatgaggaccagctccaaaaggctatggaagccctgacgcgggagaaaaccgtgctgatgatcgcccaccggctcaagacggtgcggggtgcggatcagattctggtggtagaccagggccgcgtcgtccaaaagggtacccacgacgaactgatccagcaggcgggcatctaccggaatttcgtctccgagcgaacggagtccagccgctggacactttgattgaaaaagacaacgctgcggtgtgggtattctattacctgcgccgcagctgtctgattacagaatattcagatttttaggatgctggagagatgggggccttttacaagcatgagtgacatatgttcccttcgaggtccgaggccctttgcgctaattttgagtgcctgcattggaaacgcaagggaaaaagcatccaaaccggcccgcacagttgcattttccgtgagttccctgttataataccagcaggaaaacggttggagcgcggcgtggtttggctcggaatatcaaattggaggtatttcgatgcgtacagaggattccctggagcaatcgctccgccgtgtactgaaggcggctggctacatgatgcggaaatcccatgcgcccatcagtgcggacaaccttggcggctacatgatcgtggatatgtccaggaatacggttgcggcaggcggccgctttgagctgactttggaagatgtccgggagtgggcacgggatatgtgctgaccgcggctgcggctgagggaggaacgccctcagccgttatgccttgggcttcatctctgtggtaagccgctgatgcggctatcatgtaaagagtgcttatccaaatcaatagaaagagaaaggaatttgctttatgaacaagggagaactgattgctggtatggccgaggagagcggggtttccaaagcggatgcagagaaagtcttgaacgcattcctatcccaggtcgagaaagcgttgtgcgcgggagataaggtccagctcaccggcttcggcagctttgaagtgaaagagcgtgctgagcgtacgggccggaatcccaaaaccaatgagcccattgtgatcccagccggaaagatgccagtctttaaggctggcaaggtattaaaggacgcaattaaataaaaaggcagacggcgcaacacatatcaactgcatataagaacctgattcaaaagtcacccctctgaacactcgctcaagaggggtgatttattttgtgtcccgaagaaaggtttcaaagcaggtaaggtagactaacttgtagcagcgaggccgtttccttggatgaaagctgtaccgtacattccaatattcctataatctggatgaacgaagcactctatgcctttccttgacagaagccggtggttccggtataattaaattgaggttagcaatgactaaccatataaaaacaaagggggttttttaatgttcacaatcaacaagtctgtaagtgtttgggaacagttagtccagcttccatttttaaatctatattccagattgctcaatgcggccatggagctggatgtattttctcaactttgccagccggttactgctgaagcactggcagttcatatgggatggcataaggcaaatacagaatatctgctcagtgcattggtatccatcggctttttaaacaagacggacggcacttaccagaacaccgcggaagttgaccgctatctggtcaaagggaaagatgaatatttgggaggctttctgcccttttatatgcaggaaggcatggcacctatggatgtgaagctgttggtcacaaaaggcccccagtcccagcaacaggaagcgatggagcagcagttggattttgcctcttttgcacagcggatgcgacaggcacaggaaggttaccggcagcaggagttgttgcggattgtgcgttctctgccggaaaatgaccaaatcaggcgcgtgctggacctaggcggtgctacaggacttttagggctggcagtcatcggtgatcggccggatcgtactggcgtcctatttgaccgttttcccccggcggtggtggaagaatccatctcccttatgggactcactgaccgcacggaagtgatgtgcggcaactttatggcagacagaattggagagaggtatgatctaatcctggccctcaatgtgatgctctttgccaaaggccgtatggaagaactgctgaaaaagtgctatgacgcactgaatcccggaggggtgctgctggttatcagcgaggctatcctgcctgaccacaccggcccctgggatatggtaatggggtatctgccgtattacttccaggggatggatatgggcgtattaaaaaacgaagtatcggatgcggccgtacgcgtgggctttacaaaatgtgaaaaacgcacggaatgcctctgctctggcacacaggacattgacattattcggaaataaggagtgtatctcatgctcgaatctttaataaatgccaaaatccaagagtcgacggaaacagaaaaagtagaccttcttcacttgaatccggcagatgctggttgctgctgtggaggacatgctggacatcactgttgtgggaaacacagacaccataatacagagcaacaggaaaagtctgaatagcacgcttcaactaaagcgattctgcggaagaaagtactgctaacgcagccgtttggttcaggtgtggaaccacggtgcgatagacaatgatgcatagacgcaccggaaaaggacttgctttgttgccctccgatttatctcactgaagtcacaaaatgcaagggcgggccatcggcgctgtatgccgatggcccgctttcgccccattctgggcagttacttcctgccggccacatagcacacaggcagtacacgccccccgagcagggtgtgttccgtcacccaaaaatcgtgggaggaaagataagcaatgaattccccggcgttccaggcgtggtagacacgaaagccggtccgctccataccccaggtccgcagtctggccaattttccaccggcgtggacaaaggtgggggcaaataaccatcctcccggctttaagactctccgagcttcccgcaaaaccttttccggctccggtaagatatgcagggcattggcaatcaccaccgcgtcaaaggtttccgaggcatacggcagacaggaggcatcccgcactgagaaatgaagccgggaagatccgctccgcttcttggcttccgcgatcatattggaagaggcatcggtggcctcccacagccggacacacggagacaggggaaaggacagctggcctgtgccgcaggccagttccaatacattcatatcccgtgtgagatgcggacgaatgtgattgcagatttctgtatataacggtgcagagcgccgcatgaatttggtgtaatgtgcggccattccctgccagaagtccaagtctgatttcttcatagtgatacgcctctttgcgggttagttattgataactaaagaatactccaaaagtctctgttccacaagccctttttgatggagaaagccgcgttacagaccagacggcccgtaacgcggcttccctgctatgctaaaagttccaacaactgccggatatttttcttgccgaaagatacctgctccccatcattgatgaccaggcagggaacgctcatcacctgatacttctcccgcaggtctgggaagcggttcaggtcatagacctgggcggtgatgtgcggattttccgcagcgatccgctgagccgccgtcaccagctccgggcacatggtacaggagagggagaccagaagctctaacttgatgggcttctggatggactggattgctgctcttgtatcttcatccagagcctgtcccggcccggcggcattgtagaggcccaggacgaaggaggtgaactcgtggccgccggggaccccatggaaagcgaggcccgtccagctcccatccggccggcagacccggacacagggcaggtgttccatctcttcggccgcccctgtctccactgagagcttgctgctctgcgtcgccagttcttccatatactgcttcagttcagccgaaagaggcgtttcgtccagatacagccgcaggatcagaggcgaggacatccgggcgaacaccgtatggagctgggccagcatatcccccgtaaaaagcgtgctgcttgtttcggtggaagccgccgtttctgctgtccggctcaccggagcattgggatggatgccagtcttttcctgcatggcggcgcacaggcgttccagctccgtggcggcaagggcgccgtctcccacggcggtgacgacctgacgcagaggcttgacgcatacatcacccgcggcgtacaggccgtccgcagttgttttttggctccggtctgtgaggatatagccctggtcattcaattcagccaggccgcgcaccagctccgtagccggctcataaccggcaaagacgaacacgccgaaggtttctccgtctgccgcgtggtgcttggtcacttgaccggttttggtattccggtaccggagatagcggagagaagtgtcaccggagacctcctccacctctgtgttggtgaggacggtgatcttctcgtggcttctggctgcgtccgctgttgcctgggcgcaggtgaagtcgtctccccggatgaggatggtcacctggcgggcgtacttggtcaggaacacgctctcctcagccgcagcgaagccgccgcccaccacaaagacatccttcccggtgaagaactcgccgtcgcaggtggcgcagtaagccacgccccgaccgcggaattgctcctcaccctggaagcccaccatgcggggatgggcgccggttgccaggagaatgccgaagcacttcaaatcgccccggccggtgcggacggtctttacatcgccggagagctccagaccagtgacctcggccagcagaaattcagcgccgaagccctccgcctgcttccgcatggtctcggtaagttccgtcccgctggtcctgcccacgccgggatagttcaccacttccgaggtaatggtgatctgcccgccgaagtgatccttctccacgaccaacacccggtagcgggcccgagcaagatagagggcggcggtaagtcctgctggaccgccgccgatgaccacgacatcgtagaaatttgccgtctgctccatggcttaaagctggcccaccaggtccaaactgggcttcagggtctcggcgccgggctgccacttcgccgggcacacctcgtctccgtgctccgccacgaactggcaggcctgcaccttccgcagcagctcgtcggcgttccggcccacattgccggcgttgacctcgtaggccacaatttttccctcggggttgacgatgaagctgccccgctctgccacgccgtcggcttcgatgtagacctcaaaatcctttgccagacaatgcgtgggatcggccagcatgggatactggatcttctggatacgctcggaggcgtcatgccacgccttatggacaaagtgggtatcgcaggaaactgcgtagatctcacagccggccgcctggaactcggcgtacttatttgccaggtcctccagctccgtggggcacacaaaggtgaagtcggcgggatagaagaaaaacacgctccactttcccagtacatccgccttggtaacggcgtgaaaggcgttattctggtagcactggacagagaaatcggcaatttctttttgaatcagggacatagggatacctccattcataatttcactggttagcaataactaactacttgaaattatacaactttcagagagatgcgtcaagcggcgcttgagattttctgaaacaggccgcagcccttgtccatttacatttgtgttgacaagttcaaggtcgaagagtaaaatagcatcgttatataacgatgttatagaggggtgaggcaaaacatggaggaaaattccgccaccaccctggaaaagatccaagaggccgctttggcagagttcctgaagaagggctttttgggcgcctccctgcggcagatcgtgaaaaatgccggtgtcactaccggggccttttacggctacttctccagcaaggaggccctgttcaccgccatcgtagagcctcacgcttctatgctcatgagtcgttttatggaggcccagaccacctttgccgatctgcctgaagaggaacagcctaagcacatgggtgtagagtccagagaccatgttgcttggatggtgggctatatctgccagcaccgggagccagtgaagctgctcctgtgctgcgcggaggggaccagctatgagcacttcgtccacaacatggtggaagtagaggtggagtataccctccggtacatgggggtactacgccgcatgggacgggacatcccacagatgagccgatccctgtgccatatcatcgccagcgggatgttcaacgccatcttcgaggtggtcatccacgatatgccctatgaacaggccctgcgggatgtggagcagctgcaggcgttttatacggctggttggtcaaaactgatgggggaatgatcccctatctttttggaaataggttagtttatgctaacttcgagaaggaggttttttcatgaagcagaagaaaaagagtgatgtggccgtcctgttggactacgcaggcaaccacaagggcctgacctttctgggcctggccctgtcggcggtgtccatgctgctgagcatggcaccctacatctgcatctggctggcagcccgggacctgatcgcggtggcgccggactggacgaaggcgcagagcgtcgcccaatacggctggctggcgttcgcctttgcggtggccggcatcatcctgtattttgcgggattgatgtgtacccatctggctgccttccgcacggccgccaacatccgcaagcagggtgtggcccatgtgatgaaggccccgctgggcttcttcgattccaacgcctccggcctcatccgcgggcggctggacgcggcggcggccgacacggagaccctgctggcccacaacctggcggacatcgtgggcaccatcacgttgttcatcgccatgctggtgatgatgttcatctttgactggaggatgggcgcggcctgcctgctggctgcggtgatctccattgtggccatgttctccatgatgggcggcaacaacgccaagctgatggcggaataccaggcggcccaggaccgtatgaccaaggcaggcaccgagtatgtccgtggcgtcccggtggtcaagatcttccagcagaccgtctattccttcaaggcgttccagcaggccatcgaggattatagtgacaaatccgaatattttcaggccaaggtctgccgggtcccccagtccatcaacctgaccttcaccgagggcgcctttgtgttcctggttccggcggccctgttcctggcgcctagtgccctggccggcaccgccctgggccgcatcgaccaagtcatgggcgctcctgaactgaaaaatccggaccatccgcaaaaacctcagaacagccgtgtggaatttgagaatgtgagctttacttacgacggcgcggagacacccgccctctcccatgtctccttcacagcggagccggggcagaccgtggctctggtggggccctccggcggcggcaagaccaccgccgccagcctgatcccccgcttctgggacgccacctccggtgcggtgaaagtgggcggcgtggatgtacggcagatcgattcccatgtgctcatggatcagatcgcctttgtgttccagaacagccgcctgttcaaagcatccatctttgaaaatgtccgggctgcccgccccaacgccacccgggagcaggtgctctcggcgctgatggccgcccagtgcggggacattctggagaagctgccccagggcatggacaccctgatcggctccgaggggacctatctctccggcggcgagcaacagcgcatcgccctggcccgggccatcttaaaggatgcgcccatcgtggtcctggatgaggccaccgctttcgcggaccccgagaacgaggcgctgatccaaaaggcgttctccgagctgacccggggccgcaccgttatcatgatcgcccaccgcctgtccacggtcgtgggggcggacaagatcctggtgctggaggagggccgtatcgtggaacagggctcccatcaggagctgaccgccgccggcggcctctatgcccggatgtgggcggattacaaccaggcggtccagtggaagatcaccagcgaacagtgagagaggggtgaagaagatgttcggcaaaaactttcaacgcaaatacgcccttaccgaccagggcgtgaaaaacaccaaaaagggcgccttctggacggtcattgtcaatctggtcgtcatgggcggcatgggcatcctgtacctgttcatgaatactttgattgggaccctgacagatggagcgccgctgcccggcccggcgctctttcttgggctggtaatcgcgttcgtcattctgtcctttgtgacccacctgcagcagtaccacgccacttacggcctggtctacaacgaggtgaagtccacccgcctcagcctggcggagcggctgcgcaagctgcccttgggctacttcggcaagcgggatctggcggacctgaccgagaccctcatgggcgatgtgaaccgcatggagcacgtctggtcccatgtgctgggatacctgtacggcgcctacatctccacggccattatcgcggtttgcctgctggtatatgactggcggctgactatcgcctgcctgtggggggtgccggtggccttcggcctgctgttcggcacccggaagatctccgcccgggcctcggagcggacgaaacaggccgcaatccgtgtctccgacggcatccaggaggcgttggaaaacgtccgggagatccgcgccaccaaccaggaggtgcgctatctggccgggctcaaccagaagatcgacgaccatgagaaggtcaccatccagggcgagctgggcaccggcatctttgtcaatgcggccagcgtcatcatgcgcctgggggtcgccaccaccatcctggcgggggccagcctgatcgtctccggacagatcgacttcatgctgctgtttttgttcctgctggtcatcacccgtgtgtacgcccccttcgaccagagcttggccctcattgcagagctgttcgtgtcccaggtgtctgccgaccgcatgaacgaaatctataacacccccaccgccgagggagtggagcgtttccagcccaagggccacgacattgtgttcgaccatgtgggcttcgcctacgacaagaagaaggtactggacggtgtgaactttaccgcccgggagggtgaagtgaccgctctggtggggccctctggctccggcaagagcacctgcgcccggctggccgcccggctgtgggatgttacggagggcaccatccgggtaggcgacgtggacatctccaccgtggacccggaggcgctgctgaccgactactccatggtgttccaggatgtggtgctctttgacgataccgtgatggagaacatccgcctgggcaagcggggcgccaccgacgaagaggtgcgggccgcggcggaggccgctaactgcggggagttcatccgccgactgccccagggctatgacacccccatcggagaaaacggggcgaagctctccggcggggagcggcagcgcatctccattgcccgggcgcttttgaagaacgcccccatcgtcctgctggacgaggccaccgccagcctggatgtggagaacgagaccaaggtgcagggcgccctctcccgcctgctggccggcaagacggtgttggttatcgcccaccggatgcgaaccgtggccggggcggaccacatcgtggtgctggaaaacggtcatgtagccgagcagggaactccggcggagctgatggagcgcggcggcctctaccgccgcatggtggagctccagagcgagagtgcccggtggaagctgaacagcgaagcataagaaaaagtaaaatggcgaagtccggaagtcttttgaacgacagagacttccggacttttgaccgtagaaagaaatgttagagaactattctcctttagttgcagtgtgttatagagattgtaggtgttattcctgaggactctatactgtccatttgtttccctttcggtcaatcaaacgaggaggaaagaaactcaaaaaacagaaataaaaaagagccggggacatcgttaacaaggtccccggctctttcagaaatctttgacaacaaattaggcaattcctatattcagcggcatcatggtcaactgaccggtacgcttggtaaaatcacagcagacgatttcgcagtgtggggatgtcccatgccaatcagcctggtattgtgatgtgtcgatcccgacattaaaatccagttcaatacctgtctgttgctcaaatagacgagcggggcctgtctcccgccagcgcacattatttgtgccactgtaaacaaatggcgcgcttatctgggggatgataaaaacacctgcgtcggcaattgaagcagcagcctcaatgaccatatactcaaactgactgctgctgtaattcctacggtatggagagtggatgcgcccgaatggcggatttgagatggcgcagtcgaaatgcccaagactactgagcagagccggatcgagggcgtcgctgcagatccatgttgcttctggcagaagttgttttccaacatctacataatcttgattgatttcaatgcatgtgatttccacactgcactggttatgattatcgcaagcacgtgccgccatataactgagtatgccgataccagcgcagagatcgatgagtttgacgtggtctttgtaattgagcgggatatgcagcctaaagtcacgggccagtccgtatggtgtaaaaaaggctcctgctgtactattgatatggttggcgtcttcgcggtagtgattaaaaacaaagcgtgtgtcggcttcgctcaattccttgcactgtagcaacttcactgccttctcgtgaagtttggcctgggcttttgtcaatttagccatgctctgcatcctcctcaacagcggaatggaggtattggcgcagcgcaccgactgttttgtcgttgagcaggacggtgccgttgttggggaaacaggcagcctgcttctcggtcatatcttccagtgcctccagaagcccctgtactgtctgctttggtgcaagtttgctgcggactgcatccgcctgtgccgaaggaatataaacattgggcgccaggctgtgccggtggagagccgataaatttacgactgcatagattggatgcgtcccgctgatctgtactccgggcatcggatccgtagcctcgatggccgctccaatctcgttcttcagagccgaaaggaactgctgtgcctgctgctccagagcgagggcttccttgatttgtttgttcatgccaaatcacctcggcctgtggaaatcggcgcctggatcgactcacctgtatcttttctgcagagttgcgccatagcagtatatttctggtccagcaacattcgctccgtctgtctgaaccgtttagcggccgcagtttgagcaaaatagagatgagccttatcctcatcgctcagcaaagaataagcagcgttcagtttggctatgaattgctggtggatttgggtggctttcttactcctcagcgcagaacggtaccgggcgatgcttttatggttgccgaccaactgtgcatactcgcaaagcatacggattacctcgcggtccaggccgggaagcccctccttccgatagacctctgagagactttcgcagtgccaaaagcggtatggctggtcatcattattgctcttggaagtcagatagacattattcttttgcaccgttacggatcgaatcaattctgtacccattatagtatctcctattcatctatttacgtagcggcggatataccacggcaggattcgctcggcggcggccagaaacgccgcatcagtatatggatcaaagagatcctgctcctcgaagattgctttgctgatgtcgtgggcggtctgtccactttggtcatggacggattctgccatcggtgaaccgtgtgttcgcgccacacacctcatagcgtaaagggccaattccttataccagtcaagaggataggagcggaatagatcacactggtcatcaaatgcggagggatcattccgcaaaatctcgcgtagtcggtaatattcctctgccggatacagtgtctcgctagatagcgcacattgacagtccgggaacagatacacgggtaccagaccggcttgattgctctgggagccgatcagataggcgtcatcgccatcggtgtggactgccctgggccagttgtgctccgcctgcaactgagccaactcggcggtttgaaaggattgacggagcggacactccaagcatggtttcttaccttggccagtacaggctggataggggagacccggtacgggggtgaaacaggtgtagtttgtttcaaaaatccggcccccagttgccaatggtgctgcgtaaacaaacagaattttgtcagcataggggccctcgcggcctttgcgcagattgcgcacgataccactgttcccggtctcgctgcgaaaagagtggtaggccgcttgtgcccttaaattggccttgataaactgcgtataggttgccggctcctggaagatgtcccggatttcaggccagtccatatcgcagctgtccagacagcggccacgggcagcatattcgcttctgtctccgctatattcttctgtgatgtatcggcggccatctttacagacaaagattaccctgcgtcttgtcatccctctgactccttcttcattcgcggcgtgtctggccgcgcagattataagttcctttgtcgtatgcgggaattggctgatggaatcagccagattcaactgataagtctccgggtaatggaacagcccatacgagatattggccagaatttctccagtctgaagattaacttggccggaacagtgtccatattcgctggccatcctctcggaggtcctgaacgaaaaaaacctgtaaataggacgatttatggattccatccgcaagcgtctccttttcatgagttgaagtggggcctctctgagcagcactgtgcctgagaaaatggaaaagcggagcatgagtggtgtaaccctgtcctcgtgctccgctttgtgctgttcagtcctgtgccagattaagataaatgcttgaatttaggcattgagtataatcttccaactccagtctgttgcttaacatatgactgggtgtttgagatgtccatcggggaacaaaatgctctgcagatcactggaggccgtgagtggaccgaccggctgcggattatctcccaacttgatttccatgaccgccccgttcgcatagtgcagaaaaatccggtaccccatgtcaaacagttcggtgcggagaaaggcggtctgatctgtgtggatatatggctgtttgtatttcaatagacggcctgtaatataatacccgctgccagtaacgtgtccctttggagaacgtctggggatatcccagtaatcttcgtaccagtggtactccataaaccaaatcctttctggagaacgggctgtgtggacacagaccattctttctccgattaaaaattactacatgtttccacgagttgtagatctcggaaataccggctttgctcatctactttaagcgcatccgtccattcattacggctttcataatcagcggctcttgcgatgaccgcctccatagagcgcatataatagtcgcaggggggaggcaggcttccggagtgcttgcggcggatcacatccatctgatccagcagatgcagggcaagcccgcgatctaaaaccagttcgccggtggtggggccggcttttctgataggctttgagggatgattctcactcattgtttgccgctccatcagcgtgtttttccaagcctagtcgcttgatataggtataggggcagtttggccaatggccaatctcgcactgtaggcaattggtctgtacgcagtgttcctccatgcagttacgacacaatgaggtacccacatagtcgggggaagcgataaaatcaggcggagccatatccgcaggtgatttacggatcagcgggcgtccgcaacgctcacagttctgttcaacccaccggacaggttctgccttgtcatactcgatgggctcaccacagatggaacagaacttccatggcaccgggtttgggcatgtttcagggccattcggcggtggtaacgcatggccgcaggtcccacaccagtatttaggcgcaacattgggccgctcctgtgtaattttagggatcattctcttactcctccttgttcttgtttattccgctttgatcgggcagcgccgcagacaaatcctcggcctgccagtcatacagcaacaggtcacggctgtcgcttcccgagggtagggaggcaggccgaaagcggtaatttgtaaatacaaagccagtaggaatgtgcgtatattggattgcaaggatatggaactcaacacccatccaactggcggcgcctacgatctgctcggtcacatgcctgaaatccagattgaagacccaattttcccagtaacggtgcggatcagcatacgcctcaccgcccggcagggacagcagtttcgctttcatttcctcatagctccgcagtttcggctgctgtcctgcaaatgagtttgcaagagacttttcaaactcattgaaagggacaaatggcctttttccctcaaagtctccgttgccgtccaaggcgatgacccgacctccggcaacaacctcaatgatcacatcctgctggatacggcggtcatttgcataatagtccggtgttgaggtgtaccacactccgcttgcagtgtcacgattgtagtagtaatggggaatatctactgacttgaagacatccttgcagaagcccgaatcctcgaaaaaataggtgacttgaattttcttcattgggtatccccccatcttggctacggattttttgacggctggtaccgcatcagcacctccccctctggcagcgggcagttgggaatccacctcatgtggtccttcacctgccattccggacggcagatgacagttccgacttcatcaaatacattcaaccgaagcgatttccccgtaaggttctgggcagtccggtcaaaagactggaataccgggatatcctccggtgtgtgaagcgtcaccgtcacgccgtccaacagtggcatcagcgcgtccagttgttccggcatagccgtatagaggtagataggcacattggtctgcctccggattgctgcgatggcctcccgaataatctccggatacagcataggttcaccgcctgtgagcatgatgagacgatatggtgtgtagtcctgacagagcgggagagcttggaggtcccaatcccggttgcagcagccgggacagtttcgattgcagtcatcaaaaaggagcagacgcagtttatccttggtcacggctattccacctccttgtccttatcagcgtatgccagacagaccttgacatctgtttcgctgaaatggaatacctcaatcagttcttcttcggtaaaatcaaggtctgacagggtctcgatcacctcgcggacatggccgccagcgtcattgaccatatgatcgatgatatagttggtcaaatccaataggcgttccatcgtaatggcgatgggttggttttcgtcgggcatttccagcacctctttcaaaactcaatgaggtcataaccgctttgcgcagcggcagaacctaaaatattgtggatagcaagttccacaacggaatctgtgtcggggtcatccagaacttgcttgagcctggtcaactccacccggagggcgcgcttttgctccggtgtgagggggcgctccaactgaatcatcacatcagcaaagtcaccgtcgccattgacattcagttctcgaatcagtagcagatttgcgcgggtcatccatagcacctcgtttcttttgtgaattttcagatgaaaacttcttcttatgtgtttttatccgctcctctcttcgcatttatgggattatatataaaaaggcacacgggcatagagcctcgtgtgccttgtggacggaaccgcctaagttagaattgttccaccaatgggccggaaaacaaaaaaactcccaaaggcataaacctctgggagttttaaacacggttactttgtttgctttgggcaaacaacggatactatatgtctgcattatacagggatggatcagaaattgcaagagggaaagtatcgaattggatgtcatggcgcgggaaaactattgccatttgtccatacacagggtataatagtttcaatcagtctcagaaattgctttgagcagtttacagtgaacagtgttacacggtgtctgaaagcctgttggcttttgggcactttttgtttttcagacatgcagcgcagatacaaaggagtggtgggtaccaaactggcatctgtgttgctccgtcatagtcctaactgcgtctcagacaggactgctgtctggctgcgccgggcggaagagttctacatcagcaatctcgaccccacaaagttcgcctacaacagtctcctggaaagcgacttcaagcgttgcgtgttcatcgaccatatactccaccgctgttaaggcatagtcaaaaaacggaatacagatccggtggatatactcggaaaaagcctcgccctcactgatttcctcatagcccttgatggtctcacacatataccgctgaaaatcagcggcgagtttgactgacgaagtttcaccgacgaatagatcgaggaaaatatacccgaaaataatgaagtaccaaaaatataccgggtgttctctggtgataagagagcggaagtctgcttctaaggcgccgcgttgagtggccttctgggcctgctcaagcaaatccaaaacattaaacagtgcatctggatagttggtcacaaactgccatcttctatacagttccgggtttactgtctcaatttgattaaaatactctacaaagtatcccatgatatcttcaccgatatcatacgccagaaattcctctgcgttgaacgtataggagtcccatctatgcatggccgcttcccggacaaatttattgtatattcggataaatcgctccttgtcgctctcttgcagggagtaggcagaacaacccagtgcatcagccagagcaggaaggtttttttccaatggctcccgcgctcctaactcatatttttgataattgctgacggccatccccagtttgttcgccacctgagcctgggtctgcccactgcgctgccgatagtatttgattcggtccatcattcggtccatgactatgcactcccaacatacaaaattgtatgtatagtataacacatacttttttgtatgtcaacagaaaaataaagaacatccgaatatgttttcaaagcggttctgatgctgctctgtttcctgatgccggcccgggattagcctgggccactgtacaagaaatagatcggtttatcggccgctttttttatatagatccccgctgtcattgtggccggggcgtccctgttctgcggtgcgccctgcggcacaccgattatatatagatcacatcaaaaaaggagatatgagaatgccttataatgttgaactttgctacggatattttgaaggcgaatgtggtatttatcacgcatttaggcttgtagccccggagaaagattttcccgacgatgtggagaaatctcttgcggaaagccttgagaccaaagcagacaatccgaatttcaaatgggactgtatgcacctcaatttgccggatgccattgtggaacgcatcaaagcggatggtgtacgggagtatcttactgctcagaaaggtgaacatcaggacatacagcggtctgtggaccagcaaaacgatcatgcgagaggaacttaccagacgaagtatatcagggtgttgggccatgcagaagttacagtttcagtccggatcaaagtcagagatgatgaaacacttagcgagcaggatatatatgccagggctggaaagaaatttggaggcatcatggcctttgtcggcaatggcggcatggataaactcatcggtgttgagggcgaaggggagacaatttcagccgatgaggcgccggtgttcgatgactatatggaggagtgaacagtatgaaagagaataaacaggtgaatcccgctgtttccagctgcactgcagagattgttcaaaaggatggacttgccaagatttcccgcagtcctggtattgctgtacacaactatattgtgggcggcggttggcgaggatgttccaacgagttggacaccgttgtcatgcgggaagccgagttcctgcgggaccactatcacatcaatgttaccatccggtttaattcgaatcggttgagcggcggggcatggctgatcgactccaagaaggacggcatcggcagcaacagcagtatcggcctgggtgccagccttgtgaacagcagactgcgtgcaattttattggaagagaagatgaagatgtccagcgaggaattccggcgactgtgccgcgaaacggattccatgatgttctccacacacatcgacctcaagaaagcagagcactgtgtacccgcagatagtaaatatattcttctggattcagaacaccgggattttacatctttagatgaggcaatctgctatctcaaaacccatgctttcgggttaaaacaggaaaggatttgaggagaaagaacatgaatgaagtcaaaagacaggcgactgagacaatggacgaactgcatcagaccatcccgtactgtagttactgtgcggtgatggatgggctgcaggagatagagactctgcgcgaccgggatgaggaactggagaaactctgggctgagtttggagatgtgccgatgaacccggagaccgaatgtatcgaggccccattcatggggtggggggtcggtattcaccgggaggaaatatggagttggtttgatcagcggtatagcaagggcattgcctacctgctgtacggaggtgccgaggattatgtaccggagacaaagcggctctatggattaaggaagcgctgctttgagtgcgaatctcggtcttgccagttcaatcatgacggagaatgcaggttcgttctggttcatgaacgggagccgcagattacggaagcggacggatgcattgattacgactattcagaagagaatacgtgacgatagatagagatactggtgaacactggtctgatgctatgtgtgaggccggatgcgcacagactatatctggaacaaatctggaggagacatgaaacaattcgatttatttgagtgccagaaagaattggatatccaagcaaagcgggaacaaatgtttcaaaaatggaggctgcttccaccagaacgcctgattctggcgggaactccggacagacgccgacttggcgaagaactggcagatggatactgcatggtctgggaacaggcccttcatcgttgccagggactcccgcccaatcaggagatttggctaaaccacatagagaagcctgagtattgggtcatgaattggaatgatgatccatgtggagagcatattgaaatctgcccattttgccacgccaacctcgcatgtggggagggcgatgcggttctgattaaagccgatgatggttggtggcgcatcctgggcttcatggaagcagagtgatgagcaacaggagcaggaagttggctttccatacaaaaggagtccgcaggttacaagcctgtaccttgcaactgatagaatcccctataatgaatcatcagggaaggaatgcgaatatgaatttttcagaaatcagacacgattatatttggggccccgcagtggaaaacggcgcaaatggtggccatgacctgcttgccgccgtttccatcgatgcttggaagagcgcagacgacaatgaagagggtgaggtcctcgccaatgtgcttctgacagcgcatggcgacatgattgtagactttcacgataatggggtcaggatgcatcaaccggttctggatcacatccgggcagcagaagaaaccctgaagcagatctggcaggaaaaggtttgccagtacagcgggaaaatagtctgtgccacggtactgaccattccgcgcagcgtgatggatcagatcaatgactacctgaacgctgatacagaggatgcctatcagggggaggacaacaccatcacctatacagctcatttccccgatgggaaagaaatggatgtgaagtgctgcggctgccgagacgaatcctcatggacggaggcggttctcttcgataaaaacggtgctgaattgtgctgtagtgaacctgccgatgagtatgacggaacatggaccctggagaatgaaggggtggaatacatcgtctacatcgcagttgagaaataagggcaactaaagttattcagaaaagcagacagggcgggtatctgtacagatacccgccctggtgctctctcagaatggatgcgttaattctcgcttgtatcctgtctgcttcggcgtttctgacgctgaggcgtctttttttgctgcttggcgtccatctcgtagagccatacactaaccggggcgttccaaggctcgtttttgctggggatatttttgatcagactctgggaggtcagccccagacgcttggccaaggcgatatccgcatcgttcaaccggcactttttcttggcattctgccacatctgctcactgtacattgccacacgcccccctgatatacagtattatataatcagtagtaatacaaaaaggatagattattgcgcgccccattcgacaggcatcccactcggctgtattgtactctgcgtcagagtctatcagcagacaggtgaaaaaagagtgcttctcgtaaatttttcaccaatttcgtcacaggtcaagcgacttatgtgtttcgacgacaatgctccaactggggaacgtccatgacttatcacattctgacaaccctacctgtggatatatcctttggtgcctgctctgggtctacaaactggacgccgcctgtaacggcgtatggtgtttccacttaaaaacgctttacagcggtttggtttgtctgtacaataattctataaattggcgtttctaaaggaggagtatcattatgaacaataaatcaatagtaggcgcattgctcatactcgcatcagctgttttattttctgcttccctaatctgctcatcgctttctgctgtcgcaactgctacattaggattcattgccacatctaaaccatcaagtatcacgattttgatatacgtcattagcgcgcttcttgctgcaacgggtttaatattgattctattagactttaaagcaaaacattgatatgtacccaagttttatgccatcgtaagttctagtagctgatcaaatcaacataaatgacagtttctaacttgtaagaaaaagcggcatcatacagagtgcggagtataagaaagcacgcaactatattaaaacaggggggcttttgatcggaagctccccctgttaggctttattatggcgtcccggcggcaaaaatttataaccttacccatacacgatttggataaagtcagcgttcagcttatgacgcaactcgtaaatgatgctggagatacccgtccaactgctgtcgaacgaatcaggatcgacaagttcatagatttccctttgtgaaaacacccgtccgggccgctggacaagcaaatggaacacatcaaactccatagggggcaactctatgattgaccctgccagaacacttgacggcacgcaacatcaatacacaaagccatgcaccgcagggaggcggagggcataaccgtacatatgaacagttttcccgctctatcacccccaatggcctcgacggatcggccgccttttatttgtcctttagccctgattttattttctgaaaactgtcgtcgctgattgcgtgctccatgcggcaggcatcttgctcggcggtcttgggctctacacctgcatccaccagcaggcgggtgaaaaagcagtgcttctcataggttttttcagcaacctctcggcccacatctgtcaggtgcaagaaagagtcttcgtccataatgagaaacccaccctctttcaaagtagagaccgcatgacacacactgggtttcgatacatcaagatgccgggccacatctacggagcgtaccatacctttcttcctctttaggacaaggattgcttccagatagtcttcgccagatgcgtgtaattgtttcatggggagctcctctccatcaagacagactccaaccggcagagttcatacggatatggacgaaatcctgataaataccgggttgtttcatcaactcctcatgagtgccatgctgcgagatccgtccgtcgctgatgaccaaaatctggtcggcgttctggatggtgttcaaacggtgggcgatgaccagcagggtcttaccctttaccagctcagagatggcctcctgaatgtagctctcgttgtcggtgtccacactggcggtcgcctcgtccaaaatgacaatgggagcgtctttcagaatgcagcgggcgatagagatgcgctgtttctcaccgccagagagggttgcgccgccctctcccaccacagtctgaaacccatcgggcagagccatgatgaaatcgtagcagcgggcttttcttgccgcctcatagacctcttcttcggtggcgtctggcttgcccatactgatgttgttgtagatcgtgtcctggaagagatacacgcgctggaagaccatgctgatgtgatccatcaactctgcgagggggacttgccgggtatccacaccccggatggcaacactgccgcttttcacatcccacagccgggccagcagattggcgatggtggacttcccgccgccggagggacccacaagagcggtcatggtattgggcgacatagagaaactgatgtggtgcagcacctccttgtcctggtaggcaaaggccacatcatgaaaccgcacctctggctggccgggctgtgcctgagccggaatatgctgtttccctgtgtccgggagctccggctcatccaatacagcctcaatacgatccagggcggcgttcatcacggtcaggcgggacgcctcgccataaagcgccttgagcggcccgaacaggtcaaagacgaacaggagaacgcccagcacataggccagagaaaggacaccgctccgctccagaaagaccgacaggccaaaaatcgcggcaatcccaattccataaaggacattcagccccatggtccacggggtcatcttccgctcaaaggcgagggatgtatttctggaccgcttgaaattgtcggtcagttcttccgacttctcgcccagcaggttatagctcttgatgaccccgatgccctccacaaaggacagcaccgcgtccgtcagccgttcactctgctcctggcggccagcggcttcccgcagggaaaccttgttcatccctctggaaaccagccacgccagaatggtcacaagggccgcgatcaggcccagctgccaattcagatagaacatgaacgccagcaggaccagggaggacagcaggtagctcatcatgttgcccagcgtgctcatggcgacttcttcaatgaacaccatatcggtgctgaggacagaactgattttgccgatattgccggaggtgaagtagcccatgggcagtttccgcaggtgtccacccagctccatgcgcttcccggcaaacatcaggtagcccgccgcactctggaggctgtcgctgagatagtggaccagcatctgcaccagcacggccgccgcgaggccaaggcccacatagaggcaggtctgcccggtcagtgttccggcggcaaagccgctcaacaccaaaaaggccaggaagatcggcattttagacaggatcgactccacaaacgcgcaggcaaaagcgccctgaatacgccctttatatggaccggcaagtttcaaaatccttgaaaacagtgcaaacatttagtttccctcctttgcggtatgtactttccattcggcgctgtcctgggccgccttccacagcttttgatattccgggcaggactggatcagatcctgatgctttcctgacgcaaccagtttgccgtggtctacgacgcaaatttgatcggcgttcataatcgcgggcagcttatgggcgatgaccaccagagtcttgcccttcaccagctccgcaatcgccgcctccatcttttcctcgttctcgggatcggcgtaggcggtggcctcgtcaagcaccacaataggggcgtccttcaggatggcacgggccagagatatgcgctggcgctgaccgccggagagcatcttacccgcatcgcccgccatggagtgaattccttggggcagcttctccagaaactccatgcactgggccttgcgcgctgcctccaagacctcctcatcggtagcgttcaaccgtccaatgcggatattttccagcagagaggtgttgaacaggtattgatcctgcgccacataggaaatacggctgttcagggcttccaggctcatgtcgcacagcttctgcccgccgatagagatgctgcctttctgcgggtcatagtagtggatcagcagttttgccagagtgctcttgcccgagccggactctcccaccagggccgttttctgtccggccttggccgtaaagctgatgtcgtggagtacctcatcctccaccaccatgggctttccgtccgggccgggctgtgtcttggtgtagccaaaggaaacatggtcataaacgatggtatcgtccttgccgtggaagctgtcaggcgtctgctgaagctccggcgcgtccaaaacctgttccagcgcagaaattttgtagttgagctggggcatggtgggcaggaaacccagggatttgaggagcggcatcccgatgctcagggagaggcacagcaccaaaatcaggtccggcagagccgaccagccggagaggacaaaccacgcccccagcggcagggccaggatcacagtgcagggcaagaggctgctgtaaattgccatccagggccacgctgccttgtaccaggccaatgtataatcccggtaatccgaaacatccttgcgaaaccgctcataggagtccgcgtccttgttgaataccttgacaacctccatgccgttgatgtactcaatgatagtgttgttcatcttctggccggccatatagtagggacccattttcttcatgccaaccgagtacatggtcatcatggcgatcaggctgatggggatggaggccagggacagcagcgccagcttccagtccacgaaaaacatagccacatagaccgcgatggggaccatcaggtttgcgatcccctccggcatagagtgggccagcaggacctccaaactgtccacatcatcgacaaacagctttttgactgtgccggtgcccttgtcctggatcacgcccaggggcagcttctcaaaccgcttttgcagagcggtccgcagccggagcagcgtgtcataggcggccttgtgcgaaagattgagcccccagccatagagaacagcctgcaagaccaggcacaccagcaccaaagccacccgcaggatgagaaacgaagcctcaatttccgctcccatcaccagcggagcaatcacctggtaggccagcacaaagggcaggacgcccatcaaaacgctgaccagcaccaccgctgtggccgcgtagaggccctttttatgcggccccgcgtattcaaataccttttgaaacatgatttacaacctcccatcaatgaaaatactgttccgacagagctttcaatatctgcggcgtgagccggtggttttgaacggccccctggtcgtccagctggaccacctccgtacaggtccggacgataaactcgaagtcgtgggaaaccacaaacacgatcacgccggaagcggacaactgctcaatcagccggctgacccgcaccatggagtcatagtccaggccgctggtgggctcgtcaaaatagatcaccgggctgtccttgacgatggccgcgccaatggtgacccgctgcttctgcccgccggagagggccgccgggtgctgctcccggtattcggacagctccagcgcctccagcgcggcgtccaccttctctttgcagtcctcctgaatccccagggagagttcttcctccacactgctggcaaagagctggtaatccgtgtcctgcatgaccagataggacagcgcccggcgctggcgtggagtgagcttcctgccgtcaaatgtgatctcgccgttccgctgcttcaagaggccggtcaggatggacaagagggtggtcttgcccgctccattatggcccaagatgccgatcacatccccagcgtgggcttcaaagctgacattccgaaagacctcctgctctttcggataagcaaaggaaagaccctgcacactcagcaggtgtttccccatggggcggcgttctttctcctgataatgctctgcatcccgctccggatatgcagtccgcagcccataggatatgcgcgtttcctccggtaaggaacagaactgctcccttgtaaattcctgttcgattttcccgttttgtatgagaaatacccggtcgattaaatcacgcagatagtaaaagcggtgctccaccacaaagatggtgtatccgtcccgcttcaattttcccatgatctccgcaagccgcttggtggccgcgtagtccaaatttgcggagggctcgtcaaagatatagacctttggtgaaagcgcatagaccgagcccacggcgatctgctgcttctctccgctggacagggcaaagatgctccgattaagataatccgtcagttccaaatcttttgcggcttttgcgatacggtcaatggtttcctcacgggggaggcccatattttcgcagccaaaggccagttcccgcgtggtgtccgtcatgaagaactgggagcgcgggtcttgaaacactgttcccacctgtccggccaactgtgagggtttcatttccagcagagagcgcccgtccatcacaaggtcgccctgtatctcaccgggataaaagtgcgggatcagaccgttgagggagcggatcagcgtggtcttgccacaaccacttcgcccggtcaggaggacaaattcgccggtctgcaccgtcatatcaatgccacggagggtaaagtccttgctctcctcatagcgaaagctgaaattctgaaacgagatcatgtcacaccctccacaagatgatttccccgattcgggtctggtccaggaccagcagcgccgccatgaaaaggatgcccagcagggacaccaggatctccggccaagagaaacgaatggggcgcagggcgtaccgtttgcactccagctccagcccccgggtagtgccggaggccgccagctcgtccgtgaccttcaggcaccgcatcagcaggggaattaaaatatactcaatggtggcaagaggatgagatacccgtttccacaaggtatcactgatcccccggatgtccatggtgctgcggatctgccggtattcgatccgcagggtggggatatagcggaacatgaccaccagcgggatcgtcaccgcctggggaagccgcatccgctggagtgctaccatcaggtcgtccatgtaggtagtccgcaaaatccaaaggcccatcatcacaatggggatcagcttcaaaagcgtcacaccgaacacgctcataatcacgctcaataccggcacctgcacataacggagtaaggcgttgagataggcgacgatgatgtaggccgcaatcatcttcaaggcccactttcccccgtttcctacggcgataaacaggccatacaccagcatgagcgcgaggctgaccacctccccggccaaaaagtaactgacaaacccgatacagaccaaaagtaaaatcttgcagcggggatctaacagtgccgatccatgaaggggctgctgttcaatgatttgtttgatttgtgattcttccattccaatgcctccctatccaaatcaaagcgcggggccattttcagccccgcgccctgagatcaggcagcccgcttgcctgcgtttgtctgattgactgccgaggggctgtgccttgttatttgactgaaacgagtccggctttgataaagtgcttcttcaaagccttctgcccaatcacggcgccgatcagtccacccaccaggccggccgcaacgatgaccaccagcatagggacggaggtgatgttcagcatcccgtctatgtactcctgggcaatgttgttcttctccatggcgcccacaaaggcgctctggaggaacttgatggggcagatggcgctgaaggcaaaaatggcgctgaacagggcgtaggccacggtcatggacttcatggtgatttcctttcggcccatgaccagaaaatcgcagatcacgccgccgatcaccaagccgatggggataaaccagaaagcgcccaccagcaggaacaggatggcttggattgcggagcagatagtgaacacaccttttttcggcaccttagccagtaagagcatcatcacgataccattgggaattgcaacaacagatgggtagaacacattggtcactggaccagcaacactcataatggtgctgataatcatgcagatgatccacatgagggcggtcaggacgccgatcaggataaaatctttcgcattcaacttttgtttcatgctttgcctcctctatacaacaatatgcgttgaggttagcaattactaacctcaacgcatattgtatcagttatgcttttctaattcgacccaaaacctacccgtttttacccaaaagcagttgaatgtcactattttgaattgctgaaacgggatgccctgtaatttttgggggcaacaccgtatttcttcttaaaggcggccgcaaaattgcttggctttccataaccgacaatcgtggcgacctcacccacattccgatctccgtccagcagcagttgagccgcctgtatcaggcgttgttcaatgatatattgatggatcggcataccgtaaaaagaggaaaatccacgcgtcagtttggtaaggctcagatgtacctgttgagacagttcttcacaagagggggcgaaggcaagctggctgtcgatgatccgcttcgcctccatgatggcggtccgctctgtccgggacatggaaatatttttacccatcagaatatccaattccagaacttcccccagatagatagacagcagctccaacaacttgccatccaaatagaggtagcccaaccctccgcgatattgagaaaatttgcttatttccgataggacctgctccataacaggggtgacagaaactttggcaatgccatttaggagtttcttttcgtaagccgcaatttcctgcccgtcaaagtaatcggcaaggagttgtgaaaagtagggcgtaggaattttaatgcttttgaatgagaagttgctgtcctttttgtaacaaatatattctgtaccatcatgtccggcataaatacaagactcgtttttctgaatggccatagagcgatgcccattcaaaataccccaggaaattccatcgttcaggcagaatatgatctgcatatattccttgctaacaggtccctgcacattcatatcagagcgataattcatctgccagtctgaaagaatgacaccatgtttgatttttgtttgagaaacccggccttgtccaacctctgaaggaatgtccatagtgattgtctgaggggtattggttattaagtcattataaagtttagcaagatatagattactatgtggcataagccacccctttctaacccaccatagttagtgcctgctaatctaataatacttgattttttcttgatggtcaagagaacttcacaccacgatgttgttgtatattttgctcaaatctgaattggtgatatcggcatagtattgacgtactgccagaattatgttatactaaaaaagttagcagacgctaactagcgcgtagaaacacagtaaaaagtaatagacccattactctaccatcctgtctgagattaagcggtggtacttttattaagaagcggatataaaatcgcaggcataaaataacaaggaagagtcccttgccaaatagaaggatccacttattaagaaatactgatgatgggcctgcgcataggataagcggatcaatccgtagaaaggggcattgctcatcagaatgaagcaatgccctttttccttagagttcttctgtttcgcccaatccgcactctcgctgacgtacatcaagtatggtatccacaatagcagcaatgagcatccgctcctttggtgtacactgcaggattatctgtgccagatgcttgctctcattttccacttcctgttgcggcccatagaagatagcatcggcagatgcccccatagcgcggataatccgcaccattacatcggccttagggattttctcaccgagctcgattgcagccaagtaccgtggagagatatgggcgcgctcggcaatttgctctctggaataaccaagccgttcacgctccgcccgcatttgggtactgcaacctttaaattcatcatttattaccaccggtggttcacctccgaatcacattctatgttgtgcatgaatcggataaaatgctctactggtagtgagaaataagttctaatggttcatagtaggggaaaaggtggagagagaatgaggttggctatgctggtggagtagcagtctgccccgacatattatatcggccgggacatttgaaaaagattgatctggccggtgggcactttgtctgcgttggacatgaacccatggttccaaataatcgacaccaaactgtcaagcattttttgcttggcagtttttatattgtgtggcaaaatcggcgcccactttcggggaaaggagcgaaaggggacgaagaaaccgcctccgcgggtaggggaggaggtgatttgatggagaccacacaggccactcagaaaagagtccgttaccaatttgagatattctgcatgaaggtcatcgacggagagcggtgtgattatctccgaaaactgatgaagaagatggggtgggagtcctcgttttcagatttgccagaagctgtgctgaccagtctctgcacctttgatagcgatccggcagagcagtatatcttccatgtctacgggcatcggattccgattagaaacgaccggctggcggagatcctcctcgcactcggcgatgagggatacagcatcctgctgctgtactactcccttcagctcagagaccgggagatcgcttcgctcctagggctttccagatccaagatacagaaggaccgaaagatcctattcgatgagttgaagaaacggatggtggagtaagatgaaaagaaaaagcagtatcccagaagaaaaactcctgccctatgaaaccatttgcgctgcgaccagaggtgacccggaggcaatggatgaggtgctgcggcactttgacggctacatatcacacaaagccacccgcatcttttacgatgaatatggccagtcctactgtggtgtggatgtagaactaaagcagcgcatccaaaacaaactaattgcccgcatcatggaacggtttaaacctgagtaaacatccccgtagccccgggccgggtatatggtgtgtcccctccatctatccggcctggggatttcatgcgccataaggcaacttgggttgaataatcagcctgctatccgtgaaataggtatagcagatgcgacataattgatgcgttggttctcaacatcctaatgtatggactccaaggaatgggaaataaaattgaaatattaccgttaatgcctgtggggtaggggaaggcagagaatacagttaaagcatattttcaggttataaaagagtatattaactttctaaagaatcgaaagaaaagccaccccaggggtggctttttagtgtgtatcttaggggggagacttccttaactcccatcttccaggtagtcagcgacttatcgcattttttcgggctgatatggccgggacacaaattcggcgcagtcatccgcctcagtgatattgggcggacggtcatggacaagtgagaacctgcagattccatctcggttataggcacaggcacgggactcacagacatcacggttatcaactcctccatgctcaggagtggcttcgccttgtgcatctgtactcaatttttcaaaataaaatgggatccccgcttgaaacgggtagaaggtgaatgtgccatctccccattttcggatggcatggccgccctttgctttgcggaggacaacccgtttagacttcgaaaacagatgggaaatatgactcgcgctgtaccggctttcaaattcaacgagttgcagaatatatgatttcccagtctctttcacatccatgacaatgcggtatgccttgaggatgttttctgcattttccgctttgaaacgcccgagcagggggccggggttactgctgtccatcgtcacggtcctccatttccctatattcgcagtcaaggaattcctcaaagcagggccatatctccgtgttaaatccatactcaaactcccagtcatggaagatggactccagactcagctccggcgactcttttcggagttgttccagttcgtctatgagatctttgagtgtgtacccgtgggcaagcatccattcgagtttgaaccgctcatatgcagcctgtattgcattggtttctggcatttcagcttcctccatagcacgatttggattaaaggtcaggcgcttcgttccgcccttgtgagcctcccggaggtccatgcgcttttgtaggttccgatgcttggtagccgatccagcaggcatttttcaatcccctttagataggcttgatagtgacgggattgaaggccagcgtaactttgacaccatggcggctctttctggatgagttccaccgccagcgaccactcgttgtcctcaaggcagatatagaaaagtgggctctccaagatggcccgctggctgcgggagatccaccgctccgggcggactcgcttgaaactggggaacatctgcagaaagttcgccgtaaagcactccagaatgtcctcctcttccagttccgtggcaaggtcatcatagagccaagtgccatccgtcaattcttcatagtccagatcccgcatcaggcggggctccgggcagtcgtccgacgcggcgtctgccctgcggaatacatggaaatcatcattgtcaatatagtacaggccctcgtagcggccaaacacacagcaattcccgcaccccactgctatccctccattgacgccaattcgtctaagtaggttgcctggagatcggcaatgtggagttgtagcgccagcggacagatcgtataaactttgctggtgttgcggtcggtgaagtcgcccatatggaaccggatggccagcgcctcatcgcgggtaagatgcatatgctcattgatcagaaagaccgatttctcaccgtggccaaagggaaatttctcatctaccgtgtagaacggcacagattccaagtcgtaagcaccgcgtttatcaaacttcgtgccatgatcggagtagaccttctggtctttgaagtccagcttataggactgggtcttacagatgtcatgcagcagggatacaatggcgacggattccacctgtttgggcgggaatagcgcgtccgtgcccaactcattcatacagttgcggcacatgcgctggaaaacattcagggaatgtagcacaaggccgccggcgaaactgttgtggaactttgtgctggcaggcgcctcgaagaaatcggtagccagcaaccggtccaacagcgagtctgagccagttctgtgtatatatttctggtatgcggaaatgaaggtgtcttttgggttcatcataaaaatgctccttttcaaagtcgttttttatatcatcggtgcgccgcagggcgtaccgtaaaaacagggacgccccggccgcagatgcgtctggggagatctatataaaaaaggcatccgaagaatcctctccggacgccttgtgacttcagtatcagattgcatgtggtcaaaaagcaaaaagcgcccaaaggccaatcgcctttagacgctgtgcaacacggatgactataattgccggaagcaatttctgatactgattgacttgattataatgcagatcgcgctaaatagcaatacccttgcaccaaggattgcaattcgggacatactctgctatactgatacaaattgatactaaaaaatatcagaggtgagcaatatggaagcggcgctgtttgcgaagatgatgtcggacaagagcgtgaccgatctaaagaaactgggctataaatatcctcaggcggatatagccgaatttatcggcctgttgaaaactggattttacacaacgctgccgatgaaggacttcaatggagaacctctggtctatctggagagtgtagcccaagtccacctttcggccgccaagatcttgctgacgccgcacaatagcagccagcactatggtatcaaggccatggaggatgaaatcgtatcgaccttgaccatcgagcaaatcgacacctcacgtgacagcgtccggaggatactcactggctatgcgccggccagcgaaactgagaaccgcatttatggaatgaagaaaggggtggagtttatcgcagaccccaaccatcggattacggaggaaaatctccatcagttgtatgagatgacggtaggggactttctggcaggagaagatcgtttgttgccgggcaattactaccgtcacgacagcgtctatgtcgtaggcgacaaagtggagcatatggggctgccttggaagaaactgccggaatatatggcggatttgatcgcctatgcaaatgcagaaggctcagacaatgatttgttgaaagcggcgctgcttcacttctatatcgcttacctgcatccttactttgatggaaatggcaggatggcgcggctgctgcacctgtggtacttagtccaacaggggtattcctccgcgctgttcatcccgttgtccagatatgtggaaaggagcaggaggggttactacgatgcctacacactcacggagcagaatgcccgcatcagtggtgttttggatgtgacgccgtttctggtctatttcattgagcatgtctatcatcagttggaggatgtggcatcttcggcctccgcaataggtgcctttcaagctgtgttggagcggggcggcattacagaaaaggagaaggacctgtggcattttgtcctctcggcctatggcaatggcgagttctccacaaaacagttggagcgtgacttcggtaatgccgcatatgccactatcctcagttttgtcctaaagtttgaggaactcggacttctacagtctcaaaagtatggcaaccgggtcaaatacagcctccgacagtgcggctgatcataagcgtattttctttgaggcaataagcagattttcacactctaataaaagaaaaatgcggggtatcaggatatgagtcataaactatattcttcggatttccagcacccggatacaggcgtgttaatccacttcgttttggatgaggatgcggaactcctttggctggagccttgtgaggccacctgtgaacaaagagaacgtgttgagtctgaatatcaggaaacctctgtatggtgtaaactgttgggagaacatacctgcagttcggtcgcggaggcgaaccggctcatacagtccagatactcaaaatatctggcgaaaaacggctgcttcccgacggactgattcagtaatggcagcgttgataattggaagtgcgcgagcgattctactttctgcttgcaatctctggagtattccgatataattcaaacatacagtatccgttgttcgtcgaagacgagcacagtaaccgtgtttcaaagcacccggaagccgcaagggcttttgggtgctttttgcgtttcaacaacgcagattgattgaggacagtatgttcacaaggcgcatgaggtatttcagcccatgtgcctttttatatagattttccctgcggaaggcgccgcaaaataagaaggggggacaataaatgaggttttcaaaaaagaagcgagagggggacagttttatataagccaaattctgtattttgatatgagaaagaactgccgccccctggccccgtgcaagcatagagctgggttatctgggaaaggagtactactatgagccacacaaccgagcaacctgtactggagccatcaaacccacagggactccgcatcggcgacatctgcagctattccttcggcgaaaagaacagatcctactcaattgttgagattgtcaggatcctggataacccatatggagttgcggaagtgaaattccttgatgtggtcgtggacgacagtgggaatggttacttcacctacctgctgaagacgaaaaagaccatgaacgcaagtctcaagtacctgaaaagggtatgcaacgaagatgaggcaaggtgaaagccgctgagcaacagagacaccatgcacattgataggaaagtcgcctatatgacggcttaaagtatagagaggcggatatgtttcgcccctctattttattggtacagaattggaggaacaaccatgagatattacagtacacagcgcccggtcgggccggggacattcccgaaattgccggaaaacaaagttttggaggtccataacttcgatgccaagactttctgcgaggaaatcggccgggaggcatgggggtatattgattttgagtcgcctcttacccaggagcaggccgacaactatgaactgatcgcccctggcgttggctgtacaggctgtgtcaatgagacggcaagccgcgatatggactgctgctggaactgcagcaggaaccggcgttccaagaaagacctgtataggcgcaggccagcagggggatgcagtcgtgatcgactatgcaaagatcctcacggaactggaagaagaacgggccgcctgccagtacgtatacggcggcatgatcccggcgttctatacgcaggcgcttcacagggccattgaagccgtcaaggaatgccaggactgcgcggcggaggccgggcgcatggctaaggaggtatcccggcatgacatggcgtgacgaaatcgacatggagatccgccggcaggccatacggctctacccggactgtgccgccctgtttgaactgccccgcagagtctacgcacagatcatgcaggacaacagcatgaggagaaagccctaccgggtgagcgaggtgaagatcaggaagatcattgctacaatgccagaatttcagtgagagggtggagcgcgacatgtatcaaagagtttccactgaggagttcttcaaagtgatagggccgcttaatgtaacccttgagatcagaggaaattatccgtataagaccctgtttcgtttgaaacagggtggaaagctggtcggatttgagggacacgagagatattacctgaatgtggaggataccagatcatgaaccaatatagggaacttctccagaagcatcaacaggaagtcaacgtactcccaatccgctatgcgtttggagagcagcaatttcgggagatgatgaatgcctggggccttgacccggagaaagacctcgacaaaatttacaggcttggagatgcaggcggtttctatctgagaactgatgcgcggcttgtctgtgataccttctgcaggcttaaagaagagcgggaagccgccattgcagaggacaagaccggggatggctttatctatcagatgttcctctgcgagttgtccaaccacgaatacaactataccgaggatgtggaagaaacgctggacgcacttgggtacacatgggagcagatcatggcagataaaaggctcctgcatggactcaaaatggcgcagaagaagatcacagggcagggataatggcatgtattgtagttgccatacggtatggacggagagaccggtactgtaaatgtggtcctgctgattgccagaaccaaagttatcaatcactttgccggcgaatatttctttctgagcaatttctatacctgccgtgtggcattttacggcatgtgattcccatcagtagaagccgctttccaagcggcaaagtgtgcggccccaacgaccgggtgcaatttctgcacttggcggccaaccaggcgaagaggcgcgggcgtcagatcaagatgcgtccagattgggaggaccgcaaactgaccatcatgcacaacctgctcgtccataagttcaacgaaaaccttgaactgatccccaaactgctggataccggcggcgcggtgctggtggagggcaatacttggcatgataattattggggatgctgcagctgccccggtgcggaggcaatcgcggacggaacaatctgggacgcctgctgatgcagctgcgcgccgactatacggagtctatcaggaggtgagtaaggatgcagtactgtatgacaatggagcagaccaggcgcatagccgttttcttcgactcagacgatgatgaggcggcgatagaaaaagccaatcagatattgaaggaaacaccatctgaagattatgaatctggggacaaagaatatgattatgctctttgcaacgtggataccgagaggaccatcctcgattgggattaaagagtatggacaaaggaacggcgaaaccaagctgaacatggctgcagcataatgtttacaatgtagaaaggatggatcacatgaagcgtggaatcagcgttacccgtgattacgactaccataataccccatgtgttgtcatcacaaaaaagcgtgggaaactgacgatccctgagattaccgatatcctgcattatgaagaccaacagcgatggagtggccgttatgcccttctcctcgactgtacagaggtaacaatgggaggtaacggttgcctggatatgatggatgaacggcccggagatgctgtggtgctctacgaactggaggagggtgagccctgtccggtatgtaatgcctcattgccgccgttccaatactgccccacatgcggcagtgcgtgggcggagaacggaacgaatattgaaacccacttagctgacatgcagcaggaggcaagccggagcatcaaaaatccggacgcttcagaggcatcacgcttggcgtggtactggtcgcacatcggctctattgacctcgcccggcagttgggcctcatttcagaaaagcgtcggcaggaactctatgaagagatgcggccgctcaaaccggccataacagttcctgtggatacagaaggggtgaacaggcatgaataagtccaatgagatcatccagatcaccagttccgtgctggagcggtatcgcagttccatcccccgaaaggcatttgccgaggcgatggagcgtgtcattgagttagtgctggggccgggagaatgtccggcaacatcagactgtcccgggcttgttatgctccggtcgccgaatatggaggtagagcatatggcacagctgatctgcggtgcctgtccgccgttcccgcttgagtctggcgatttcacatgtgacaagtacaattgtaaatcgtgctgggaagcctggctgacaactggcaaacctccgcaagaagaaatggaggccgtagggtgaagccattccagaataccgctctgcttcggccgttgaccatcgaggaattacggttggaggatccggagtgggtggatgatcacaccattaccttctatatcccctgttggttccatgtggattccgtttttgcaggcattcatgtggaaacggatcaaaatgatgactacatcaacctctactgcatttacgacacccgggtacagagcgtccgtctgtccatgatctatgtcaataacagcgcaaagaatggggagcaggactttgaacttgaggtggagatcgatgcgacaacttcgaaactccttctgaatcaggctgttgaatggctccaggcagaaaaagcgtattgagaactcagtttttgcctggaccatagatgcaaccagtgctgtgcggagtatagggatatctccatgctccgcacagcattcaggatattccgaataaccagatttgggagaaatcagaccatgtacaacgagaaaacaaagaagatgaggtatgtgcttaaaatcggccagctgaccaccacctacgacaactttgacgattttgtcgaggctctccgtgaggaggccgaggaccgcgaattcaatcggcatatcgacctctacgtcaaagtcaccaatttattgtaatgttggataggcgttttctgccatcgcagagatatccgttgacaatgaaaaaaggagggaaatcttttatgattctcagccccaaatggcaacagacctatgaagaagctctgcaggccatgaaagatactacttactcccaatattcccttgcggatgtatctactcaccatcatacagaggaactgttagaagccgcgctccgtaacaaccggtgcagtctgcgcgatattcctgtggaaaaacgcacactgaggctttgtcatgttgcgcttgagtgttgccactcgataaatgttcagtatattccaaagaaatattttgattataatttttcgttaaaagcggctagttactgccccgccacattgagtacgattctctatttcttccgcgatgggcggtggaaggaaccctacacagcagaagacatacgtatcattgcagaggcagcctgtccggttggtcttggacaagtccgtctcaaccaattccgcaataaagaacaagagttgaatgggcgcacattcgaacgatattgctctgacgaatacggatttgtacatcgggctcattcacatatcatccggcaggctttggaactttacctccacgatgctgaaaataaaaagcatttgacaacggaggcccctcttgcaatcggtggataatccggctataataaaattatatagtatccgttgtttaccacaggtgaacatagtagccgtgtttcaaaactcccagggatcatgtgatctttgggagttttttgttttcggccatatataggccgtccatatggatcaggccaatcaggcaccaagcgcatggatcaagaacagatccatgcgtttgtttttatatagtcccaagcagaacactgaaaaatttataggagatgtattacaatgttgaaaatgctgaatgcacacaacgcgatgcgaactgttcttgaaaaccgtcgaattacgctggagttggcgctccggcaactggcgcaaacggtgggcggccaggctcctgatcaagaggaaattgccgcattctttcatgatttcatggatgggtactgggatgcctttgaagaggcgacttcccatgattccgatgatctgagagaaatcgacagacagatcctacaactgcaggaagaaatctcgcgggctttggggccggaacatcaggatgtgctcagccagtatgaatgccttgcaaacagccgtatgaccaaggagttggaccatgcttttttaattggctaccagaccgccatcaggctccttttaatgggtgtcctgccattgccggctcttgtagccgataatagcacaggcgaagaaaacgggaggtgcaacgacaataaaacctgattggattatccactacattctcagtgagaggccgagcagccatacgcatggtctcaaccgatacggcagtttggaactggaacttaatttgcccgtagtgcagaaaaaagcggccatgatactcaatctggtgggtatagagattgcggaaaaaggaaagcgataccattctggtgaccgggaggatgatgtgttcacacttccgtgctatctgttcgaaacaagtcccgcagtgccggatgcttactttaagcgtgtgctgcgggttctgatctgcgatccggacgggaaatatccctgggaggatgggtgtgatcccggctacgccgcacaactcagcggcggcgagaaacgggaaatggcgcggatataccagcaacggtattgccagatacagaactgataacgatgagcaaaccgtatgtaatccaacaaatatatttggggctgggcgtgtgatagtgcatcccagtcccgagccttttattagggaggagtccatgaatcataacaaagaatttaccagtctactcgcgcagactgctgaaatcacccgcggcaggatccacaggcgtgaggtctatcgggattttatcgactactgcgcattaaacatttctgttcagactgaccacgtacatcaggaacggaagacatccttggacaaactgctgaagcggtataaggaagaagaacggaccgcgtttgcacacacatttcgggaactcgctcacactgttgtaaggaatgtggaaggtggcatctatgaggatctgctgggctcgacttactgtgagttcggcgcagacaatcgcgcactaaagcaggatttcactccgcaggatgtggcaaggctgctggcgaaaatcacaaccatcggcaaccattatgaactgccctctgaggggttctttacactaaatgaccctaacagcggtagtgggatattgttgcttgcagcggtggaagaagcaataagaaatgggctcaatccatccgagcagcttgtcattcaggcatctgattgtgacattgcctgtgcgcaaatgacctacatccacctttcgctctatgggattcccgctgttgttgtccaaggggattgcatctccatgaaagaatatagccgctggtacacgccagtctatctctggagaaaatgggtatggcgtgctccaatgtcctttggcaccagaaggaacccaagtgatgaacaactcaaaatgttgacggagccgatgtatgcgcaatgccggaaactggatcagtttttcaggaaggaggtgagccagcgtggagcatgaacttgttttttggctggaagtttcctttcagaacgggccaccgcgcatcgaggctgtccaggcccgggataaacttgacgcgcatagggcggttgctcaaaagtatggggcgcagtatgcaggatctggcatcctggggaatacaccgcagagcaaattgatctatatcgcatcaccctatgccggggacatcgcggggaacacacagtttgctattcagtgctgccaatttgccatccaacggggttatacgccagtcgcctcccatctcatctacccgcagatacttgacgatacgatcccagagcagcgggaactgggtctcacattaggatatcaccttttggcggcctgcagcgagatgtgggtctgcggagagcgtatcagcgacggcatggcaaaagaaatccaccatgcggagaggctgggaattaacatccggtatatccgaaaaattgaggaaagttgagggggaataggaaatgagcgagcgatttgcagaacaacatggggcccaaggcggacgcaccaccggagtgaatcgctgtgcgtcttccggcacagagcgccaaggtcaactggctacgatccgggaggtcctggaactgctccggaacggcggcgcagacttcacggatctggaaccaattcggacacggtatcgacagcagtttggcgatgaacggtgtcaggtctgtcctgtctgccataatggctatctgggcgttgtgttcctgcccgtacaagagggcacactctgtctgccgtatgacgctgttaccagcgatatgatggagcagtttgtgctggatgaagcgcatctgctggactgtgaggagtgcggccaactcttacaagaactgaacacccagtatgcttccctctctacagaactagagacaattcatgcaaaattaaagggggacacctcgggcaggaaggaaaagagtcatctggagtctgttttggaagaagtaaataaatatgtgtttgaggcaggccactgtgtctccgttcagaggccaatcaacgacataagcagagaactggtgcaggcgatggcagaggcgtatgagacgccagtttatcttgggacctatgagagcgaccaactgactccctacacaggccagcagatctgcaatttccaatacaacttctgcgtgcctgtagacagcaaggagttaaaatgccggctccgcttcgggattcatagcgcaatggaattcgagggtttctatcagctgctgatatccctgggcggccatatcttattttggcggtagaacaaattgggcggtccaccgaacattcggtgggccgcctatcagcgtaccgcaaaagaggtgtccgtataactgagaagcaccggaacatggtttgcggtattgtcggtgacggttggaaaccaacaccggatagtacgaaagggcggtgcagagaaccggtgagcaaagctgctttaatacgaaccgctgtcatgttcgacgcagaggcatttctttagactgaaaaaaggagagatactgtgcaaaaattaacgatcctaaaaaaggtacgaggtgttatgactcggttcgaacctttgacagaggaattcatttcagcacagtctgaggatggattaacctactcagaattatctgctgtgctttcctcctatggactggatatcaggaaggtggtccatgacccaacaagacaaatattcaacacctattacgcagactacgatcaaggcaaatatgcagctatttttctgcagcgtcaatacatccaagatactgggcaggcagagttacgcgccttgaccaagtatggtgggatctgccctgaactagcagctggagaatggaagagtttttatttgaaatgcgtaccgatggtcatgctgatttatgactttcagcggagataccgcgatattcctcgggagcaggtgttttccatctggcatgatatttataagcgaattgactatgcgaatgatatgtggccgccggaggtgttggaatatgtgtttcaatacgcaccgcccactccgctgcctcggcctgatgcagacggccgtatcacaatctaccgcggcatgggcacacagtctctgccgcccgagcgggcgatctcttggagcagtcacccgggaaatgcactctggtttgccaatcgttctgggcaggggacccgcattgcagtagcccatgtcaaatcagaacagattatcgcctattttcctgggtattcaatggaaaatgaggtggttgttctgccgggtaccatatcggactatgggtatgaggatatgatccctgccgcaaaagagactgtccctcaaattctggccccaacactggcggagtttcagtattatggaaagcaggcacggttgctgggctaccaagaggaggcattattccaagttcatggcctgaagcatatcctgcgggtgctgctgctctcgcttatttacattcacaatgcaggggatcctttgagcgaggcggaccggcaaatcctgatttatttcagcctactccatgacatcggacggacaacggatgaccgggatgatagccatggggaacagtctgttgctctgatccgtaaaaagggaatccgcttgcgtggaattcggttaagtcgaaaagaataccgaatcgcggaactggtgatcacccaccactgccacgatgacatcactggtgttgcggcgattatgtctgagcctggactctcacgtaaggagaaagagcgggtgattcacctatactacatctgcaaggatatggatggtttggatcgtgttcggttcaatggtttggactatcgtatgctgcgcacagcgtatgccaagcggctgccgctggtcgctggctgtctgctggaagaagatattctggcggcgttggatatggagataccagagtcgtaaataggaatagcgcgggggtccgaacaggtcccccgcgctatttttgcgttcatttggtgcaaatacaaatgattgcaaaccggcctcaatcgcataccgtatgataaaaggcttcgatctcttggagatcagtggtgcggcgatggataggcagcgagttccaagtaatatcgtggtatcgctccggctgggtgtccctgagacggctgtcgatgatggacacgatcccggtgtcgctgaaattacggatcagtctgccgattccctgcttgagtttaataatcatttctggaacccggacatccatcatggcgtccttggcaatggaggccttatactcaataataggatcgggtaccgggaatggcaggcggaagatgacaagattggatagactcttgccctcaatgctgattccctcccaataggccccagtccccagaaggacagaattaacatcatttcggaacgcctgcagaacacgttcttgggaggcaccgttttgctgaatgagaattttgtatggaagatttctgctttgaagcgctgcatagacttcttccatatccgtcttggcggtaaacagcaccagagccttcccctgagatatattaaggacctgaataagccgctcaacacccttctcaatgaacgcctcatgatcccgcgttgggtggggcagatcatcgcagaaatagatcatggcatgctcatcataggggtaaggagaaggatggggctcagacaagataccagttcggcccacaggaaatccggtgttgtgcaggaagtaggcgtattgattttctaatggcccgcctactgctgaagtcagtgtggcagaggtcaggatgactcggattttactgctgaaatagagttttttcagaatgtctttggtgtttttggggcagaaagacaaatccgcggtctggcctcggcgttccagccacaataactgcctgtcaaaatctgacgccagttctttgaatgactgtgtagcggcgtccaactcgtcggcgccagatgaactgtcacctctgcgataatccctgctgccaaagacctggacggaactggacaatttttgcagttgcctggaaactgctcggattaagtcaactgcaccatcctcatcgcggaaaaagaaacggtcggcatatttcatgtcacgggccggctgcgtaatctgcatacgcatctgcgagttcaagttgctataaagggcacgaacggaacagaccacatcatccgcgtcctcaaggataaattcccgctcctcgcctcgaactgattttactgcggaattgattgcgtggatcaactggcgctccccaaaccgctctgtggttgcgcttcgcaccttatcctccagattgtgggcctcgtcaaccaccacaaactgaaccagatcgcttagcaggccaccttggtcacggctccgcttgaataggtgcgccgtcaacaaatcctgattgcacaggataataccgtttgtaaatttcagttcgtcacggagtctggcatattgacactgcgatgagaacgggcaaccaagacaggcacggcggctgtatcgtacaatattgattttctcccagacattggctgggatcgggggagagaaagcgcgacggtcttggcagccctcaacaatcttctgtttcagccgagcaaactgctggccttccggggaagcaaaataatcgttggcccgcagttgacagacatagtgtgtttggcctttggccaaaagcacatcgggtgtgacattgagcataggactaagcctctttatgtcatccatcaactgttcctgcagtgcgattgtagatgtggcaatgataactgggaggcctgttttcttattatatagaagcaaaggaaccaggtacgcgaatgacttcccaatccctacaccagcttcaactgcgaagtggtaatttccgcggacggcgtccaaaattgcaaacgccatatcctgctggccttcccgggcttccagtccatatttatctggagcctcatcccagaaaaaagctgacacgaattcactgatttcgtagataatagagtcccatttctgcttttgattctcatttgtacggaagatagaaagataactcacaggcaggtttcctctctgcgcccaattgacatgaaactattatagcacaatttgaaaagaatgaaagtggcgattctctttaggcgttgcagacagagacgggcatccttggcaaaattcgccatccaatgatgtaaatatgcttgctgcatggcgacataaaaagagcgggggccgactggcaccccgcttagcaatttaggccgatgcaatgtaaatgcagaattctggtcacaatacccgtatcacaaattttattgggacccgtcgtgagtgttttggggcttgttgaatcgcgtacatctacagtgaccgtatgggtcactggtcctaagccagtaactatcgacttggacaatgcggccgcaattccgacacaagcacttccaccggacatcgtggcttcgaatgtgcggatttgtcacacgcccgatgacaaggagatacccaaattcctgaccagtcaggtcatacttgactggagactgagagcaaccgcaggactttgttttcccattgcgaaggctggaagataaaacagaaaccgtattaccacacttacattggcaaatccattttatgcggctgccgggtgccgtttcatccctgcgtagcactttcaggcgtccaaaagtttgacctgtcagatcaatcagggagggggagcgctggtgtttgagacagccacatgaccttgtgccgttaggccgcatgaggcgggtggatgatacagttgtcaaattaccacactcacattggcacagccacgttgggcgtccggccttctgatcttctactcttttgataactgtcaatttcccgaatgtttggccggtaagatccttgaattttcccatggttctacctctttgttcgtagaatggaatgtggatatagatgagaggcgcagacttgattcggtatctatgccacagagatctggcgggtcatagagattctgcatgattatcaccctggttataactgccgtaatagacagtgtcttcctctgtggagcaatagacgccgatgcacaattcctgccccagttctttttcaggattgtgttcaacgaagcagactcgctcgttttcaccatctgcttgcacgaggtcaatgttgatgcaagggtattcgtcctcagagcatattttgacctggagtacagtgccatttggcatgataagagtgtctgcgggggtcttggctgtttccgctaccggctcaaacgcaaccgggataaaactggcggcagaacaaaggaaaaattggttttccaactgtactacgtcgcccacggacagactgcggctggtcatcggatttgggcggtcatctcggttatagagacaatagaactgctctaagatataggatgtgcgcaattgaggctccttgggtagcataccgcggatctcaatctctccgctgaacacaggcatataatactgtgacgggacaggaccggagaagggctgctcacagtcatacatctttataagtagcccgtgctcgtgcagagaagcaaacggtgcctggaaaagcgcgatttgaacatgctccactgattcagaaatgtcaccagtctggcccgcgctatatggaaattcaggcgtagaacaaccagtttcctgccgctcagccaagcaactgcgacagatatcgccaccgataaaatcactggatgcctgataatgaccagatccctcaggatgctcccaggttagcatagcaccacagattttgcaaaatacaatgtttgggccttttgtgatgttttccattataaatcaaacctccaattttgattgtgcgcatgtattttcgtcagttatcggtgtttttgcaagcatattcgttttttcgcgcacgggccgtatcccaataaggcagatatttcacaccgctcagcgtcaaatagaagcagttgctggtaagaccatcgtcgatctctacaatttcccctattttgaccatgacccccaaaagttcagatgcaccttttcgcttcgccatggaaaagaatgctgaaggagtcaagtttactgtcccagataaccgcacggcgtactggtacccgtcgggaggcgatttgcgtttgagtagggtgtgcaagtaccatgtgtttgcgtccttgaaatcataaacacgaaattcacatggcttttttagttttggacaccaatttggcgggtagattttgggatcttttttcttaaacatacggtatttctttccggctgtgcaatactgctgaccaaactgcagcacgatatacccttcctgacggggttcgcccttgagataagtcaaccgatgcgggcaccttgaacagtggaatctctgaatcccttttgtacccatattagacaccgcctttattgtctttctgcttttcagaaggaccggaggtgccatgattgcattccggcgttggaaaaggaactcctacagcgagttttttcgtgtcatagaggtagatgggctggatcacccagtcccaattacccgcagaaccagcattgagccaggcagaggatcgggaggcttcaaactcgttgctgctgatttgaccgttgccgttatcaaaggcggtcagcacatcgtcatactccaagcggccgtgggtacataagtcctgcaacatggactcaatggcctgccgctgggttggataaagagacggctgtaagaattcccggtcactgacacattgcaactgataaaagatcaggcagcactcgccggggacccaaccattcggctgacgcatatagtgttccagtctgacatggggatctttgccgttcaggcatgtaccaaagatggagaaaccgaggcggttgggcaggaaggctttgttattgctgctgaccgcgtaggtgcggtcgagttgtgtataactgggattttcgaacggaccaaagtcagagaacgtgatcagcccatccagatgatatcgtggatgatttgcctcatgtgcggaaaaaatctgcgccaagtcgagatatttcatggtaccagtcctttcatttttagatgatctgaggcttttataatgaacgggccttgcggcccggagcaaagggaatgcttccgagccggaagcaaatctatataaaaaagtgagcagggatagggatatcccgctcactttgttgccagtgttggcaaaaaacaaaaatgccatcgcccccagggtgatggcatggatgaaacacggtgtactttgccatatggcacagatactgatatttataatataacgcattcaagcacaaaaagcaatcctcgctcgatatggagaggtaatcggataaggcttgcatttcatcttgtggtcaggtataataatgccataaagtatccgttgactgtatctacagtcatcagtagtcgtgtttcaaagcgcctaaaggcagacttgcctttgggcgcttttttatatatatgggccttcgggccacaaggaggggcgccgaggtgcgtccctcttttcatttcttgtgagggggggtgaatgatttggaaactgagccgaacgcagtgaaaggcaaaaagcagtcagataaaactatctttgtcgtggtcgaagacgggcgtgtccaagaagtatacgcctgtgcatccttgaccggtgtcgaggttgagattctggacaaggatgatgccaaggtatctgaagatgccgcatggcgctccacgctccagcgcatcgctgaggtagcggagcaatacacacaaatctattgatgagggatcagggaaagcctgcacagaacaggagttcctacagatgttggctgatgccggcatcgaagcccgaacagtcggagaccatacagagcacaatcattgcgggagtatccgagtagcggatgctcccgcagtctattagtaaggagaatggctatggatatcagagcattgttgaagcagggcagttcgctggaagaattggagcagtctctattggatttggactcggaatttgacttcaaatgccgccattgcggcaagtgttgtaaaaaccaagataccgttttgtttactgcccgagatatctacaatatcgcaaagaaacttggtaagaccacagagcatgtcatccaggagtgcggagaggtatcgattggatattcgtcccggattccgctggtccatatggtgccaattggcccgcaacgtcgttgtccattgctacgggatgatggacgctgcagtgtccatgactgcaagcctacagcctgcgcactgtttcctgtagggcgtgtcgcatccattgaaggtgttttggacaaaaacatggaggtcacaaaagattgcgtcaaggttcgctatgtgctcaatgactttaattgtgggtcagcaaaaaggcataacacaatccgcagttggttggctaggtttcagataccggaagaggatgattttttccttgaatggacagtagtaaccgcaaatctaagtgtgatggtgaataaaatggaaaatctccattttccatcgagaacgcttgagatggtgtggaacatcatctttagccttctctatgttaactatgacacgggaaaagagtttatgccccagtttgaatcggcagcggaacagctcaacgcactgtgcagaaaattttggagtttggaagcggaagaaactgaggacagttccatcgacaaaccgaaaatgccggatttattataaaatggaaacgagtgatctgatatggagaatgacagcaaaaccatgtccgcagataattggggtcaaatcattcgaaaagatgcaagaggttgctttgtggagatcaaaaatgactgtttccatctggaaaaagtccatctgcaatttgtatcctatgatacgtcactgccgaaaggtagccgatacaccagtaatatcaatatctacattgatgtgccagaatttctcgcattgactcaggaggctgcctccggcaccctgcatatgcggatgcagcaatataagcaggaaaaaaagcaggagccgctatatgaacatctgggcggcacctcggcaaaacagctggccaagtacggcaaatctcggtcagacgggaagagcctgtcccgggtcgtaaaactgacgatctcaagcaagtccgactactttctcactgcggatagcggaccaggggaggagaacaaaaccggactgattgtccccaagtttggggcaaaccctgaacagcatgtttctgtgatcctcagttggcgccagctcaacgaactactgctgaccacggcggagcactaccgcgcctggctctctgccaaatacactgcggagtggggggcaatccatgggccacggatcaatgagcgagagaaaaagtcgtctggacggtcaaaagcacaggcaccgccgcagccagcacaagactctgcatcgaggaaaccaccggagcagccggtgccgccggcacagccacctcagtcggtacagccagcacggcaagtaggatttgcgagtgtatttggcagtatttatggcagtggaactggcaagtctggcgcgggtgacaggcggatgttttgatgttataatcataatatctactcctatgttaagcgacggacagcgattacgctggaaatcaaattggaagaaggagtcggtattatgaaattctgtccctattgcggcgcttcccttgtaggaggcgccgcctctttttgcgccgagtgcggtaaacaaatcccagtacatggggcaaaaagcacatccatgcctccgcttcggaaacatcgctctataggagcagaaaagcggcagggctcccaccccgcatcgaagcacccaccaaaacagaaaaagaaccctatggatatcaactatgatgggtactataacgatgtcaagcccattgacgctgggcagcaaagagaccgtttggatccggagttgattaagaaggtcatcttattggtggcaggggcgcttggagtcatcctgctggccattgcatttatggcactgttgtaaaaaggaccccactcttgtgtaatagggcaaacgcaaataaagatggggtgaataacatgatgtacttatccaagggattagccgttcagaaatcaaccgaagaatttcgagtgtcccactgcggaaaagtttttgctttggggccggagatggcgagactatggacaaatgcccagcaggcacccaaggaggtgcctgccgggaaagagaactacatccggagattggagcagtccggcttggccgccaccacgaaggagcggggggatctggcacattaccggctcctgtccggctgtattatctgtccggaactcgattcggataccaaaccagtacagacgggttatgacggtcgcatttggacttggattgaacaggcaggactgcggctgaccgccagcgaattgatccggctggaggagcagggcacaaagccggtgcctgcgctgctgggagaacagggccgccaggaactcactgagcaaatctattcttctaaagagttgatctgggatggaacgcttgaatcagagatggaatggtccccggcacgggacgcccttgtgatgtcgttgctccgtctcctgcgcatgggcaggctttttttggtgtagaggaggaaatgggtgtgaaacaggatgcttgtaatatcccacttgcacttcagcaccagatgctgatacaggcggcgctttctgtgctgacacttgtgttggctgccctggcgatgcttttcttttccataacagtctccgtaccgttcctgttgtgtgcggttttactggcattcagtgccttccgactttataacatcgggcgacgcgggcagtatcttgtgctcgaaggcacggtgttgaagttagagcgtacgccgttgcgtctgcggcctaaggcgatgttgatggaagtcgaggggaaagctctgctggtcgtacttcgcaaccggcatatctcagtgcgagagggagatgcactaactctttatattgcagataccgcgccgctttatgagtggcgtggtatccatcggctgcattcctatctggccgttgtgccagcgatacggggaaaggtgacgtaacaggtatgatctatcatatcttcaactaccgcatccaggggaagtggtaccgggatagcgccacctattcagaagcacagtttgagcggatcatggaggcattggactggaaactgccggtccatatgcagatataccactatgggagtcctgaccgaaaatactacgatctgacgaatgcgatagtagtcaagcggccggttctttcgcttgatccaatggctttagcggtttctccacaggaaaaacgtacttctgtatatgataagcagcgggaaatcagttggccggtggttcacaggctggggcgttttctgatttgccagcctgacgatgattggccaaggttttgctatgccgatggagatcggttcagtctgattaccccgatggatattactccggtgtctatcaaggaagcgatggaatttgttcgccagaaccatcgccactgttccgccccgcaagggcataaattctccatcggcctagttgccggcgacggagcgagaattggcgttgccattgccagtattccaaaggcaagagcgctaaacgatggacgtacattagagttgaatcgaatatgttgtgaccctgtgtaccgccacgccgccagcaaactctgcgcagctaccattcgtgtagggaaggagatgggataccatcggtttgtgacctatacgctgccgcaggaatcaggaagcagtttgcgggcagtcgggtttctgcgggatgggctcacatcggcccggccattggggtggaattgccgtaaccgcccgcggcgaactcctgaaaagtatcccacaggcgtgaagattcgatggattctggaaacaggatagaggaacatgcgcgggagaatattgacctttactatttgccgtgatataatcaagtcaatagtaaccgtgttttcgttgagaaatcaaagttcccgtgttgcacagtgccagatagcgcgattgcgctgtttggcacttttttgttttctacccgtaaaacacgggtttgaaataaaatcgtttgaatgcagggcatgacctgcggaaaggagaaaaaacaccatgatgaagatctttatttcagatgccgttgtgtccaaaggatatgacggcgcaccggcgatccgcttcttcaatagcgagaacggcggcgagtttgctgttttccaagtcggaaaccgcaaatatgatagccgtgaggagaacaatcaccggtgggtcaacctgaagatcaaggcttttggtgagatctgtgaacgcatcaaaaagatgaaactcaaagaaggatcggtcgtcacaatatttggtgactatgacgaggagcgctggacagacaaggaaagcaaggaaaaacgctccagtccggttatcaatttggatgacatccagtattcctacagtggaagcggccagaaaaaagggcagaacggcggagcgcaggatggaaccggacaaggcacgcagcaggactacccaactgggcagtcccagccgtcatcctatcctgcaactggacagtctcaaccgccggcggcccctcctgcttcgtctggtgccatgcctcaaggctttacgggctacgagagtttcagtggcgggaacaatccctatttcccaggctgagtatgcaactggcagagccaataaaatataactataagcgtcaaagagcgcacatgaagtcggaaccatccactccatgtgcgctcttttttgcattttaggaggggtggggctgaataaccggttatttcggaagaaaagcgcaaagagcaaagccaagaaactggagatggttctgcgccggctgacccgcggtacaatgactgtggagcagacacggcaattgcagtccgttctgggatacagacggcagtatcagatgcaggtatgctcctctaaacagactttcaggagtgcggtagctccatctcaagacgttgaggagaaaaagatggttcttacactcttggatggcaaagagaccactgaaaatgcgctgctggcaacactcgtctgtcggcaagtcctagggaagatagagagcacggtatatttctatctgccaaaacagaaggaggtaatgcgggatgacccgcgagcaaaagaagcaaaagagaaatgaggtgctgacgatcatggggctgatggcgctgctggtatttaccacccggctgtggccgattctgctgttgatgatgatcggcgtatttgcctatgcgctatggctgctgttccatctggaaaagcaacccgaaccgccatcgccgctgcttttgggtctgcctgcaccagtttcggaggaaacggtactggccgacgcattttcgctactgcagaggcggatcactgagcagatcgttgcccggtaccctgacgccaaatggatttgggcagcagcagatgcccgggagcgttttgaaaagggcggagaactgattatcctgctcaaccgcgccggaggctatcgaatggcaatggttctggtaaaccacttgcagttttgcggccttgactatacggcagcggagcaaacgccaccgcctgtacctgagacagaactggaatcagaggaggatgatgcgccgaagccacggcaggaaactgtagattatggactcttagcatttgaatgggtggacgcaaatctgcaaaatctgaatgcacagtgcaatgaggtaattgcgcaaggcaaagacaccttccgcatttttgccagccaactgccccacggtgatagttggccgctcatctgcaaggaattgctgcgcaacggatttgcctcagctgagcctctggcggatggcattcaggtacaaatcaaaataaaataaggagcgtgatctcaatgagttcaaaactgttttccttttccagacccttacccgagccttttgataaggtcaagcggaaggtcaaggtatcctccaagtatggagatgggacggagtccacgctctgctgcactgtggctaaggcggtcttggcctatttcaagtgtaagtatggcgtagaacccggcgccgttgggctctgcggttccaaaggcgtggcggaatataagtctgattccggccctgatgactaccatttggccgtctacgagcctgcttctggctccgtccttgccagtctctataacaaggatacggagatgatcgaaacctacgctattcggaataatggtcgggatggcgcggcggttctcatggcgatgctcccggccctgatggtggatgacgagttcaaagagcacctgatggaactcgaaaaacaatatcaactgggattccctgatatcaatcagtcgacgaatgatctggccattctctgtgataacgcctaccggcgggtcagcgatagcagttgcggtgcgcatctgccggtcaatatcgacgggtcggggaacctgatgcgggtttccactactcatattgatgcggggaacttccggccggacagcgtgctggctggtatgttcacaattctggccacttccagcgctcccgtaaaattggagattaaggaggccacgccgcacagcgatttcattggcaaatatgtcttgaatccggcacgcattcttacgcctcatgaacaggcgcttgtacctgttttggagccttggtatgtgttgccggaggaggtcattacgatctgtaaacacgcgaaagcatctactgggcggtcgttgcccatgcgaaacttcctgctgcgcggccctgctggtacaggaaagacagagggggcccgggcaattgcggccgggctgaacctgccgtatatgaagtacacctgctctgccggcacggagatatttgaccttgtcggacaggtgtttcctgacacagatggaccttctactggcgatgctgacttggaccaacagcgggaacagctcaaagagatgggcggaattacctatgagaatgtgaaaaaactcatggggttgcccgatttggatgacatggactatgaccccgccggcacataccagaaactctccggcatggaaaagcccgatgcaacgtcacaggactgtatgagccttgttatggagatggtcaccaataaactgcaacaactgtgcaaagtgcagccggagtcatccgacggcaggcagacctttacctacatcgaaacggacttcatccgtgcgctcaagcatggatatttagtagaactgcaggagcccaccacgattattcagcctggtgtgttggttggcctcaactctcttttagagcaaaaagggtccattaccctgccaaccggcgaggtgatccatcgtcatccggacgcagtggttgtggtgactaccaatgtcagttacgagggctgccgcggcgtaaaccaatcggttcttgaccgcatgaatctcactcaggatatcgaattgccggagccggaaatcatggcgcagcgcgccatgagcattaccggctgtgaagatgatgtcctggtcggacgcatggtacaggtggtatgcgatatggccgactattgccggaaaaatgggatctcagacggcaattgtggtatgcgcagtctcatcgactggatcatgagtacagagattacaggggacccctatacctcggcgcgctataccatcgtgagcaaggccacatcggatgaagaagaccggtccgcactgcttaccactgtgttggagccgattttcgcacccaaacaaaagaaggcagtttgatcgaaagaaaaaaggaaaggaggaccgctactcttggcaagagtgagtcataagaaaatcaagcagttgattgcacagaagcagtcgaaaatcactgaccgccagttttttacctcgcgtatcctggccaatcacttcgcggatattgccgccgcacagacacggcggtacggctatcggcgcagggtaaagtgcagcatcatctggaagcccaagaatccgagcctggcctgtacggataatgccctgatccagatcaatgccggcaatcctcaggtgacacggcagaaggggcggcaggcgcggtacgaacaagtctgcggactattcgcccatgaacttgggcatgtactctatacggactttcttgcatcgcagtcctatcacagttttcaagagatcggcaggtggttcccggagaatccgcccctgcgaaatgctgcagagcgagatgcggaagcggatttgttagcctaccagaaagcagatccaaagaatgtcggcctgttggggagaatatcccatgacatcctgaacgtcctggaggatggctatatcgaaaatcggatgctgatggactaccccggcatcttgggcagcagtctgcgggcgtggcgcaaaaacagactcgaaaattttcctaccattgaggatatgatcgaccgcgaggaggatggcgggcatatctggatgaccatccgaaacgccatgttatcctatatgctctggggtgaactcaagtatggtgggacgccactttctgatgagcgtatacaggtggtgttctctcttctgagcgagttggatacggctttggccagccgggactacaaggacagatgccgcactgccaatctgatcctgatccggtgctggtcctatatcaaggacttcatggagttctgtaaggaccaggcagaagacaccgcgcctggcggcagtggttccggagattctgataacctgctgagcaaactcctctcttctctcatggggggcagtgaggagggatccggcgacacggccccggtggatgctggcagcacatcgtccagtcctggcggaacagcgactggtcagcagcgcgctgcaactgcagcgttagccgccagttccaacgacagtgaggaaaacgaaggcgaggatgcccaaactggctctggcgctggcgaagaacctgagtccgaggaggaaacagagacttcggccggcggcgcagcaggggaaacagacgacagtgatcagagcgcgggcgacgagacggcagtacagttgggcggcggtccaacaccctcacaccagaaggtatcagaccaggaaggcggtcgcatccctctacaggaaaccagcgaggtgtccgctccagagggcggtacctcagagcgggatgacgactatgagggttcaggctatacgggagcagctgctgatattgagaggctgctcaaccgtatcgccgaggacagcgttaccactgacttagagcgccagcgtactgaggaactgacggaactcgctcagagcatctcctatggggatatccacgatggcgtcaataagacggtacaccgcattgcttctgtcagcgatgacatgaaagagaagtaccagtccattgccggtgaattgctgcacatttccaggcaattacaaaagtccgtcttgcagcagatgcaggacagccggcgtgggggaaaacagacaagtttgctgatgggacggcgtttggactctcacgcactgttccggacagattcacgtgtgttctataaaaatgcgctccccaacgaaatgcctgcgctgtgcgtaggactgctgttggacgagtctggtagcatgtcctggaatgatcgggccacctatgccagatcaacagcaatcattctgtacgatttctgtcaggcactgggcattcccatcaccgtgtatggacattccacctccgaccgcgttgatttatactcctatgcggagtttgaggccattgatcgggatgaccggtaccggatgatggatatttcggctcggggcagcaaccgcgacggagcagcgcttcgctatgtggcggaaaaactagtgcgtcggccagaggatatcaagttgctgatgttggtgtctgatggacaacccgcagattataattactatgggaccgcagcagaggaagatctgcgcgggatcaagcatgagtaccagcgcaaagggattatcttcgttgcggcggccattggggcagacaaggagaacatcgagcgcatctacggcgatgcttatttggacatcaccgacctcacaaaactgccgatcaaattggccggcatcattaagcagtttatccgcttttaaccacagtaaggagtgggctgcataacgtagcgctccttaaccttactttatgcaggaggtgcagtaaaatgatggctgaaaaggaaatgcgcaatcaattcaggtctgccatcacggccgccacagtctgttgccgcatgccggtgagcgatgaaacaagcagcatcacacaatacttgaagtcgctgctggacacggcactcgacggtgccgggctctatgcggatgtgatgccgctcccataccagccgtgtagcaaactaccagttgtgattgcgttggacggaaaaaatccgcggctgctttggtattacaaagggatgtctacaccggcgctggcagatgaactgtattggctgttctgcgatcttccgctggtcactgggcaaatttctgcgtaatttacacggctgaaacggccaatagcaaggaacaatcaaatctgtttacaacagttgcagggcaaggcctttccaggccttgccctgcccatttaaggaaggagcgtcaacatggatgccattactagaaataacatctttatagagaatatggaactgatcaaccggacaatgcaccgtcatcggctgttgctgtttgcactgcatctggaccgcgacgatgtctatcaggaactggctattgccgcactgcgggccatcgaatctttcgaccccagtcggtccaattctatcaaagtccatatctgggcaaaactgcagtacgctattttggacattaaggagaggcacaagccgcatggcttagctgcgtttgaccgttttggcaccagtgtctggtcgctggaactggcagaggaatatggattctctttagtagaggcatctttcgaggagcagcaggatagtgaactgcacctgcggcaggcgctgtcccggctagagcctcaagagcggcaagccatcgttctctatctggacggcaaaagaccggtgagaagggctgagaaatgcagttttcagacggcgctggacaaactgcgggactactatcttgctgtgcagtatgcaccacaagccaatcagtgatgagggtatagaaagatgagttattacacaacaggttcgggctctatcatgttgcggattccttccgataccgcacggcgacagttatacgatgatttgctgggcagatatgaccggctctgcagcgaggaaatgagccaatgtggtgagcagatggcaaaaagtgtccaaggagaatatcaaaggcgaaaatgccaaatgaaacgctacgatgatccgctttggtggctgacaaccgtgttgaacgatgtcggctttgtcgaacttgagcgtggcatggagacggacgatttcttcatcgaaatgacctatagcggtaactatgacgagcgtacggttatggatgtgttggacatgcttgtgccctatacgcaagaaggctgcatttcctatatcggtgaagacaatacttactggcgacaccaatttgttgatggagtgtgggttaaactgcgtgggcagatttgttatgagacacccgaacaatgccgctgccagaccttcccgcaaacacacgctaacctagagcggttgatttctgaaatcaggcgtcatgcgatctatgataacaggccttatgagaagaaagctcgtgtgttgttggaagcgtatgatcaaatggatcctgacggcgtattgctggctctgacaggccgcaggctttatgagcatgaggctgccgcaggtctctggaaggaggacaaacaggaggataaaccgtgaggaggtgtgtcaatgatcccgcctgggctgtttccacagcccaggcgaccggtatgtgcgaggcctgtctcggctgcacagcccaggcgcaaaaagaggagaaagaccggtggaatcttggctttttctgtatgggaaatgggatcactgtctgcaaccgggtgggggtaggcagtgagtggcctatggtggcgcatatccggtataaccgtgaggtaaacctctactgttgggtcccggatactgagttagagagaattcggcacatggccgccacaacggagcatatcgacaacggcgagttgtatagcccggagactacgccgccgcctattgaaccgcaggaggtagttgtcatcaaaaattattaaattaaggaggttgctcaaatgaagagcgaaacaaatcctaagactgtgatgctgaaggattacatcattgatatggatagcgtatcagcgaaagtcaccattgactatgaggttgtgctcgaaaacaacactgatttcatcgtcaagcggcgaacactgaagaccgaccgtgaactggtggttttggtcagcaaaggcatcttctacatcaaagattgcaaaaccgatcatgttgacccgctcacagagaccaacctgtcttccttcctgcgggacctgaaggagaggtgtatcacactccatcaggtgcattggctccacacggtattccgtgagtctgtagacttcattatgaatgtgatcaccgatgagaaactgatggatatgtgtcgccacaatgtgctggtgagtacacattacccgcactggtatgtgccgttttgggagcagaacagcaagcttttcatgcgcctatataacatgttccccaatatgtctgaccggaaaaaatatcagccaagcattccggtcattttctggatcgagcggcatcacggcgcgaacgaggcgatgtacttcgctgagaaattggttcagtccggcattacagaactgaatttttccagtcactacaccaactactatgataacaacgcgatatcatccaaggagatagtatcatttaagacaatcatggaatctccctacaacattaacctgcgccggtttatcgactatatcctatttgatctatatgcccagggctactcctcagtggaacgcacgtttttcaaagagtatatggattatctgcagatgcagcagggcttttacgggaaagtcaaggagaaatacccggcgcatttcaaaacagagcacgatattatggccctgaaagtcaatcaggcgaaactgatcgctacatgcgaaaacttttctgaacaaagcgaggcgatcaaggatctggcctacactgggagcaaatacagtattgtgattcccactaaacctgaggaactggcagaagaaggtatcaatctaagtcactgtgtcggacagtatatcgaacgtgtggccaatggtgagtgccatatcctgttcctgcggtaccgcgatattccggaagagtcgctagtcactctgcaattaagcggcaagcaaatttgccaggctcaaggtatgaaccggcgtccgctcaccactcaggaataccgttttctcaaacagtgggggcgggaaaaggaaattgagattgctgtatgagcagcaaataaactttgaatacgaaagcgagaaatggttatgaaagcaatcagcatcggctctcggtatgagatttacgatgacacactcaaggcctatgacggcctcccggcccagacctatacggtctgttttagccaaatgacgggctttttcctgaaggtgcgtccggaccttgtggtcaaggaaccggtctatggcgttcacccggaaaaagcggagaaagtgctccggtccttcaaggtattccaacggaacctgggcgtgatcctgagcggcgataagggcatcggcaaatcactcttcgcacgcctcctgtctgccaaagctgtggaggcgggatacccagttatcattgtcgatcaggctttcccgggcattgcgtcttacattgagtccattgaacaggaggttgtattcctgtttgacgagtttgacaaaacctttggtagcaatcatgattccgatccacaatccacatttctgagcctgtttgacggcacatcgcaggggaaaaaactctttattatcacctgcaacagcctgcatgggctcaatgactatatggtgaaccggccgggccgcttccattatcacttccgcttcggctatcctacgggggaagagatccggcagtatcttacggataaactagacggtcaataccagaacgagattgagaaggtaattcgtttctccaacaaagtttccctgaactatgactgcctgcgatccattgcatttgaacttcgctccggtgagtcgtttgaagccgccattcaggacttgaatatcatcaacacccatgacgagcagtataatctcacgctttacctcaaggatggaggcattgtgtctgcagaaaatcagcgccttgacctgttcagcagggatactaagtgtgtctatatgcgagatatgaaagggcgctatgcggttgaagttgaatttgatatttcggagagtatttacgaccccagccgtaattccactgtattgccgggagaagccatcatcgtacatgatgatcccgaagataacgctgaaaaacaggattatgtcccggattacatgacaattacccgtgcggtggggcgcaatattcactatctgacggcttgatatagccgcatggagagaggagcaggggattccctgctccctttccctattcaaaatgaatagtctgcaataaaaagtcgacaggaggcacaagaaagtgaagcaggaaaaaccgatgtgctggtgctgcgtgtggcgggatattactggacccgacaacgatccgacgctggggtgcggacatacttccgcacaaatccgacgcagatttgaaggctcatcaacagccgagtactgcaaggagtatctggaggatgaccctgaattgaaactcaagattgaccgcattaccagagagacactgatgaagaacatccaccagttggttgtgaccgatggacactatgccgcggcggaggccattgtggactacttcaacccggaacggtacgatactccgcaggagatcagctgcgatgacttttatttcattgcccaggtgaactggggcggaaatgaggggatctatctcgactgctatgctgttgggcgtatccgcccggatgggccgcagaaggactggcatcttggcacctacaagacgctggagacttctttaacagctatgcagaccttgggtgccctgggcggtgcgctgacctactatgcgcgggaatacatctggaagaataatacgctgtttctcagtgagcaggaactgcgcgccaggaaactcaaagaaacacaaagagccattcagaaggaggaccaaaaatgagttatagtacatggcataactacggatacgggattcgtgtggacgatatcaaggagcagagcgtagagcggctgcaggcgctgctgaaactggcgccggaactggatcagaagattcgtgcctggttatcggagttagatattgcagaaccagactgggatgactatatggattttgaccaggtctactatctgggccttgccacgattttacagcaggtcattgaggaggcggaaggcctacgtctgactgcctgtgatgattccagtggtgcgacttatctcatctatcagccctgctacccctgggaaatcacagatagagaacgagatctgaccgaggaaagcctggtccagatgttcagccgttatgtcaacgttttgtccgatgaaccgattgaggtcggttcgcaagatgtgaaaaacggcggttgatataggccgctgtaacagggaatcaaggagaatggagcgatattatgcgcaataaaaagaatgacgcaaatgggttttatctctgtatttcggatctggtggtcgacggtgtgctgatgtgtactgccgggaaaagatacagaatccaggatgccgagtctggtcctggggaagcaccggcagaagtggcaggatactgcgacatctttggatgtgaaaatagcggagtgtgtatggcaacatggctggatgtcggagaacacttccggacagatgatgaacggtaagaccggaactcgcggtggtcgggatattctcgcgcaggaagaactgtttgtctctgatgagatagagtatccggcccctaaaggtttagccaagactgtacaacaggaaaaagcaagcagctgctgcgatgcagacacagagcgggtatctgcgctgcgtctctactgtaaaaaaggaggaaatcatgacattcaaagaacggttccaggctagagagtgttccttcaacatgatcgaagattggattgaactctggcatacgtgggacatcaagatggcgcttccagccttcttaggcctatcagaggaagaatacggcgttctgctggtcgaaggctatgatgcgttggcccgtcggctgaatacagatgcggaaacccactatatggcagtccatttggaatgggaagacctggagaatcaattaaatgaactgattcggtcactgttgtccgccgcatatacggttcatatgaaacgaagcgatttttattactgggatatagtccttcacaaaaacggtgagatcagcgagaaagacagcgaatatatctgtgaacgccttgatttgagggacattagcacagaccattttctgtatagtgacagcattgaccagaaccaggcctgcggcctgctggaaaagttgtttggccgtgagatcgtgtccagccatgcggatgacgagggagtttggtttttccataagccgctctacgcctcaagccggagctgggttgcccagcacgtcggccgctttgaacagcggttaaacatggagattgggaacaggcactatccggcaacaactgcggaaaccgctgcacaccagttatatggatttgtgacggcactgaaagaactgggtatggtaagagagcatgaatatcccataacgctcgaccattttaccaagcgtcccaatagccaaccggatcaggcaaatagttaaatgaatcgggcgcaagggggcttcctttgcgcccaatccgtctaagaacaagataaggagagatcagttgtgaaatgtagattttgtgatgggcaggtatttgtgggccatcaggtctgccatctggatattctagtggatgattccggtgcatttcttgataatatgcccggcggtgccgaggcatccatctatgaaagcaacacaccttttggaccatttcagtgctgcggctgcggcgctgtctacgatgagctgaaagatggacaaaaggaaacgtccggtcccatcgaaggatggaaatggcctggagatagcccggaagacgcagatataaaggggctcatcgttctgacgatgatccgggagcggccctgtgaaaacgagatctgggccgataacctgtttgtcctcgttgaaaaagaggcattccaggaaagcaactcccaatttgtctccactgaaacatttgtgatgcagaccctgcgcagtcgggtccaaacctggctggcgaccccggatggatggcggagcaactgctgtgcatccagagattataactggggggatctgatcaatgacctgccttctgagcatatccaggtatttttcactcgggatgaagccaaagactatgacattttggactccgtcagtgtgcgcgtagcccaggatgaattgctggctcctgataatgtgccggcgtctcttgtgctggtatatagagacggccacaccgacattttgggggttgttgtggattttcaggacgggagcatctcctccaacaactttttcaaggaaacggaagttgtggagggctatatccaaatggcagatggtagcaggttaaactgcgatccagaaaacgattttcggtctattgcggaagtgtgaggatgcagtacggctatgatccgaggctatttgacatctctcggatcccaacctgggatgggtttgttcaggcgtggaaaatatcattattaaagcccagcacaactgcgtgtccgaccgtaggacctacggcggccgtttcatccccatcgtccatgaatatgttctgctgctgcggaaagaaacgccgctagtcatcccatttttgatgacctaccgtgtgaatagcgatattcgggatatgcccggcgccacatggcgggatatcattgccgacatactggaagattgcaatggccgcgcaccgctggaagagatttaccggcgtgtggaaggacataagcgggcgcagagccagcagtggtggaaggaaaaggtgcggcagaccctgcagatcaatccccgaaccttcgaaaaggcagatcgtggcatatggtgtttagttaaacacgcatgaaccggcagaaatacaacaacgaagagtggaggttttatatcaatggagtattttgaattgcgaaataaactctttttccctgtgaggcggaaactgatcaacgactatcaaatggggacgctagacttcgaaagatgcgaacagttagtgaacgatctcattctaaaaattggacagtatatggacactggggtgccgcaagacgagagtatggcgattgtatttgcggaatttcaagacacgattcaggaactgcggccactgacaaagggatatgaaatcacttgtgatacaaacgagcaatttcacataccccacgcactctatgtctgtgtgtttagagatttggtagggacagaatttgcagatgaaagttatgctacaaaattggctgaacgtgacggggtcaaactcatattcgggatgccacaagtgccggatgggctttacttggataccgaacagaaccgtgagatcatccagaaatacttagcacacaagacgcctacaacagggcgatcagactctattgatgaagcggcagggagaaggtgcacaataaaaagcaaggaagaactcctcattgaggaagcaaatgcactggattctctcttcatgagcatgaaaatcgaagatatcagtattgaaataagggataatcaacttgttgcctttgattctgacgggaacaagtgggtggaaaatgaaatcttcgactttgcgctgaacgagtgccttacttttggcgctgatgggcatctaattgacggctattgtatcaatgaagaactcttggatcaaatcctacactatgcggctcaaagagatgtcaaaatcgagaggatacccttgtaattgtggcagatatgaagatgagaaaatgaaactaagtcacagaaggccgatatcattaggaggcttcggatgaaaagagaactgtcgattaaagacgaactgcgtgcaatccagtccggagaacttacatgcagcccggagaaactggctgcatgtgccgcatactgccggaaacggcttgatatgctgcgcaggtcactggaaagtcagtcggttccagcggcttacattgagcaggtgcaagccaatatccatagtttttctgattttcttggttgggcggaggcgcaaaagccggacacgggtatttcagcctatagtgctgagccgaagaagtcttaacagggtagtgtatgcgcaggcgtggttataagcgtgttgacgaaaaggtctgagaatgatataattcaactatacagtatcagagccatgccgaaggcgtgcatagtttacagtgttccaaagtgccatttgcagaaatgcagatggcactttttttgttttttggccatttcattatcggcatagacagcgttcccaaaagggaacgctgtttttgcatatcaggaagttccggctacaaaaagaaaggagaacaaaaccatggtgaaatcttgttgtgacagctatcacacccagttcagcgcattcccggacatgctcagttaccacgagaagatccgaactgacagccgctgggagcgcaccgaggtcaaaaatctggaggtggcggcgctggataaggcatcgcccctgttcaacgacacgaccagtttcgattcctctgtctcccgtgatgcaatcgaggacacggcagagaatctgaaattggccatcaaagtcaaggacaaattcttcccgctgcgcgataccgcttataagagcctgctggaccgggcgaaagtcggcggttctgcactacccaaactcccgcgtgaaaaacttgcggagttgatcaattcctgcctggcgctccataaggacagcgccctgttgctcgtccgcgatgagaaggtctcggccgctcattccggagatacccgtgactactccgtgttggagatcgatcagttactggacggcttacagagcaagatggacgagcggttcccgggcaaccagttttccggcggttatgtagatcattccattacaagcgcctcatggacactgcctgaccaaaagacagagttgctggatacctacacaaaattgttggcggcagaggggaagaccgctatggccgccaagttgatgcctggtatccgcttttctacatcggacaccggggtggcctcggcaaaggtttcggcgttgctggtggggttacagtaccccatccatattggcggtatgatttccgtggaacaccgccggcagtccaaggtccctgacttcgtggagagccttgatatgctgttcgctcagtttggggactcggttgccagattgagcggcctgctgtctatccacctagatcacccggtcaatgccatgacggccatctgcaaacgcctagcgctgccgaaaaaggcggcgatggaggccatcgacatgttcgagatggcgattggggaagacagcgccactgcccatgatgtgtttgtagccatgcaggaaatcccctttatcctcaagacccaggggacgccggagagcaaactgttggccctgcaggaaaatatggcccgggcactcacgctcaaatggcgtgactatgactatgcccgggaggtgaagtggtaatggctgcacctaatattctgtgcgactgcacaggtatgtcgagaacgcgatggctggaatgcagggcgcacggtcctaagggagatattgagtataccgttggcggcagcgatgttgccgttatcttcggtttgtcgccgtggacgacacccctggaactttggatgatcaaaaaggggcgcatgaagccgaagccgcccccgaaccccgaccaactggctatgggacatatgttggagccgattgcagcgtacttttacgccaggaggacgggtaatgtcgtcacggatgacaactatctctatcagcatgcttatctgaaatacgctctcgccaatattgaccggcgctacacgcggaagaatgacggcgaaggcggtgttttggagtgcaaatccctgacatatcacaaggcagaagactgggctgacggagctatcccaatctactacgaaattcagcttcgctactatcttgcggtattggatgaaaagcacggggctttcgcggcgctttggggcaacaacccggagcacgacttggccatgccccacatcgagcgggaacagggcaaagaggatatcatttttgagaagttggaccggtggatctggagtttgcgtcatgatcagcctccgactatggaggatgtgaagccgaagctggctatggaggccctggcgcgaatttacggtgccagtcaaaaaggactgcccacaattgaatttccgcaaaaatttgaatcacgtctgcggaaaatcgcgagtcttcaagcggaaaatgtggagttaaaaagtgcaatcaagaaaaatgaggaggctataaaagcacacagcgtgcgagttgcagaactgatgaagaatcatgagcatgggatccttaccacaaccacggataagctgttagtggattttgtgaccgaggtaaccaagcgcgtgagctcggactatctcaaaaaagaacatccggacatctatcaagaggcgctgaaagcatcaaagagccgcaaggtcaaggtgaccatccagcctgtatgacgatgggcggcgcagggtgtgcttatgtgtagagcagccctgcgcttatacaaaaaacgggcaaggccgtctttacggagcaaaatatgtcttttggatcggggtattctgtgagaggatttcaagatactccgattccgctataaggaggaatcaattcatgaaatgcagtttcagccgcctgctctacccgaagacagtggaggaggcgcgggacggcagttatatgatcgcactgttcaggccccatgaaaaggtactggacgcacaaggaaacagactttccagcatcaaggtggtggggcactacctgcctaccgtttctagtgtaaaggtcgatatggctggacattggaagaaagatgccagatacggacttcagtttgagatggagtcttatgaggaactggttgaatccagtaaggccgggattgtgtcctacctctcgtcggggatgatacctggcatcgggaaaaaattggccgaaagaatctacgatactttcggggagcagtccctggaggtattagaccgtgatcctacacggatcgaggaggtatccggcatcagtcaaaagaaaagagaccagttctgtgacgcctatatggaaacccgcagcgcccgcaaattgatcaatatgcttgccccctttgatatcagcgcgatgcaggccatccatctgaggaggcaactgggtctcgatgcgcagacattactggctcagtttccatacatggtatttgagcgtgatctgattgattttgaaacagcagacaggctggcgcaggccaacgggatcccgatggatgcgccggaacggctggatgccggcttgctctgtacgctgaaacaagcagaatccagcgggcatctgtccatgcacaaggaacgccttgtgcagagggcggtcaatttactccgcgcaccggcagtgacgtggaaggctgttgcccagcgggcatttgaaatgctcaaagacaatcggcttgcgatttaccgcgaccatgtctatcgccctatcatagcacaggctgagaacgatgtggctgtacaggtctgcgagatgctgcaccgggacaaattgccctatatgggcgacctggatgacgagattgatgcccagcagaaagagatggggttcaccttcgctcaggagcagaggaacgccatcaagacttcgctgacatcgccgatttgcatcatttccggaggtccgggtacggggaagacctccatccagcgggcaattctcaatatctatcacgcggcatttcccaatgccgctgttgtctgctgtgcaccgaccgggcgtgcggcgcggcgtatggaacagagcactggctttgcagcatctacggtacataaggcgctgaacctacaggcgggtgaaatccacgaactgagagagcctgaaaccctgaaggcagatctggtccttgtcgacgaagtcagcatgatggatatgataaccacatggcacctatttgccgcactgccacccggctgccgcttgattctggtgggagatgcagatcaacttccctccgtcgggccgggtgccgtactccacgaactgctgggctgcgggaagctaccttcggtcatcctggacaaggtgtttcgccagagtgagggcagcatcgtagcggagaatgcacagcgtatccggcacggcaatgagcgattggacttaggggacgattttcagttctgggcctcggcagatgtgtcacagtcagcacaatggctggagcgtctctacatgaatgagatcgctcggcacggcgtggacaatgtggcgcttttgaccccgttccgtaaaaagtccgaaactggcgttcagagtatgaacgcggccctgcacgatattgccaacccaccctcaccggaaaaggcggaactggaaatcgggcagaggacctttcgcgtgggtgacaaagtgatgcagatgaaaaaccgggattttgccagtaatggtgatatcggatatatccgaaccatcgtccgggatgcagacggttttttggtagaagtggattttggggatgaccgtattgtggcctatgaggatttggagtctctccgccaactggaactggcttatgccaccaccatccacaaatctcagggcgcagaatattcctccgtgcttatcagtgtccagaacatacacgggagaatgctgaatcgtgcgttgttctacacggcggaaacccgcgccaagatccgcgttatcgttgtgggagactgggaggctgttgtgcgtgcaatcaatacgacggatactgaccgcagaaatacggcactggctgaacggatcaacgaattgataaaagaatagagggaggaccagacagatggccacagtcctggaaaattactatgcgctccgaggcgaactggagcagcgcatggcacaggcacccattaacgcagtcgacctgtggtattacggcgaaattgtgtaccgggtcggcgtgttggagacatgtcagatgtacctgcgcagtgcgcctgtttcgatgaatacccccgaactgctggggcattaccagatgatggacgcctatgtgcagagtcttgcgttggaacgtcgctatgggccggaccgcggtccggatacacagaaagagcgggaagccgctcagagtaacctgggacgtgtgatccaagactaccgtaagcgattttcagcgttttcgcctacggctgccatggcatacaagaaagaaattaaccgggttattacaacactgctgccggcatggctgcagtttcggaacacattcgtaccgattaaaaaggctaaggagggtaatgcatcatgaaagacgagaaacaggcagcactggcagccattcagcagatcaatgcggtggatggttttgatccctcgccgttggcagtggaatacgccgacctcaatacccatgaaaagcgccttcgcctgccggttatgggacaactcgcgtggttctggctcaagcatccggaaggccgtgtcgctgtcacggtgactccagccaaggagtgcttcatagccacagcacggatttatgccaattataccaatccatcagatcagtatttggcggaggccacagcgtcacgaggttatttgccggacaagccgacggtttccccgcgggaatgggcacagacagcagcaatcggccgggcgttgcagtacgctggctttggactccagttcgctgcggccggcgacgcctttgatatgccagcagtggatgaactgagcggcatcgtctggagcggggaagaatctccgcaggatttgccagagcctggaggggcctccgcgaatatgcatatgacaatgccgatgcccacaccagccgcccagccgccggtagatccattggagaaagcaatgagtacaccctgtcctatcagcaaatacagcggcaagacgcttggggatgtactgagggaggatccaaaagccctcgtgtgggtagcgaataaatttcagggcgatcctgagatctctgcggccgcaaaactcatttgcgaacagtccatggaggagagcgcctgaataaacatgggggacggtcgccaccagaccgtcccccggagaggagctttccatggaacttcgctatcaaatgacggatattctgccgctgctcccaatcccacagcctccaaatggaaagagtgcctacaatatcccgtgcccattatgcgaccgtgcaggttcaagggagaagcatctgaacatcaatctcaagcggaatgtgtatcggtgtcccaagtgcggacaattccagggtggtgtcttcgatctctatgcctactacatgggcatcccgcgggagaaggtcttggaggaccttacagcgagactgcagagagacatcagctatcccgcagggaaagcggctaccagaaagaaactgcagcctccgccgatgaagccccaggcaagccttgcgccgctggaggaacgggaccgggtctatcgtgctttgctcaaccggctcaccctggcgccggaccaccgtgaaaatctcctcagccgcggtttgaccgacgaagccattgaacggctgggctataagtctacgcctgttgtggggttccatgcactggcccagtccttgctggacgagggatatacgctgtttggcgtccctggattttatcgggacaaggatgggcgatggacaatggctgtgtggcgtagggggattctgattccgggaacctactttgggaagatacaaggttttcaaattcgccttgatcataaaatgaaaaagggcggtaagttcctgaccttttccagtagggacgagctggacggagccatgggtgagaactggtgccatatggtcgggccggttcgagagaggattcttctgattgaaggatatatgaaagcggacatcgtcaaccactttacaggccaaacgatgttggctattccaggggtgacctcgttgcaacatttggagtcagccctcagggatctgattcccatgggagtccgtcatatcatgacctgcttcgatatggactatctgaaaaactggcatgtggaaagtgcctatcagaaccttgttgaactgttggccaagcagaatgtcacatttggaacctatttgtgggttccggattacaacggattggatgattacatctgggagttttgcatgaataagggcaatcctccaaagtaacagaagtggacagcgggacatgcgcagcatgtcccgctgtttttacgcattttgttgtaaaaacgcattttcatttgtgtaataacatatcagaaagactaaggagtgatttctcatgctatttccagttgatcatggcaactcgtctatcaaaaccgtcaatttcgtgttttcctccggactggccgattatccgatccgtccacccgttgatacggacattctggaatatggcggcaagtattggacgctgtccggcaaacgcatctcttatatgcgggacaagacgaaagatgaccgatattttatcctgaccctttttgccattgcgaaggaactgcagaagagcgatactatgagcccaatggtggaaacggatctggccgtaggattgcccccggagcattatgcgctgcggcagcggtttgcagagtattttaagcgcggcacagtgaactttgtctttaacggaacaccggtctgcctcgtgatccggcatgtgctggtctatcctcaggcttatgcagcggtcgtaccgcaggcagcccgcctgaaggagatcccgcgcactttcattattgatattggaggctttaccacagacgttatgttgcttcgcaattctgtacctgacatgcagttctgccgcagtttggagatgggagtgattcatatgtccaacgatattatcggcagggtgaatgctatgtatgatatgaagattgaggatgaccacatcgtggatatcatccaagggcggtccacgaccctatccgctgaggtgcaggaggttgtatttgccacggtacgcagttatgccaatggaattctggataaactgcgtgaactgcaggtagacctacgagccaatccggccatttttatcggaggcgggtccattctattccaaaacttcattgaggagtcctcccaagtggctcaggcggattttgtgctggattctaaagccaatgccattggctatggaatgctggctacggcgcagttgcggcggatgacacagcagaatcacggaggggagttctttgcggagggatgataagttccgattttctctcggatggagccgggatactgcggaaaagattgcagtcggagatttactggaaagattgaagaaccgcaaaagtgatctggtcgtccaagctgtctgggagtacattgggaatcaccccgaggtaatgacggaagatgcaaaaatcgtgatttcagttcattcaacgcccacagatgaacagacatttgcaaaaatccaaagtatgatagacgcctcgttggaaaaactgaaaactaccttaaaactccaacttgaacagggccagccggaagatgccagcgggccaagcgagaaagatctggatgatatgctcaaaaatctggatatattcaatctgtgagaacagtccccactccataccttgaatggggtggggactgttttgaggccggtaccattggggcggcatgggtaagataaaaaggggaagtgcaataaaaagacacgccccctcaggaatgcaccgttcctgagggggcgtgtctttttgtttataggggaagttgtgaacttcggatgctgtcccctctcggcaaagcaggcaaaacaactagccaagacggtatatgtacagttgagacagtctaaatgcctagaacccgttccagatttggtgaccgcagtattcaaaggtttgtgcgtcatcacaatcagcgggagtgaggtcgatgatccgcttgcgggagcgggagaggaagacccggtttttgattttgctcattggctgccatttggccagcatattgtcaaaattgactactgaggcatagtccgccgggaagttgttttttatgtgatgaaagaaatagttgcggtggaaagggcagatcaggcaggcgctggccttgctgtccaggccccactcatccagattataggcgtagcagtcctttcgttcccaacccatctcgataagcggaaatcggttttgaaacatagcgtgtcggctgggaaaggaacgatgagcctcttcactggaaaagccaatgtggagttcatgggtgccgatatcctctgggcgaagccgctgatagggccggtagcccagaagttcatatcggacaaacttttggatcatcaaaaccttgtagtccacggtgcaggagcggcgggcgatccgtcctgcttttccctgctcgtctaatgtccagaacggcatggctgaaaccctctgccgcccgaaccgctgcatatagtcctgatacagattactctggagaatgtaaaaaggaatgttgcaatcaacgcaggcgcgttcaataaaacgcacttgatccgctacccaggcaggctcacagccaagatcacaatagatgatggcatcatagcggggtacctgcgggtgtacgaccttacttctggtctggtcgcaggagatcagggccagggcggtactctgcatccccgcaccacagcttagaatgttcaaacggaatacctccttctaaaaggaaatgcggggaaccgcccgtttaggtggttccccgctgagtgttattggagcagaagcctattgatttgggtcaggcgcaccacatcaaaattgatcatgacgcctcatgtgatatcctgcccctgtgttttagacagatggtaggagtaacagatataaccgccatccccatacccggaattggatacaacgccatgtggaataacaccggcatagtggtctgtatgtaaggtctggttgcaacagctgttgtaccacgcttccagtgcatcttcgctgggtatctggcctgcatcagcaccggcacggtagaacggcttgtcgaacacaccggcttggccgctgtctacgccaaccttgaagagttcctcccgtgcaattaactggtttttgggtgggcaatgctgatggaacgcggccagataggctactgccgcatcgtgcttcccttcatggaaaaagccaatctctgcctcccaaatccccggctgggcattgggaacgatgcccatgcaccaggtaccgggcgcgtaacagggatcggaaataatcaatttaggctgtgtcacctcgaaagtgccgagtttgaatttttgtaatgtccgcattatttagacctcgctcttgctaattttattgttgcctctttagggtcaacgggtactgctgccagtggcgtgaatggccggaatatccgcggtatctccaacatgcggcggcttgctctggattgcagccagcaacttggaaagtagttcgggcagtttcatactgttgcggctgcctttatggtagcggtaactccattgaccactctgtggggaatatcgaatactgtgtagcgtattgataatccagccctgtgtttttagaggaactgaaatcccatgctcccgaaaaagctgcatgatcagagacttgccgttgatatcttgatttacaacttcttttccggctaaaatgttttgctccgcctctcggatggcggaggtatagcggtcttgtaactcttgttcacgctgacgcgcctgggcttccagttctgcctctcgcagtttggcttgccgttggcgctctgcccaaatgggagcgttgtgtgcctcagcctcttcgcgccgccccaagaggttggcaaagccaagatcggcccagcgatctggagccgccatactctggttgaagacccgttcaatctcagcccggataccgtgttccagcgtggacagccacttcaggacttccgccagccggctccgctggtcgatgcccaccataaagccgtcgcaggggataaagatcgtcggccatgaatcacgcttattttccaaggtgtaaagctcgatgccgttttcattgtaaaaacggtagtagtagtgccttttacccatcaagtccttggaaaaaacacggttttcatccctctcctttggcgggaatatatcctttttcttctcgttcgggcgggtgtagcggggagagaggccggtacggcccaaactgtttgtaatctgtttttcgattgattccagaccgccgtgccgttccataaagcctgataggtcctgtgactgctgcaaattacaaaggcacaaacctgtcctgccttcatagatagctcccttatattggaacagatccaagccaaactcgttttgaaacgacttggcttcctgtatcggggaaaaggcaccatcccggaagatgtaacagacggcagagtgtttttcattcatatttgaatcaccttatcgtatgtcacttttactgcaatcatatttgtcatttgtcgctccttcaattttgatttgtgtctttcaccatcatctcgcgggctgcaatatagcagatgatgctataaatttttttggtaatgctgtcctctgccctgcctttgacgagctgggtgtcgatgaacatcggagaaatcgtacaccgggtctcgatgaagtatttttcggaatttttcagtgggaacttgcctagcctcatgtagacctctccgcttgtgttctgtccatgtggtgtgatattgctgtttctgaggcagcctacatagtgttcctggctgtacacacagccatattcgtccacgtccgaagcctgatagccccccacctcgctcatcatatctgcggccagttcctctgcagaccgacttgtgataaaataccgctccgggaatgggagcgcctgaatcccccagaactgatggatgctcctgttgaacatccgctccagtaaggatttcagttcgtctttcagcgtatcatatgtaaggtcccaaagttggatggaagacggaacgccaactcctttttcgaggtagttcaaatagtgaaccgttgaccgactggatgtttcctcctcagagccagagaaatcagggaatccagtcttgctctctattagctgtacctccacgtctgggtaagcgccattggtgataaagagctggaatgctgggcttgtgcggaaaccatcatgatttctcggccccctgccaagagactctatcatctcttttggaaggtcaatcccatcgtaggcattccgggtcttctcaaccgcagcttcatcctgtggtgtggtttcctccttgatgactgcctgaactgccttgaacatccggtttatcttgcagtccttgcagtcttccaggaacggcatagcccctctcatgcaaaaggcacagaaggtttgcttagcttcggccattttctcataataggcggtactgattgtcttcatatacaatctccttttttgagccggaactggatgctccaatcccggcttgtgtagcggattaccggatgacctcgtagagcatcatggtatccagattgaacatggacatgatccgggtgactgtaggcctatgacagcggtcgcaaatctgattttcaaacaccatccttagcccctccctcacagtccagagttcgccctgagatggcagtctcatcatggccgccgtcgtaccgctccggggtgttaatttgctcggcgaaggtgaaatacttctccatctgccggtcgagcagtctgtcgatctgttgccggaattctgcgtttaccttcttttctgcactgaggtagtcgacgaactccttgaattcaccaaatgcctccagatagccggcaaggaaagccgcatcttgagcctgggcctggatccctgcctgggaagcggcccgccgcaggtctgagactagggcagcggactctggccggcgctccagcgccccccaaatccggtcagagtagtcatggcccctccggaattggggcctcattccaccaaactgcaaagcatagatactggcggcatacagataggcgtgttcaggatctcgcctatcatcggtgtcgtagacttgaatgttgagcggctccaaaagggtggagtagacctcgttgaccagtccgccatccatctcgataattaaagtagccacgtttgttcctcctcgattgacttaaatagtttttttcaggatgataacccccattacctgttccaggccttgttcattgagccaggcatccagagcagtttgggcctcttgacgtagagcctctgtcctctccgcaagttgatcctcaacttgttctcggtttggaacctcttcgctgacgaaagcgacgccaatccaattggtattcattccggatcaccgtgtttcgatgctctctgccgtgtcgggattctttcgagtgattgcatgacttttcatctcctttttgatttttgcggtgttccgctgcagggatatctatataaaaaaacgtgtggaacccagaatagtccacacgcttttgcccaggatgggcgagatctgtttaagaggggcattcgtttgtccagaaaacaaaaaagcgcccaaaggtcagaaagacctctggacgctatgcaacacggaaactaagactgccttaggctgccgcagatactatgtgagcatattatagcgtttcctttgagaaaaaacaagcattaaaaatcaccacccgccggtggcagctgatgttctgaaacatatcgggttcacgattcccaagccgtggagcaggaagaaaggccatgtggcattttacgttggtgactcagttcgaaaatcccttgcaaacaatccgtaggtgcggtataatactgacataaagtatccgaaatcgccctggcgattacagtattctgtgtttcaaagcgtctgaaggcatgttgcctttggacgctttttacgttttgccaaaaaaagatatgtctgcgcagcctagttacagtaccaatgcgtgaaattgcgtctgaggaacatcttcaggcgcttttttctttgtctgccgccatgcagtatgtggcggcgaccatatttctctcaggtaccgcaggcatctactgcgtgaataccacaaatcaagaaaaaggagggagtcaatgatcacaacaggacaagcgtacagacacggtgcgccggtgcatgactgcccggtaccgcacacaaaaatggccgccgtatcagcggtggcacagagaaaggagagaacatagttatgagcagtcatgacaaggaacaaagccactgcgacgcctatgagaagatcctcgacttagatctttttaatgcacttctggcccttgtggtcaagatgtccgacaacaaggacgctatgctggagtactcgcgttttatcagtcagaagtccctatgggcttccaggtgcaacgacccgggggcctattttgcccagcatgaacttcgctatatcggcgagattacggagcgattcgaggaacgcatcggctccagaccagaaatattccgtgcgctggcgctggctcttggatttgccctgccatttctcacagactccatgtttgttgggactcagcgagaagacttcatacgtaggctggataaagaggctgggaacgacctgtatctgcagggagcccgctacctcctgaccaccgacccgatggagcgtaagcagttacggtcccaactggctggcgatacgtatcaacggacggaggatgctatgtttgtcctctccctatttgaccctcaggaagatgagtttcctgcaatgcgcccccagatcgctcggttgtggggcgttgatcggaccataccgctgctcggcaatggccgtatgctggactggcttctatgcaactataagccggtcatcgccgagtgcaggaagaaagacaatgcagtcctgcgggcgttgctgaagttgcccggccagttctgcaaggagggctccgctctgtacaagacgttgatcgactcaggatatagtacgctggagatcaggtatgccaactcctggatgatttggccctgccaaaatccagttgggcttaatcccaacggcattcctgctgagaaggcggctgcccaattttgtatcgctgcactcaatcaggacgaggagctgccggacgaggctttcacccacatggagagactctactccatgtatcgtaaatttcacatccgttacgaagggcatgaggggatatggcctgctgtctccacacaggtcaatccgaccaaccctaaaacagtattgtggatgatccagaaagccaatttacagttctcttatcggttcgatgtatttgatccgcaatgggatatcttggcagaacagttggagccactggattaccggaatctcttcattgaacaggtcgaccgtctggaggcgcccgacaaaaaggagatccgtcggtatatggagcgttatcaggaactgacgggcttggactatatggaggcgtttcaacaagagaatggctggtataacaagaatttcgcgttgcttgtggatgctgacaccattgatttatggtccttttttcagtcacacctcaattatgagtcggagccgaaagaaaaacaggcgttgtgctatgtgcaggaatataccgcaggttctcggaccaggaaggcgtttgactttaataagaagttattagaaacatacgatgtgactgagtatccagacctgttcgagagtcattcgggcttccaccgcgattatatgaaatctatccgctattactatagcgatctcggcaaactggattttaagcgggactttctgtcttcggacgaacagcgtcaactttttgagtggatcgatacctcacaattctgtcttgaaccacaaagttattataactttgtggaagcggcactatggaatgactgtgtccgtgcgctctatgataaagagacgctccgggaagttctgaaagccctgatcgcaacacgttacaatattcatagtgtgaacagtttgaaacaggatttgtatacgcaggaagagctggatgcagagaaagagcagcaacaggcagagtgggagcggatcagacaggagcgccgggctaactcgcttgccacaaaaaaggagagattggatgccaagtttgatgggagtgttcaatcgctgaaggattttttggatagctattacagtgtagaggatcgcagagatgccttgagcctgattgatgagcccctgcatcttgccgcctcccaatttagttatcccataacatcagagcaggccggtgtgttgctctatttatgcggaagagctattgatacggatgccatcccacgaaaaacgctgtactctcttatagaaattgttatcaaggaggagcgtgcaaatgctacaaactgttaaccgtattaaagcgctggagcgcatgagtacctgtggcttgagcaaaaagcatacacatcagtatagtgttcccacactgctcacaacctgcgaacggattgaagagcaaggtttaacaggactactttcctctgttttgcccgaacgtatccagcaagaactgatctgcaacgaacaatttgcaggctactacaagaaactggtggattgtaaagtgccccaccatttcatcaatgactggctggagtctgcggatcgtttcggggaatctctgatggggcgttataccgttgaacagatggttcaaatgtacggctccggggtcaacggctcctgctgtcaatacgagtgtctgaagtatttcgaacacgacttagcggatgaagcattgtggcccgcattggtagataacctgaacgctttctatgcgcagaacgccgtgactttatccgatttgaaaccgcaggagcgggagatgctgaagctcccttattttgcctctttcatcgatgtttccggacgtaccatttcaaccagcctctctgtgctttcctccaatgagacgatgcgggcggtcctggatttcctgttccgtgaacaagtggagcattctttcacagaggatgagttgacttcgctctcccatctggaggctaaggatcttgaacttgtgcgccagacatactccaatctgggttctgaccctggatggatggagcggtttctggactggtggctctctaaccacggtctgcgccatgatctgcagtggttcgctcaacggcgcgagccacttacagacgaggaaaagcatcaggtgctggatacctgggtcggatacttgaacgccctgtattccgggagtttggaggtgccttttgcatccatcagacccattcagtacgatgtactgatctacgccatcgcccacaagaagaaacggtttctccacatggtttcggagcattttgaggacttctgcaaactaggtcgggaatccttcctgctggaagagagtttctacacccgctgcaatttgaatgcgctgaacggcaaggatttcctcgcgtgcgctggcgaggccggacagaggaacaaccttgatctgctggaacagagggagtatacttttcaggaactcaaattgctgtgctatgccaagccggtctacatccagttctatgggatgctggcggatatcggcgtggatcggaaactcgttgttatgcgggaactgctcaagggagatctgttgaacatgcagattgctgaggaggacctgtgtggcctggccgcgcttctgtcccagaaaccgctgagtgtgtggcgacagaaagagttgggccatattgccggcctgtccgccactgacgctgtgcgcgtcctgctggtctatgacaagatcaagttattgatccctgaactactcacctgggaagatgcactctttgccagccggaacgcagatcggatgcgaggctatcagagctggactcagatgcgcaacgatctcatttatgtggatcaagactgggttgcattggcgaaagaattggaacttgacgagaaattccttcaagacaatgagcaacacatcgtccgcttcattatgggggagggggcggagatgacccggctctattatgagtacactgagaataaggaggcattccgccgtatcatcctggcagaactgatgggcgaatttaaaacactcaaatactatcccaatgacctgaatagggaaatcagtttcccaaccacaaaacagcagcagttgctttggcagacgaacaccgctatggagacctacggcattctggtggaggaagtggatgattactactctaccctgcgtctggggaggttgccatactccacatgcttatcttatgtggatggtcaataccgggaatgcctgctctccagttttgactcaaataagaaaatcctactagccaagaagaatggtaaggtcatagggcgggctgtgatccggctgaccaagggccgggattatctgcgagatgatgtcgatgctccgaccttggagttcgccgatctgactaaaccacccgagaaacgatatgaggatgagcggcctgcagaccagctgaccctgttcttggagcgtccctacttcaagaatgcgaattactcggaaaccgctgttatcaaacagatgtttatctctctggtacggaagaaggcgatgcagatgctggctaccccagtcttggcgatttgctatgaagagcagtgcgctgcatctgactttgtgcggatgaggtacgccctctacatttccaagtccaaaggcggcgcccagtatctggactcgttggacggacaagtgaaagtctcacgggagggttcctttaaggcgttcccgttccttgtgctgccaagcaacgagatggcggctatatcctgattagtacagtatctcaatcaaccagaaaacgggggatgtgaagcgaatacgctccagatcccccgttttttcttgggcagaagcgatgatataaaaatgatgcttcaagtttcgaacagaatgtcggagtcaactttactgacatcggcattatagtgattgtttctaaagaggattaagcaggtgcgggggccttctgtaccggcttcctttctgtttcggtgtttactgaaatcgtgcccgcgcacattctggagaaatataggagtcgccaccacaccttgaaataggttggtggcggctttttctatggcaaatttctttctctgaaacggggaatgaggagaagacaccaagatcttcagggaaggcatcctgctgcaccttgacaaataggcggtatgcgcctcatatgcggcaacgggtacattgcgaatatggagagccgtacaagcagactgggccgtgatcccaaatttggaaaggaggcaggggggagccggatgttgtgtgcagacaagctgtggcggcttggaggccatgacccatattcgttgatcatgatacaccacttcggctgtgatccgagcggtaaccaatccgccgcaggttacgggaagtgccaatagctcggggagtaagtctcgcggagcggcttagccagccgccgcccgttgctttttggattcagacagaaagggagatgaaacatggaaaaacaagaggttcccatttgggaaaaggcaaatttgacgatagatgaagcggctgcctacttcgggatcggaaccaacaaattgcgggagataaccagcaacccagattgcgagtttgtgattcgggtcggggctaagcggttgatcaaacgaaaaaaattcgagagatacttggaagacgtggatacagtgtaaccaattttggatggaagccgggatgcagcggatgctgtatcccggctttgcaacagggaaattacagaaaacttattgaaaacatgggatgttcatattattatatatgtgtgtgggcattctcttggaaggaggatattgtgtccgacaaaagacgcgattccaaagggcgtctcctgaaacaaggggaacgacaacgagaggatggcaaatacgagtataggtactatgatgaaaaaggaggtaggcacagcgtatatagttggagactggtcgacacagataggatcccgcctgggaaacgagacgctgaatcactgcgttcaatggaaaagcgaatccgaagagatctggaagatggaatcaaaacacacgaagcagaccggacgacgctgaattaccattatgatagatatattgcgcagaagattgagatcaaggagtctaccagagaaaactataaatacatgtatgataagtatgtacgggaagaaatcggacagatgaagttgtcgaatatcaaatatagtgatatcaagaagttttatttgtccttgattcacgacaagggattcaaaccaaacagtatggaagtcatacacacaattcttcatccggttttttctacagcagttcgagacggcatcattcggttgaatccgaccgatggcgtaatgaacgaaatcaaaaggacccataactgggagaagccgaaaagaaaagccttgacagaagcgcaacaatctgcttttattagttatgtttcttcatcgccgacttacaggcattggctgtcggtatttacagtgttgctggggacaggctgcaggatcggcgaagtggtggggctgcgctggcaggattgtgacttttcgcagggaattatatccattaaccacaatcttgtgtaccgcaaacgggaaagcaccggaaaagttggatttcatgtgaacacaccgaaaacgagagcgggaatcaggataatcccgatgctcgcagaagtaaagcacgcgctcctgcaggaacggttgcgccagatggaagagggcttcaatgattgtgtcattgacggctattcgggctttattttctcgacacgctatggagatgtacttaacccacattgtgttaaccgagcgattgagcgtatctgcagggattataatgccgaggaaaagcaaaaggccaaaatggaaaaacggtgtccagagctgctgccacatttttcttgccacaatttaagacacactttctgcaccagattctgtgaaaatgaacgtgacctgaaagttatacaggagattatgggacatgcagatatcacgacgacgatgaatgtttataatgaggcaaccaaggaaaagaaagtagcaagttttgcgaatctggagggcaaaatccgaatcagttgatttacccccatttttacccccattggtgatgaaacggtagaaacttataccaagttataaatccaaaagttcgagaggacacctcaaaatgcggaatacagaaacttataacactttgcagaagccggaaattctattccccaccatgaaaccccttggggactaattctctaaaaacacacgatatagagtgatttcaatagaaattcacactatatattgtagttttgagaacggcagattttattttaccccagcgttaccccatttgccgaaaataccccagagaatggggtagaatgaaaagatgaaatctgactgaatatagggagttggcttttatagctggccccctattttttcataaaacaagggtacagaaatccgaaaaggaaatctgtaccctatttttttcgtttgtgccgcccaggatagctcaggaggggcgattgtgagtttagagtatagttttacccctaaagactttcgacgctctgagagccgtctacgggcttttatttaggcttatcaaatctggtgcatttgcaatggccgtatgggtcgctgtgtcgtagccaatagctgcttacttctactgtgcgcccgcagttttggcaaaggcatttccacctggtttcgttgccggcgattctatcattttttacaggctcgatcaccttgaggaaaccaaaggtttggcctgtaaggtcatgtttgagttggaactgggagcagccacatgatttggtctttcctcttctgagactttctgaaaggacagaaactgtattaccgcattcacacttgcaaatccactttgcttttccgctttcagttgcaatatctttctgtattacagtaagtttaccgaatactttaccagttaaatctacaagtgtggaagattgcttatgtcgcaaacaaccacaagattttgtaccattttctttgagtaaattagtagaagatacgacaacggtattcccacactgacactggcaaagccacatgggacgaccaggcttatgatcgtctactcttttaatcacggtcaacataccaaatgttcggtttgataaatctatgagctttcccataagacaccacctgattaagatatctttattttcccatcaagatttgcgaacgattgtttctttacttctttcgtcgcttctgcataaatgttcatcgtggtttcaatatctgcgtgtcccataatttcttggatagctttgatattgctttcaacttcacaatatctggtgcagaaagtgtggcgtaaattgtgtgcagagaagtggcggatcagcgtcggctctctaccctccatatctgcctttatggtttcatcttcgatatacgcagcgcaaatcctatcaatagctcgatttacattgtgaggggatagggggtcgccataacggttctgaaaaatgaaccctgtatagccatcaacaacagattcattgaatccaatgatctcttgttttttccattcttcctggagcgcttcttttacctctgtaagcatagggatgattcgtatgccggcatcagtttttggcgtttcgatgtgaaatcttgcttttttctccccttcatacttccgataaaccatgttgtggttgatggagatgatttcgtcatcgaaatcgcagtcttcccatcgtagtccgatcagctcaccgatacggcatccagtcccaaggagcatggtaaagagcgggagccagtgattataaatcttgctatttttgatatagtcgataaatgctgcctgctcttcttttgtaagtgcgtggcgttttggctttgcccagttgttgcttttcttgatctctgccatagcgccggctgctggattgatacggatataaccatcacggacagccagcgtaaaaacaggatggataagagtatgaatgatctccattgaatttggcttgaaacccaattctctaattaacttgttatagtaagccttaacatctgaaaactttatgcttgaaatcttccttttgccgatatcgttccgcacatatttcttatacatatatagataatttgcgcgggtagattgttttagctctggtttgttagacatatagagatcgaaaaggtcgttcaaggtggctttgttttcaacagcggctttgataccatcctcaaggtctcttatgatttttctttccttttctctaaggcatagatcgtccttgcaaccaggggggaggcggtctgttggtacaagtctggggctgtagacatctcttctcacgccatcagcatccgtataacgaaatctgtagctaccgtctttccgctgagattcaccgtctttaaggatgcgccctttactgtctgtgcgtttttggcctgccacgattacacccccccctttttttcgtaagtgtggagaaaataaattcacttatcaattacatcataaagcaaagagtgaaattcgtcaaggagtaaaatcgctgaaaagttacttttgaaactttgcgttgattttcttcggaatttagtttacaattaagaaaagcgatgggaggatttaggcatgatgacagaaaagattcggatcgctctgatcaaacacaatatgagcgtgaaagaccttgctgcctctattggatgcacctcccaaaatttgagcggtaaatttaagcgagataatttcagcgaaaaagagctggccgaaattgcagatgcgatgggatatcgattcgagggtaagtttattgataaagaaactggggaagagatctaagcatagaaacaaatgttcgattcatagtgatttttaacggggtgcaacgcaccccgtttttttgttagttactgtttcttttctgggaaatcgcagataatataccgatagcaccccatcatggagcaatcttggctaacagcgcatccaacatcattcgtatgcttttcttgttcgtcatgcaatttaatcaattctttttgaaaaagttgatatgcgtttttcgatttgcacttattcaattcttcaaatacttctttggcgtattcttttatcgaactcatagccagtcctctctcttgacaatcattgagtagatctatttttagaccgagaatgattgctgggaatgcgatcccacaacacaatataactaaaatagattctaatgtacgaagcatatttcacgattgaagcgcaaagccaatgttgatagatgtaccaggctccagggacgggaacaggctgttgtcgatatccatgagccagccatcctgtttgttcccaacaccgacaatatcactgctaccgatcttctccacatactctgcctttgggataatgagcttgattgcctttaacgcctcaatctccttgtctgtgagttttggtcttctgatgatatgctctgggtgattgataatgtcgtagatcgcatcatcacttgtctgaccgccccatttcaaaatgccgtcagagttgatatgatattctccattgtaccctttgatgcggaagatctctccgacatttacaccaatgatttcacaaatccgtggttgtttatttgaatcataattcataaatttaatccgcctttcattccactgtttcaattcctggcatgtatcatggcatgattgtatgctggttgaagtcatagatccccagccatggtcacactctctacatggggactcgtctctaaagatatactctggtttgcttgccggacagtcattgcaggaaagcccctcgtatactccgcagccgtcggatttatagcactgcattagatatcgcctcacatatttaagatttctctgctatgactttcttgccacccaggatatctccagtagcaatataggcattgatgattgcatggttgtttttgattgagtagttcaactttaccagagtagcacatacagtttttcctttgaaacccgtattgatctgcgttttcatcatgcaacccaagcaaatctaagtcatatgaggaaatacacccacattgaagagtttccgttaatccaggctctgcacacgactcaatccggatttcacctaaccgacttgagtttgaaaagtaggtttttacatctcgaagcatctggtcaacttgggagatctgctgtttatctggagcaaagccgttttccccgtagggtagaggtaggccggcattcttaaatctatttctgacatgagggtacatatcaatcaaactgattcggaatctgctaaacccacagtcgataaatgttagaaatacattttttgccgtttcaatacctttctttgtagggatgattgggtcaatcctaataacaattttgctttttgggaacccaccatcgacaagtgcatctatggcaccaaattcatcatatggctctgggacaaatggttccaaaacagaatgaccaaagccagtgaatgttgtatggatgatcaccatatccttatatttgagtgctgcgtcgtaaaaatctggtgagacacattttgttataagaactgcgccgtcaacctggttcattttacttgtccaggagaggtcgagtcctgcatcaccagcctcggttatcccgattttgtattgtgccactttgtaatcaccgtcctaactgctcaaaatagaatttgactggatgtggtgtaggagtaaccaagccaaaacggacagcgtttttatatgtaacattgtcacgcatgagaactgctggcatattttctaccattttacggaatccctctaaagtagatctgcttttatagtggttgcaactcctacaggcagggagcatattatccagagtatcttccccttgttctgaccaaccatttatcggtataacatggtcaacctgcatatctttgtattccagtttgcacccgcaataagcgcagcgcccatttgtctttttatagatcgacatgcgctcatctttggttagttttcgacgttggttcattcttcttcctctataatcccgttttctgagattttcatggaatcatcgcatgtgaatttgatgatattcccactgtcatctgattcaaacgcaataatttcaacctttgcttttggaaattctaaaacacctgatatatgtgttttatacgcccctttaccaagtggatgttcttggtcgatacaacctatatttacccgaacataaaatgtcccatcgctatttggacttgcatatatttcttgtactccgttaatattcattttctaccaccaaattctttaatagcccatggagatattttatgtaagatgttatttttcttcacataagccccatagatacatttgtcatctctttctatacagatctcaccctctaacacggaatccatatcaataagctcaatagggtgcgcacatggatgtccgttttcgtcacgccaccacccgccgatatatccgtcatacattttcttgagcgagcggtattttgggtggaatgcctcaagaaaaagccgcttataaaacttgaggcggagcgggtcgtatgaattgcagatatggatgaagtcgagatagtatttttcgcgcgccgcctcgaactccatcatatccatatagtttggaaactccattatttcacctcaaaatctttgagttgcgatcttaaactgaaaacaacccatgttcaaccatatcataaggatcattatcccacgataactgtattgggcaatccgaaataggggtacatattgcccgactattcaacttatagcgcatgatttttgaccagtgctttttgtacttatcccattcttcgtctgaagagtagatcgttacatgcggagggaggaattcatctgctaccttccaatagccatccgcatatcctggagttactctgaccggcagtttttcatgcgcccatatctggcctgtttcgtcacagaccagatagcgcaatttccaggatcgaagtttgtctatgttgaatttcatggcgttgaattagcgatctcagatagctttatggattgctctttctgtagtgattgaaatgcgtttttgcgcagatagatcgtcttcccatcaacttttaatgtgaccatatcagctacttttcgtagctctccatctccaacgacatccagcaagttctttgcgctgtcgatttcatgctgtgtaaaatgagtttttctgacgattcgatctgggaagttgataatctggcttaaagcttctgccggtaggctaccatcgtcgcttacaatattcccattttcgtctattcggcagattcgcgttatcatcgtagaatgggatgtatatgtaatgctgaatttctctccgacttcaacaccaagcacattacaaatccttggtttcaccatatcgttatctgacctttcattatcggtgttgttttgcgtcaatgtggtcataatttcataccccataagataagcggctttatacgaatgggcaacaatccatttcatgctacacactcgcaacccctcgtttactccgttaagattacagtccgcacattggcaaggacacttgaacgcttcccatgcactgatgatatccgggtattcatttccgttcttatctacaaaagtaatttcaaccattgttgtagccctcgataatttcatccagtgtgacaacctcgccgtctttgagtgacgggaaccagtcagcgtcaataacagggttgactacatcgagtcggacacccagtaccccctgtgataccaccttgcactctgggaaaagcactcgaatagcctttgctctctccgcctcctgctcggtaaatcgtggctttcggataatgtgctcaggataatctaatgtccgtagcaaagcagatgtagaaccagaaacattcaaagggcttgtggaaaatgtgccgtcatccataatccaaaactctacatctccgaaccccttgatgtaaaaactttctcctggctcaacccccaacacctcgcagattttaggcttgtccatattgtcgcataggattcgctcgttgccctcttcaaaatacttttcccactgctctgtagtggagtctatgttgtttatgtcgatatcatcgtcccattctactttagcgcccaccttttcatccgcaaaatgagtaacacagcttattgagatcccatccagagcatcgtctttaataagacacttgatttcgtttatggaaaggttttcttccagatcgcatatatacaatgtcattttataaagttgtgccaaagccatcactccttgtccatctttgcaccgcagttagggcaatgtttcggctcccaatcactccatatatccgcgtctaaccccttgaatttatcttcaccacatataggacaaattgggttccctggttcccatctcccatgcctcacctccaccacatcggaggtaggggtgtcccacagcgcactgtaaaaatccatcatggacttgcactcgtgatccaggttgccaattacattttttatcgcagaaatagcgacatcccgtttgatgtactcactcacttcgcaagacatcatctctttaggacgaacaacatcgggttgctcacctattagatcgagcacatcttttagacaaacgagcctgttttcattcccgtatatatctgttaggttatcctttaaggcaccagcatcaatcggtttcattcgtgttcaaagcccccttaaccaacattccaattttatttctcaagtcctgccacgcttctttggtaagtggcctggagcagtttgggcagtatggtatttctggcttttcaccatacgcccatctgcttaaagataggccgaaagtagagtccttactaatggatagcccattcaaagcctttcctttgcataattcacagccaggccacatctgctccaattgtttgtattctggaactgcatggcataattcatcaattttggatttcagatctttgttttctttaaccgacttggcatagtcgcagctatgatcacaattcttggtatagtgcttcccaaacctaagccagcaataatcaacacatggatttatgatatcaccatctttcacttaaaacacagaattcattgatctgtatcgacctcaaatgtggttgtgaatgggcatttatgctcacaaaatcttatctgaccatcttgtttacatattccgcatccttcaccatatttattcataatccactgactatcatcccagtatttacaatttccgcaaattcccattttatctccgttttacatttctgctggagaatcatagttagaaaggtctgcaagcttaagcctaattccagttattgtgatagtcggattatcttggttataccaattaagaaccgatatatctaagtctgtctctggatatacaaccaacaattttccttcctctaaagcaattcttgaagcccaggtaaacacaccctctattgcccctttacatagtggggaaaaattgatggcgttagaaaaagcttgttgtatatcaatagattctttgtcttttagtacgttgattaaaaggcttgcaacttctttatatttctttacactcatatagcgaccaattgtttcagcatcagtcattatttatgtacctccaattgatttctataggcatatcttgtacaatacgcaattcgtttgttgctccaatctggatgcttgtgccttatacaaaagaagatgatgctccgcttgttactgagtttcttcattgagcttgctttcaaaatattcgatggcaaggctatacgcctttttctgtttgtcaaaatcttcttgggtcacatccttgagctgggatagctgctctttgaaaaggatattttgcctatggagctgaattgtattttgagtaatcctgaccacctgagtaattaccaggatcgtcaccatgattgttaggtaaatgtccatatgtcctccagtaatttctttttagttccgatatttcttgatctgtaagcgtcttgtttgatgcgaacacaaaataatcattgcagcgattttggcaagccacacactcacagcggtgcgggttgcttgtttcatttacacgaaatgggcaattgctgtagcaatccatgtcaatcatcctctcgctgttcccaatcgatcctttgtccgcattgtccgcagaagttcatctcattcccatcttcattatgaagaaactcaccgcttccgcagcatgggcaggcaatgatggaagtatcgccgtctggatatggactcattggctcatctcggtttgagagtgttttcatagacgagatatcaaataaaacctggtctaacagccaggaggccgtcttactgcctctgataatgtccgtatcgatcagctttataatcccgaacagctcattgccgtcaatcggtcttacttccattttgaacctccgttattgccgtatcatcttctggtacaaatgggtggtagacgatctgctctggactactttcccagctccatccgcaagacgggcaatccttacgggagattggcggtaaagtgcaaataacactgttcatcaacggcgctccgcactttgggcatgtttcaaccacgatcatgatttctcacctctcttgtaaacgccagcctgagaaacaggcttcatgttacatttatacatgtcctcgaagaaaacatcggatgggttttgaatcaggtaggcaaggcgctctccaaagaacacgctgtagaatccctcataagcgtcctcgacaacagtggtgtaggccgctgtcattgcctgccctccaatcccgccaaacccaagagctgtgctgccccatacttgagggaaaacccgtagcgaaaggtctgtatatttgtaatcaaccccaagagactttacggcgttgatatgccgctctgcaatgagcgggagacaaggtagttcacgcatcaacataatcttcatcctccaaaacagctttgttccaagtttcgattgcacatttcagcgcacggtctgggagagcctttccctcaactactttcaggtgcgacctgccgaaaattggcttgcactttatggtagcccaacaaccgtgtcccgcaatacctttgagagacacggctggtgttcttccacaaaccgggcaggcgagaatggtatcttcaacctgagattgcatttacatatgccctcactttctctacattccagaatacccgcttgccaaactggatacgggcttctgccagctcaccgatttgcacggcagatcttcggccacacccaagcatggcctgaagatcattcgtatttaccgctattttttcgcttgtctttatattagaaaattgctttgttgcgttcatacattccctcctaccacttcttccagtcgagtaggcttgaaattaacctgttgaataggaaatcccatcaaaaatctggatggggattggactgcatagcataggatagagaatgtcatcccgaatttctatccatgcgtctccccaagtcaattcttcttggacggctacaaaatcagctcgtctgccacgtgagttttcactcaaccctctaacacagagaacctggactccatcaccgaggtacaaccgttcgttttttcttgagtacattaaactctctggcgaaacgaagcgaaaacgcttaatatattgctccaacgcatcgtctgttttataaaagactaagattttgaatcctatatgaatcacctccaagttgattaactaagcccttagaaatcatcttcttcgttcttgctgacatacatacagaggctgtttccatcgtcctggatcacgagagcgcaaagccgtccgccgtacacacaagctgcatcaatgcagatgtcgccagtatcaacggtatacgccctaccagtcttacttggagtatggccgaatacaacttgcttttctcgttcctctgtatcggttgcgatccaatctcttccccaaagtagatcgtctggggaattatctttcaataggggataggtaaagccggcgtgacagaagatgatttctggtgtctcgtacaccaaaggcaaggtttcaaaccaggagatcgcattgccgatatcttcaccattctgctcaaaactgaactctgtaaatcttccgccatttctgtaccacaatgggtattctccatggcggtaagcatcaatcgccatctgctcatggtttcctcgcagacagaccactttatccttgccaagctgctgctgtaatttcatcaacatatttactacttcgcaactgaatctgccgcgatcaatatagtcgccaacaaacacaagcgtatcagtttgacttgagtaggataccatgcggagcaggtctttcagtgtatgtaagcatccatgaatatctccaatcgccaccagccgatccattatctcacctctttgaaaattttacttggatgtttttggggaatgacttttacatcaataccgagattcttcaaaagctcaatataatattctgaatgaaagttcccctctaaaacggagactccttttacggtttttgaaatcaaggttgttgtatcgtcaattttgtctctctttacaaataggcttggcacaatatcaaatggatgccccaaaatagagcagaacccattgtctgtgatgatcgtgcagccgtcgatattcgggatcagaatcatgaatccatcaccagccgatctgtatagaagaactctgtatgactccctacgtcgaaacaggtcattggcgtttcaccaacctttgtattccaattccgcacataatagatgtgaaaattgcgctcgtcgcagaattttttgatatgctccatggcttctttgcgagcttcttttacggaaaggttatcgctgatttttgcaacctcacgcatcttgccattgctaccctgaaaaaataatgtcatgccgcagcctcactctcttctatctctgggagcttgtagattgttacatccatatcgtcaaagtatgtgcaaatcatattgtagacgattttccagttgccttttgcaagaccacatccgaatttatatggaaacgccaaagatttatcgtggtactgggttctgatttggttgaaagcatttgtaagcgccgtatagttggtaaaggttttaccagcggttcgcccataatcaagctgcccaaacacattcgcaattatcttgttaggcacaactggaatgaactgcaccttgccaagcaagtcaaatggagtggatttgcggcagaattcatggtactctgttttcacctcaggccaccgcgtatagatcgcctttgccaaaccggaacccattgcacttctgcaatttacctgctgaacaataatgtcttctgctgcgttcaacaaatcaccaacaacaatttttaccatttcacaccaccttatctatcgaaaaataactaccatgctcggaaacggggctgagttctttccgtctccaaactttaatctcccacggagaaagcggatctcaacattgggctttttgtaaatgtaatcatgaaaatatgccgtgtctgtacgcgctggaattaacatgacaactgttgtatctggccttttggcctcctctgagcatttcttcacccaatccttgattgctctcccatatggaggattacaaaacacggtctgcccccccccagcattgttcaagtccgttgtcccgctctgtataatagcggtcacatttgtggttggactcgtctgcacaggggtcgagggtgaagtggaactctgaattcagcttgtcatagaagtcctgcggcgttgcccagtccattttcttggaagaaaacatgacctctgtattcataaaccacctctggattgattaactatttgctttaataagctcctgtagcgttcttggcgtatatcccatatacggcatcatacagccgacattgatgatattcccacaattatggctattcatcgttctgctgctctttagctcttccctccacttattgagaaagccattttcccgtgtggtatggacatgcccgcagagcatataacagtctggattataagaggatttatagagaaggatagggtagtggcacataatcacatgcttgccattgtccgtgatttccttatactccttaatatcctggaacatcttcttcagcccagaagacatactcttcaaatcgtgattcccacgaattagaaccttatccccatttaactgggggacaatccgtttccactcaggctccgtaccccagcagaaatcgccaagaataaaggttgtgtctttttcggtgacaacgccattccaattgtcgatcagcacttcctccatctgctttgtatcggcaaatggtctgccgtcaaatcggatgacattggcatgtccgaaatgtaaatcgctgatgtatcggttcattctcgtctccttgtacgatatcgtttgatgcggatatcaagccctttttctttggcggtgtctatcatatgtttggttcctcttgagctgccgtcccaaaacgcaaccaaagcgtctgcgtactccgccatttttacatttcgcttaaagccggctgatttgccatctaaatcccaatcggctggaaaatagatgacttgatacccatgttcttttgcatatcgctcgccaagccggtctgcgccgcgagccataccgcacactacctggatatcgtcgttgatgtttttgaagagataatctaagctgttggagagaccctcatagttattaaagtctctcccgccagcaacaattactttgaacataccatcctgctccagtcacaaagggcttacatatagttttggaagttgctttctgccatggggcatcccctgcatagttcttcaggatacgagccaccctcggtctgcatcccatacccacggttgcagctcacatcctgcatgtccccataccagcgctcagtaattgtccctccacacgcaccgtcgtagcagttttccattacgccacaccatccaatctcaaggttgctacatctgcccaactcattccatagtatttgcttttcttattgtcgcaaaaaccattatccatcccgatatagtgcctgttctctaatttagctgcaattagagacgacccagatccgcaacaattgtccaatactaccccccccacattggtatatgtgcgtatagcatatcgacacaagtcaataggtttttcagttgaactaattgctgtggatggatgaggctttgggaatttccaaatagaagttgggtatttcatatcactcttattttccacaaccttataagacccgtaaatgcgattagaagatatttcttctattgaagcaccaattgctttccccttactatggcttggtagccctttcgtcatctgaggattgtatataggctgtgatttgtagaataccataatatcttcatgctctctcaacggcattcttttagcgtttagaaatccagtcttgagaactttgtcccaaatgatgttatacctatgtagtttttcatttgatagcatcatttttgcggtgaacttatcctgaccaaaaagcaatattgcaccatttggctttataatacgttcatactgttgccataactttgtcggatcgatcatcagatcccatttattctttgtaatcccatatggtagatcgcatagaatcatatcaattgtttcgtctggtatatcttgcataccgattaaacaatcgatatttaatacgaagtccagtttcaattgcgattcccctcaattccttcatttagtttttagcgccaaactcaacgacattcggaacactggtggagccgaaacctccgttgcggattccatcggctgcgtcgtcataagaaatcccgtaggggagaaggataccctggataaagctgcctccctttgcaatgaacacattcttcttctgccggctgtcgttgattacctttgcgaaaatgtgtccctcgttatcggagtggaaataatcggagtcgattacgccaacagtgttgttcaactggagccgatatttgaaaccaagtccgcttttcggcatacaggccaaccaccagcccggatcaatttcgacacggatgccggtagggactttcatctctacgccagggacaagactcatatcaattggagcatagaagtcatacccagcagatccgaccgttgcccttgtagggactttgatttcatcataaatccccttaacacattccttggacggcttatcgcagttctcaaaaaatgtgtcacaaaaatcgttgtagaattggtcaaaagacaccttgctaaattttgctactcgattcatttgttgtcgtctgcctccttgattttggtgtatagcccgcaatggcatttgccctcttccatctccaggaagtctttgcacatgcactttgtatctggtgttttgacaatcacacatgggcaatacccatcgttttctctcagtttttctctcatttctttgacaaactctttgtctggatttatcttaatgatcatgcgtaactcccttatgaaatctgctctgcgtactgattatctgaggaaagagtgataccaagcacatcatcgtatctatgcggtttgtctggaataaacctgccaaacttaacaatgatattttcatatttctccagacgttcaagtgaggatcgtacctcgtttggataatatcccgtgtaaataacgatgggagagatatcgccatttgaacgaaacagcctgatcaaatcctcaacttcatcaatctgcaagaaaggttccataccgccaatgacaaccgctttggtgattggattgtttgcaaaatgctgataaatgactgagttaggaatgtcttttgatggtgcctgggcaagaggtgcgttttggcacacctcaatacccaggttcgactcagtacagcacttaaagtcacaaaaacaggtgttaataaacatggcggggagtttgaagttggtgaaatcctcttcaataatcccttttacccgcatcacatgacctcgctttttgtaagaacatcgtaccacttgcgctggttgaactcctgcttgcggatcgcctggtagctgctcacgggggtatagaagcccacgacgcgagcataagtatctgcaattggctttccgcaggtggggcatgttttagtccccataaaggcgtgtttgtcagcacacacagaaatctttgtggtgaacgcaaagtaaattacgccctggcttgccacgtagttgagcatatcccaggcggcttcctcattcgggaaccggctctcaatatcaatatgggcaatgcagccaccaccacatttcttgtcgaacagacttccaagccggcacttctcttgaatcgtgcatttctccatcagtggaatccactgattgctgtagataaaatacttgttctgctcaaagagaagattgtccgctgcacaaatgacaccggcacaattttcagccggaatcatctccagattgaatgtgaaatcacactcaaagttgtcctttacctcgttgattgtatcaagaatctcagtggcgaactcaacagcctcatcagaatacgatttgtttcccatttcgtcctcgtcaatcaggctaaacaaatccataacctcatacattccgatgccgccgatagtacagaactgcttatccagctccacagccccgtcctgataatttggcaaaagtcccttttcaatgtttcgcttgatcacatggcgcatggagtacagagccttacagtcaagcagcacacgatctctaaggatgtcaaggtatttcttcttgttgagcttgctttcataggcgatgcgcaccaggttaatggtgctgacgcggcaggaacccacgctcagagcggtgccgccgatagaattgataaaggcatccagcttcttggtgtcgctgagtagtcggcagcagttactcaaaataccgatgttatcgctgacgaagaaattggagtcagaccacttgatattatgattgctacaccagcgggcaaactcttcgtcctggaacttcccgtctttgtaatagagcgaataggtgagaaccgggtaggtgaacatgttctcttcccgaatttcactcacgacctccatgaacaccttttggaactcaataaagtcctcaatgtggtcaatggcaagctgtccgtccgggaactccactccgccgaacagggactcaagatatggacggtcaaagatagaaacattggtaaaggcagactgatcaatccgtaagaacggctggttcaaacggtagatgaacttctggaattgctggcgggcataatagcttgggttcttcatgtaatagccgccatccacatccttcttccagaaataccacgcccagatcaacacattcgggaggccaactgcgccggactgacggttggacaggaaagatacaaactcgatcacatcgtcaaaataggtggtgaggtgcttcggtgcctggtgattatagtggtcgaggaagaacaatccctccgttgccaatctggtcaggtcgtttgcccagcaataggggaaataactcgcggttgtggaatcgttcaaataaaaccccttgctgaattcctgctccagccactgcttagcggtgcgcaagccccactgcttcttgatagtgaggaaaatcttgttcaggccgaacagcttatcttcgctctttgccttttcggtcataaagctacggatgtccttgtggtttgcattcgcattcggatcaatggacgcatcggccagggtgtccttatcaacaaaattgtcaatgaactcgctgaagtcgagctgactggggtggactccattgatatattcaaaatcctcaccgtactttttctttaggtcttctaagcagcgctcaaaatccttagaaagctttagcgtaatatccatatgtcatcactccccctgttcgtttacccactgaactgcctttgaaaaatccatcatatccccgtatacactcagaactggaacagacataattccaagagcaagcatttcatctacatcagtacactttgtaaatgagatatttttctcatttaattttctttccaaaattccacacttgggacaacctgttgaataaagtacaatcatacgctttctacatctactcctttcaaaactctgtcgatttcatcgtctgcggaaagaagctccgcaaaatcagaaacgacttcgtaaatttcatcccaggtttctacgcgaaccatgccggccgctaaatcgttgtagctgcggttgtgcggacggtcaaacagaataggcagatcgcatgaggttgtttcaaggttgtgcgtcccatcgtcgatcatgatatccccgttgacaaggcttttatcgcttgcaacaatcacatcttcccattttagatacgggtacatttccagtagtcgtttgatctttgctggtacggtcgcgtaatgcgatgcagttacaatacgaatggtatgtccgtcgtcaatcagccttttcaatacctcctgagcgttctgcatgggggagattttctcccaaaactcggttgtattcagcggagagaagaggtcatccttagtgagttgcgggaagaattttgcaattctccaatcggtaatatcttcttcccgcagggacgagccgcactttttgtttagctcgtttacccagcactccacaaggttttccaaaacatcgtccatatcaaccaatatggtcagtttcttcatgcgcacactccgtatctatttgcgatcaggccgcaaaccttattgtaaagatcatctaatgtgccgtcgttcacgattagaaaatctgggataacattgtcaagagcagtctcagatgggtggctctgctgctccgcagtcaacgggctttcaaaattctcccgtctgattctgatgtggatcacatcaagcccagcctgctttagagagtcaatttcgtttggaaatctgctgtctggaatcagtacaaaatcccactcagaatggaacatggtaagcatatccttgatgaagtcaacccagtaatttgggcgctgggtgcgaatgatatctgtgcctactttttggagcagacttcttccgtaatcgtccttttctccgttccagttgaagaaggtcttgcacacatattttagaaggtctccataatgggcaatcaaaacagagtaccccatgtcctccagcacagtcttcatcatgccggcagttgtgtccttaccatgctgtgccttaccggaaatacaaactactttcatttaggcaacctcgcattcaatgtcgtcaaaaagcacggggatcttatttttgaactcctggagcagcatcatagcgatctctctcatctgggggtgagccgcaacaggcgttctaagtttgaagaaatgccgccattcacgcatattcatggtgatacagatctcagttttggttgagttattcagaaccgatcttgcaatctggggagacgcaccaagctcaatcatacggttgtaatggcgctccgcatcagcgcatcccataagccactcattgtaaatggctgcggtggtttcagcatcaagatttttcatcttgggatcaagctccataccgcccttgagatcgatataggtcacttcatttccaaacttatccttggaatagttgcagtatcttgtactctcctgtgcatagcttgcgatacggtgacgaacttcttcatgagaaacaccacggtcattgatcagacggacagtgatgttgtaatgctcgataaccgcctcatgccctctcttgataatgcctctgacaaaagattcacaggatgtatctgtaatcttgtcttcgctcttgtagcaggttcttcccaccgcctcaatcgtcttcagaatctgttctgaatcaatcggcgtgataatctcaaaactcggcttaattactttcatcgcataacctccataaaatagattaactaattgcttagatagcagaaataagttgtggttccaagcacttcatcgtagtattcgtaatacactccatctccttgtgggaagtttgcctggaacacaacattttcagggagaacgctgccctgctccaagagctgacgtgcgttttcgatggttctttcgtctggcgtgttattgattgcgccagtccatgttggagaatactggccttttgcatagatcacatcgtataaagtatcggggaagagtgggtgctgcattctattgagaacaacactgccaacatagagctgcatttcatccgatacccagcttgctcccatttctgcggtaattagtcttgcgagcaaatccaggtcttcctctgtatatggaacgacgggagcgctcacatctacactttcttcttcaggctggatttcggcttcctctgtaactgccggagcgctcgccaaatatggaggcggaataatcaccgtagcaggagttgtttcctttgctgatacttcattggcaactgggtaaacaaaagatgagagaagaacaatcaccaaagccatgcaaagaaccgatacggccttaaagataaaattatgtttatgtgtcatttccgttatatcctttcttgctttatgcaatcaaatcataatcgagcaaataccaataaccactcctattcttttctaattcctttgcgtagattatgtcgaatcgtttgatcggcgcttttgcgtacacggaagacctgatggtaagcctggacgctttcccgctcccaaccgatctggtctgtaccgcataaccccaaatcttgttgtcctttttgctggataatgggaacacatctgttatcaaaagttttcgtcgatcctcttttttgtttgtcgtcagatcgatatatcccataagctcgatttggttctgtattttgcatttcaaatccaggtctggtagatgaagtgatttaatcacatcctcacattcatccagtaggccggccatatccgtgatggtaaatgactttgcctctgtgccgtttttatttttgtctgtcgcatatttcgatacaacatcaagcatctgcccgctgatcttatccttttgcaccttttttgcagtgccatttttgaagaatgcgaatacggatgcaattctggatagttccgttgcattcccgaagtcaacaaagaaatcaattttgatcaggatatccctctgcctggtatcaatagatgtctcattgttcattagggtaagaagcgacataaaggttttcggatcactgcgttttgcgaggtcgtacagctcgttcgcaacagtgctattcatatacttaattgagttgataccttttgcgatcacatgacggtctttatcatacacatatctatcttttgaaatgccgtatcgagggggaacaatttgaatcccgtatagctcagcaagtgcgctgccgtttttgatatcgtcctcgttattggcgttgttcagatatgcggtaatgaactctgccggatagtagtagcgcagatacgcacacaaatatccaatcatgcaatagccaatggaatggttatatccgaactggtaagatgcgctgtcctcgatgatctgtaagaactccttcgcctcttcctcagcgatgttccttggctgggatgatttggagcagtatccctccaaaatatcaggcagagcggcttccagtctgtccttttgcttgcggccaatggcgcggcgtacattatcagcttcactgccggaaagcccacagatttgctgaaggaacttaattgtgtcctcctggtaaatcagatagccgaggttatctttcagaaggtcatcaatgataggggacgggttatggtgcggtttcctctggagaagttcgtcccgataagaagcaccagacggtctgatgcaggctgttaccagagacatatcgtaaatgctgtgcgtcttaaactttctcagactgtcaaatgcaaatgccgactcaaactggaaaataccgataggggagcgcagcatgtcattccaaacagcatcatcattccagttgatttcgtgagactttgggtaaggtttcccgatgagtgcataggtgtctttgatgatctcgatatttttcagaccgagaatatcatatttcaccaggccggcttcatgaacgcactccatatcaatctgtaggatctcttttccctcagacagaaatgttccgtagtgatcccgcagcgtaatggggcttgccacgatacctgctgggtgcatcgactgggaaattgcgacatccagtaacccatcgtaatagtaaaatacttctggatattggctccttgccttttcctcatcaagctcaaacaaatccttgatttcagtgtttactttaccaacccatgggtttttctgaaagattttttcgttttcttctttcaactttgaatactctttggtgaactgtttgaccagttcaatccttggaatattctcaaattgctttgagataattagtgttccgttttcatcaaagtgataaagttcacacccgtcaggttggttgccaaaacgaactgaagcgctattatcttttagaagctccagtgccttacgaaatcctctttcatctctctggtgctccttgttccactttacacccagcgcacggcaaatctcatcgatacagcctttcgatttgattgtgccgattgcaaggataaatgcggttttctcctgaccaaaccggttgataatgtacccatacactttgtcacggtcagatggggacacgtcaatatcgatatctccaatttctttacggtcttcgttgcaaaaacggctgaaaaccgtatgccaggtctctgggtttaagtccgtggtatttgtgacataggctacacgggagcctccacaggaaccgcgattgaaaccaattggaataccgtttgacttgcaccaggtaacaagctcagacatgaataacataaatccagacatatcgatcttatcaaaaacgcggcactcttctttgatagcgtccttgaaattctggatttgctctggggtgattgcaccctcatcaatttttgactggaggtttttgcgaatggtatcttcaaatacggccttatcttctgcggcattcccgtatagcttcgggtacttgaagctgatatccagttcaaatggctcaacagagtcggccatacggtttgtgttttctatcgcttcaagaaatacttgctctggtaatgcgccctgaattcggaacatctcaaccagttcatcgtaagtcttgtaggttaaatcaaaactatcctcgtccgcaaactcgatgtgctttgcgagctgcatgatacttctgcactctgccttatacgcatcgatgctatgggtgtctgttccggcaatcaaaggaataccgtattttttcgacatctctgcgaggtggcaattgtatgaaatctgctccccaaaattatgagcctgcacttccaaatagtcgtaatgcttcagtagcttttcatacataggatgacgaacactcattttattgagcggtgaggcgaggcaggcgctaattttaattacattgtctgagatgccaaggaactcttcaaaagtaattcttggcttgtaataaaaatggtcgtcacggtttgacaggctcaccaaattattgatttcaagaatgccgtcgtaattcttcgcaatcaaaattgtgtggtaattatctctcacctttttcttgccggattccatcatctcagcaagcgcttttttcgcatcctgttcgttcctgcctgactgcgcttctctccatagctcgtttgcgtctgggtactcataaagctgctcagtcaaatagcactcaacgccatggaggtacttgatcccagctttgtcacaggccatcttttttgcaacccactgatagatattgccatgctctgtaaacgcaattgcggtttggccgagctggacggcacgatcaatgtagtcttgaaattttgtcgcgctgtccagcaaagacaattcagaatggacatgataagcggtgtaatttttactcagaagactcgcctccctactaatgtccgtctactgtaccaaatacctcatcctcttcatcattcaattgttctggagggtaggggagaccgccaacataagggtgtttatcccatgagtagcggcgatccaggtcttcttccgatgtaaagaagcgtctggacggctgatcgtaatagacaccaacgctgcgcccctcataaccaagcattctgtctttcagaatgtcgatcagaacatcttctttgattggctttacacgccaaccggaaccatttagctttggctctccctgtttatccttatcagagacgcggtacaggctgatgatgcggtgagccaggtcgataatggcggagatgccctgcacatccatcttgttcagccggcgcatggtatcaattttgtggggatgaacgaccagaagaacgattacattgaacttaactgcaaacgcaatcagattcataatcaattcagactgcttattgtacttgttatcatcactacactccaaattgatagcggttaagttgtcgaggatcagaagctttgtcccgtactttctgacggaatcctccatggttttcagcaggtctgtcatacggttggatcgtccatcctcatagatatacagacgaccgcgatagaactcatctatttcacgctttgcctctggagaaaccttatagtaagtagcatcctgccaatgccgctcttcgatgtggcgctggcctgcaagcacagagttgagccagttttttgtttggaagtttggcagctcgccagaaaaaaggaatacatttttatcctgctccaacgactggcagataatttgattgataaaagagcttttgccagctccgttgatgccggtgatgatgttgagcgtcccctggaatagcttcatcagatatcggtcaagaggacggataccggttgtaataccgtcgatctggtctaagtccacatcctggatgtcggagaagtcaatcacaccaggaacaggactatccttggcgttcaagatgatctcaagaaccttttccttgccaagataatagagggcttcgttcagatcgttgacactgtactttttgccgttctccgcctcataaatcggtggcacttcggcaaccttggtgcgccaactgccgagacggtatacgacctctttctgcattttttgcccggcttcatcgttgtccgcacacacgataatgctgtcaaactgttcaagccagtcccaacattcttcgatccagtggaagttcccgctgccaagtggaacagaaactgcattggtgaagccggactcaattgcagatagacagtcaggctcgccctcgcagattaaaagcggagcggttacattgatgcggttcatgttaaaaagcaaattactggtatctgcgtttttctggcaccagcacttgttttcccctttatgtacctttctggatgggcgatacttcaccatggttaaaacatcattggtgtcgtagtagttccagacgatgttgccctcttcgtcctggcggacatccgcatagtcgagggtttgagggctgatacagcgccgcttgaagtattcatacaccttgcttttatcgccaagctgcacttcttttggatatctatactggtgttttgtttttactccaagctcaccaaagctgtacttgatcccagcgagatcgaacagtttttgacaagcctgaaggtaggtcatccccttgtaaataaatacatcaaggatgtcatagtttctggcgcaagcgccgaaacaatggaaagaaaatgttttccgattatatataaaagatgcgtggtcttcctgatggaaggggcaacaacacctcaaattctgttcatcaaaatcctgaatccccaactcctggacaataattttagcgttatcgtctccgagcctttctttcgcttcaaggatcgtatctcgatcaatttgcagatcccgtcacccctctcttcaggacatctgtttgtattcacagtctgcacatacatcgcagagataatggcaccgccaatagtctgggttggcattccagttatcatttactgtgattttttcaatttcttctttcgaccacaactcaatctctcgcattgtatctatacggaacggttcttgaatcattgtctgagatcggaaacagttaaattcaagcgcatctggatatttgccgtacaattctttgatagatgcagagtaaacatataactgccgtaggtagctatccagttccaaatccgattttgtaggagaagaacggtgtgagcgaggcttgagtaatcttgatttatgatcggtgatgataagtttcccattgtcttcactgaccaaatctataaacccagtccatggctttccagcgaaggagaagttcacattttgctctacgcccagaaccgtccttttggggaaagatagattatcaaggtaacgaaatccctgctcaaaatagttgtggtagattttttggtttggagcttttgatcttacattggaagaaaagtgggctacatagaaggttgaaagctcattcttcttcaatataccatctaagtacatttgcataatcaggtgtatgtaactaccaaactctgcaaaaaacccactcttctttttcagcggcctaccgtactcgtcccgatacaggtagctaagaaaccatctgtatgggcattcctcgaatgaagtaaggcgagaatagctccataccatatctgatatcgttaaatcatatcgaatagagcatcaccgccgacttattcacttagaacggcagattctcgtcgtcatcgtccgactcttcatctgccagtggagaggccggcttgctcttctgctgctttttcttggcaggctttccagcggacttgccgctgtccttggagccatcggccatctcgaagtcgaacatggcaaaattggtatactcgcggccagcctccttgtcatagcggtttgacacatcacaggaaccgatcttgatgcggcagcggccaccaccctccagcgcatcggagatcagattgatgtttttgtttgcgtcgccaaccatggagacaaagccgttgaaatcggtgacatactcatccgattccttatccttgcggctggtggagatacggattttggagaacttgctgccagtctccgtaatctcccacacggtcgcataagcacctgtatgaaaccccattacttactacctccatccttaattgggcattgctgttgcagctcttcgtagagacgcgccgcaacctgcgggtcagtcagataattcatgtagtcggcagtcggcttattgccattgcgcacatgtttctttaccagctccgtaagcgtcttgcgggcggcttcagagttatcatttgcgtccaaatagctatggacgtgggcatcgattttggtgacaatctgctttgtcactgccatatttgcctcgacctctgcctcttccttttggctgcggtaatagtccgggtcgtcctcaggggtagcgatctggaaatactgagtcaggaattgacgctgagcataggtaaagccgccgccctgcgcctgggacggatctgcctgttctccgcaacaagtccatggaacccgtctcgactccccgctgtccacatcgatccaggtaaaaatgatatcctgggaaacaacaaactcatgaacgacctcttggattacatcgccgttcttcgttgccttttgcttttcgtagtggtcaatcacaatcttctgcgatccatggacgcactcttcctcaagcagcaggccatacttatccatgccggctttcagtttagcaagaatttctacgatagacgcataggtgtaaccgtagcccttcttgctcttcttcactacatctacatacttgcgaagctcaaagagctttcggttcaagttcattgttgcattgttttcagacacttcgttcctccatcaaataggttgcttccatatctgcaaggtggagcagaacggcaaatgggcaagaatcgtaagccttgctgcaaccaaaatcaccgccttttacagcactgtcaaacccggacatatgccaacggattgcataaatctcttcgtccgtcaacttcatgtgacgaagaagaataatgacagacttttcaccatgtccaacagggaattggtcttctgccttataaaacggctctttatgccattgaccggttgcctcatccttgacatttttggtgcctactgcataatagtttgccttgcacaaatcatgaaacagggctgaaattgcaatggtttcttctgataccacaatctctggaaattgcttaactaaatcctttaaggcatcgtaaacattcagagaatgctccagaagaccgccctcatgattgccgtggaatctggtgctggctggggcatagtaaaagtctgtggtttcgatccaggccagcaaattttcaatgccatctcgtgaaatattctccctacagatagagagataccgctgttttagatcctcatttaccagggtttatcactcccataaatcttcgatattcttttgtctgtaacagttgtcgcaatacacttcgccagattttatcaccacatagccatccaatatggggttcccgcagtagtcacattgtttatacggaacatagttcccaccgcacacgggacatccagtgaaatgctcatagggcggagtgtcaaggccgtgtgtctcaacataatcctttggattttgaaacacacagccacactctacacatacgaaattactcgttctcttttacccgatagcccacgcggacacccatgctgtcgtcaccggcgagctgcttgatcatcttgtcaagcccaataacattgtgagcgggagaggggagagcggcagcaggctcttgctgatcaacctccttggccttcttctgcttcttcggcttctgctgagggcggaatgcgttcttgaactgcgccttgaagttcgcgcgggagccataagcctttctcatgcaggccatggcgtagccaaattcctcggagaacacatcgttgtcgcagcgcacgactgtcttatcgccgtcctcccagtacacaatggtggcaggaggattgaagataacctgagtcggcatcggaatcagggtacagggagccgtcttcaccacctctacaggggcaatgtgcagttctccaaagttaaaatcctcggccagatttcggatcagatccattttagtcataacttttactcctttttagattgattaactaattcctttggatggacttaaaattctggctatgtgtcagaattgcttaactaattcctattacagtataacaggttttcctaaaatgtcaagaggtttttctgggtttggggatttttctatcacgcaaatcccagttgtttgagctgtaattgtggggcaaattcttccgccgtcctggactctgcctcgtctggttttactgtttggataggacagatccacagccccccccccacaacacattcaataaaaccttttttcgttgcccgcttgattcttacaatgttctccaacttgttctctcacctcatatactgcgcaagggggattcccatgtatttgtgcgcggagcgttgggcaaaccaatataactttatttatctttgcttttcgcccctgcggatcaattacccccgataaaccgccaagaacaagtatcggggtggattgcttcacttgtcactttgttcatccttttatctgatatcttggcataaagtaatcagaagttgttacagcggcggcaacaccagatgtatcataaattctattcgataatgacggctgcttgccatttacctttgaattgatacataatgtttcgcatctcacttctgtactactttgtaccatcctgtttttgcaccccccccaccagcgtcagccttgatggtacgagaaattccgtcaccattgtaaactctgttggcatcaccgttatagtcgttgatatagccaatctgctggagatcaggttcctccccgatgggcgagggaagctcagcgcttttgtgcgtgtccagtttcgtaagagctttttcaaatgcgccgatacctgagaagaaagaaccgacaaccatatcatcgaaaagatacggcatcgcatcgtacaggttttccataatgtggagcagcacatctaccacgatgctgttgccggcctgtttgtagagctgggaagaagaacggtctttcccgttataaagattttcgttcattctggatttggcactttcaaaatcatggtcttcaaatcccataagccgccaacactcctttggggtcagctttcgcacacgaaacccagggcggattgcgattggtgtttgcccgccgcccattccagcggcgctgtttacgcatggacaaataccatcggaacgcggggtttggtgcctttgtaacccgccaagcattgtaatattatcgtatgtctcaattagtttcgtcccattacctggagcgtcatttttgaaatttggcataacagtccctatacaagtctgatctgacttgatcctcctattgtaatcatcgtaaattataatgtgtggctccaaattacccccccccatacaggtcaaggcgggagatataccgcttgggtcgtacacgcgtccacgctgcggattatctatctttgagccttttgtccaattgccaacttgcaatatcttatcaatcaacttctataacccccgtcatttgctggtttccgaaccccttataatcacgcgcaagcaaagtcatggcgacatcgctatatccttcaaacgatgtccctttttgacccagcttcgcaccaatctgctggcagcagatcccatgtgtgtctgtcggttgaacttcgtccgcttgttcggacggttctgctgatttcacgcagcggggggggcgatcataccggcaactttctcatcactgagataatatttctcatcaacattctgctccagcatatcgctaagggagtgttttagaggaataggggaggggaagttgaattttccattgtcaaggtctttacgaatgataacgcagtagacgcgctcacggttttgagggataccataattttttgcattcaaaacttgccaataaacattgtagccgtagtcctccagctcctttacaaagaggtcaaaagtagccttaaaacgagcgcctacaatatttttaacattctcgtaaattgcaaatctcggtttcttttctctcaaaaacctgagccactctaccaagagagaggatctcgtcttttcaatctctgttgatccacatttggggcatttgtcccgcatagtgtaatgggcttctaagggattgtatgtatggccgcaacttttacatgtccatgcagcccccccccctgtttgcccgcgattgagaagtcctggcaagggcttccgccaaacatcgtattaaaatcagggacagatttctcatctgcctttgtgatatcaccaatattcagtgacgaatcgatgccatggactgcgcaatagctttctgcggcgtacttatcgaactcgcagaataaggcagttttgtagttcgtaatgattcctccttatcatgccattaagcggcttttttatggatttcttcaaacacaatttgtttaggtagtataccactgcacacatatacgctactaaatggtggatttaatgaggggatttgttccgaataatccttaaaatatgctatccgcttattcatatacatgatttcaaaatcatgcgtcttaaacatgttgaatcgtctctggctttcaaataacccgacaacaccaacaagcattgcgaatggcttttcaatgcgaaacaaacgatcaagtacatctgtttttagggagtagggaggattactaataataaaatcacacattggtggttcaattgtaaagaaatcttggccgttcgcaatatgtgttgcaactacttcatagccgtgatttctaaacatcttcacaaacaaactatcctccgtatcaaaaggacaccatatagttacgggggggggtggaagatacttcataattggtctaatagcatattctggcgtgtaaaactcatcgtttttactcccagcaaccatatccaacttcatagcgcacctcgaatagattaactaatttcttttgaaaatctttcttcaagctcaaagatgcctttggcctgacctttgtaataccctttgaatgggcgttcgattttgctttgcagatcgcataacttgcgccaatactgcggcaaataccgatagatatttctcaattcttttagatttttgttacagcagcaccaacacgaaatacgatccaggatatcatagagatccatgtactctacgccggcgtttgacactttttcaacccagtaaaatccatggtcatgacaataatttaggcagtctgattctctcatgcccaactgtaccaacggcataactttaccatcctgactcgccttttcaaatctgccttgctcatccgctgcaatacctacataatcgattaccatatcattcaggcttcttttgaattctctgatagactgtatcttttcggaagttccccagcgacataagcctccacaccaaccatatccaaaatgaacgcccttttgcttactaaacacttttttctcaagcatagagtataaaaatggacgcttcgggtttaactcgacataagaaatccctctttcctgcaaaattggcttgaccttatctctaatgttgtagatgcagtcaaactccattccagtgttataaaatataacataatctaacggccaattctcttctatgagacggagcagcatggcaagagaatccttgccgaagctgacacttgcaatgtgcttcataccgaccacaaaccaaactggatgcggtcaactgtttaatcctcccatattacttgccataaggctttcacgcagtaacaaacaattttacctcagacttatcaatcttctgagaacctggtttaccaggattggtattagctcctttcttttttgctcttcatgtaaatgccaagaatgttaaaatgatttgcgcgatatggatcgactggtcgcatatcagatttatcctcctttcatttgctttcatattatctaccagcgcatggacgataaaattcaccaagaaagcaaaaataaatccgataggacattgaaattccatactgatggcgattggtagcataatcataaatgcccaactaaatccgtgcataattagggctacgatataatcgtaccgatacattttttctggagcggttttgtgccaccactccttttgcttcattgaggcgagaatcccttgtaaatagtaatcgtccacaatatggagaaaaatcataagcagaagtaaaaagcagttattcatatcaacacctacttcacatacacatcacgatatacgacaccgaggcggtacgcttctgaatgactcccaacacatacatcaattctgtttcccttaattgcgccgcccgtatcatgcgccttaaactctccatacccgtctatgtagactgtactgccgagaggaatgacagacggatcaacggctattgatacccatggggtaaggggagtgccggatgcggttccagaatatcctccattacaggtcgagcacgggcaataatgggagatgcggaatgtgccgatatatttccccttgttattttcatcttgaacggcctggtcatactgttggtagagatttgtgagaatgcgctgctgttcccaccatttctcctgggcaaaaagaattgccgggttgtcttcactttctccgaagctccttacatactctgcaatctgatgtgccatgttctgcttttcaatagcgctgtcaatctgctgttggatctcttcagaagttgcggcctgtgctggaaaaaccagcagggcggctattacacaagatgataaaagttttctgactaacttgataaaaacactcctttcaatcgtgtaaaaacattccctctctataacggtctcccattctttcgatatactcccaacaggggaacggctctgtttgaaaacacttctcacaacaactctcgcacacaaagccgtactccttgttgtatggacatgggtttacctttaggacttctttgccgcatatggagcacttcatttcgtttcctccgcaggtgccatctttgccttgatgtccgcctcgtgaagagccatgacatccgcgtacattttgtcgccaatcagtctcttaaactttgcgacagctttttcggcgtggggaacacgctccaattcaaaggggcgcatatgccactgaatcaccccagcgacatagaggacatcgagagctggctgggtgtaaaagaggctatcatatgcggagacatgatggtgctcatagtaatgagcaatgtcagtgtcttcaccccggctgttcttaaacgccttggtaaaggctttgccgatatcatgcagcattgccgcctcatacagctcaggggaaccgttgtgaatgttcgcatatgtagcaatgcagtgagcgccaaccgtcagatcatgatggggattatcctgatccagccaggccaagccgttttcaccccagaaaagctctttcacatccagcgtcttaaaaccatccgggtaaatcacatgaatcttgtcccatccctcataatactggggaatccaaatggacttatacatccgctccaggacttcataggggacaacgcgatcccgatgcttgctgcgctccacgcaatcggcaaaaggagttgccatgaattcgcacactttttcgcacgggactttgctcagccgctgaatggtgtccatacggcgcttatagttgatattcgttgcgtcgtaaatgacatttctgccgttgctcaaatcctcgatcacacggcggtgaagcacatcaaacaccttaccattattattctgatcctggacatccccaaggatctcttcgcggattgcgtcgctggaatgaaccacagcattaaactcttctttcagcttttccgcatagcaggacttcccgctgtaaggaagcccgaccatcatcataaacatcggtttcatattgtccctccatatactcaagcagcacagccgatctcgcttttgaaattgtacttaaacagatcaatcagcgtctggtttaatacatagtcaacggctcgattaacggttggcgtatgctcttccatatattttgcctttgtctctttcatctttgatgtgtagacttccgccatattaacagcgtcatctttactcaggcacccaaatttaatttgtttgagataatctgctttcttggagagcaggcaatcttcatatgcctcacctgcaagccaccttgtcatgaattcgtcaagccttaaaatatggtgcaattgctttgggtcgtacccgaaccgttcaatcttatctattgttgcaggatatgggtggcagagcgccttttgcttctccattgcggtgccaaccatacaattcagagatgcaaagtcgttgtatctcccgatcaactcgcgggagtccaagaccggctgaaaaagagacgcatacttcggattaagaattctgtatttcgtgaaaaggatctcaacaaaattgatgttctgttttctgaagcaatcaaacatcaggcggatgtctttcacatccacatgctcatcattttccatgatgtgcgtgtaactatacggctttcggttcaatacaaaatcctcgaaagaggggaggacgatgagctttgaatctacatcgctcccctcgtagtcgagcttataattttgcgacccttgcaggaaaatgccgacccattccgggtgcttttcctttacagcgtctaaatgttctgaaagccggcgcatgattttttcatcatggctccgctcttctatctcaaacactcctttcattaagtgaatggatttttgttcccatatccaaagaagatatcaaaaatatcagacagatcatcgtcgcctgtttttgggatatggtttgacctctgctcgttctttttgtccggtttgtaatcgatgttgtaggacatgttctttgtccagcgctcatttttacacgcttggcaagcagagcaccggataactcatttccgttatcatcgaaaaaatccgacatctttgggacagagatataaaggtgtgttaccccgtctacggtgtcttctttctcaagacggacaccatattgccgccagggttcgatcatttccttgtttgtcatgcggcatccgctacttcctgggactcttccatatcaggagcagaggccacctctttgataatgccctccagcaccttgaacgcaaagttcttgtgcttgtaagcggtgaactttgggcggttcacgatgcggcagacaacgccctcgcgcacatgggacttgccgatgggatcagcaccgtcgtagtaacactcggctacggtttttacccactcaccgggactatcagactcaggcacaaacccagaccacaggagcgggacgcagttcacgcccatctgttcacaccgatagcgcatgaagaaaggcgggtactccacaacatccccatcttcattggtcatggtcatgcgatacacataaaaggcagacttcggagcgtctacaccattcggatcacatccataactgaatacagtctgcttgccgtactgcttcacaaactccttatctccgaccttcttgttgtcgcaggaggccatgatcggcgtaccgtcgtcggtaaatccgaccacctcatagtaaacggtttcgcccttatgaagcttgccctcgaacaccttggcgtgtttctcccgaaatgcgttgcttccataaaagccgccgtcaaaggtgtcgagaacaacgcggcgggttcccgtgacatagccccagtcatagatcggtttcccaggccggcgcagcagcttgtccataaaggactttttataaccagacagcacggggaggtagccggttcgctgggatgtaccgtgcatcttcagcgtgatctcaacaagatctccctggtggaaagcgctgaggttataaggaagctgttccgtgtccgcatgttccatgaacaggggagagatggggtctttgcgctttctggtacgattgccggcaccaacagaatttccctttttacgaactgggatatacttttcacagatcgtaacgccgttgagctgcgtaatagtgtcgccctctttgagctgagagatatccgtgaaatccgcaagggatgacaggggcatgaacaggccgtcgctcttctcgccgcgaagcttcagcgccttgatattcctcttctctggatcgagatagccaccagcggggttcccgttctcatcttttctgcgcagaaggtcgttcttctgggcgaactcaacaccaagttggccgtcaacggggaagtagacacccagctcgtcaggctgcgtatcaagcccaacgattaccgtattaccgaaacactcgccgcagagcaggcgatctgcattggagtgcttacgcaggtttttaatcctggttacaaaagcgttatacattgcatcacctcaaatagattaactaattcctaacttaatcgctgtcaaggatcttgataccgacacctttatctccaatctccttcaacacggaatagagcgtttcatcgccatagccaatattcttgaacagaatcgtatatccgtcttcgatcagattcgtacactcatcatacagctcttttgaaaaccatccctcagagataatcttttcaatggtatcaatttcgccgcaggattcgttatccaaaatacaggagtccagttcctcttttgtagtgcatcgttccccagccgtcgtttcatacccagcgtcagagagcagaagcatttcgacgatcccgtaaaaatatttgatctcaggatatttctctgcgacatcagaggggatatcgggattagctttatacgcaattatgaaacttgagctgctgctatttgtaacaaaatcagttcttactttcatggttcaccccttgtggatataatcatagaaacgtctgtatgtgccgaaccgatctttcagactggcgacgatttcagcggggttcagatggaatctggaacacacctcggtcacatactcgctgtcataaagtttcttgcgtctcttattgagctgttttaccttatcgaaaacttcatcacgagagactttatattctctttccagatactttgccagatctttgttggaatactcgataaactggcagatggggcagcactcttccgggatgctataatacccatcatcgcgctccagcatcatctcttccagctcttcatcggtcttctcgttcagctccgtatcggtcataccattaaagcgagaccaggattgctgaatttcctcctggatcagacgaagcattacttctctgggtgcgctcagcatctcatcctggcaaatggtatggccgtttacgcactcgaccatctctgcctcttgtagcgacatatcccatccgctctcgacgttaccgcaaatatcgcaaacaaaactggagctgctggaattggtcacaaaatcttttctgaatttcatatgacacctcttttactgcttaatcgggcatactgccatgccccgctcttttagaaattggattgccttgtcagcggaaagatgccccataatccattcaagtgtgacatctttcttttcttcattgatttcaataatagaaattgaagaaaagtccttttgaaacaaatctataggttcagcaagccactctttacacaaatgtaaatacggacggtgtaaaataaatgtgcgggaagaaaatatgctgtgatctggttttttctcaaagcgctcaaacgcctgttcaaaggttgcatcttttagaattatttttaagtcagttacatcgctttcctctttgcaaaaccaacccgtatatccaaacctgttccactctccatggtcgagttgatacatataataagagttgtaaatcttcagcataagatttttcctcaatggtgattaaatcttctcactgtaaattcttgctcagggagaatgtgatgctcaagctcagagccgacatctgtatgatcttcatactccagctctaccaggtattccttatcgccaatatcctctttgatttttgagagaagttcttttgtatggcgctctacctccgccgctcgctctggggaatcgaagtagtcaatatactcgctgtccgggtgctcttctctccacttcttttcaaatgtgggcttatcagaagaccaccaacctccctcgccgcaatccgtaagaaattctgcgtcatcacgaacttcatccatgactaagctctcaaacatttctttctggatcggcgttgcctccatgaagtcatttagaagctgcgttacatagtcgctgccgtatcgccttgtcatggcggagatcttgttctcgccgtcctctttactctcaaacgcaaggataaagctgctggaagaactgttggtcacaaaatcctgtcttactttcatagaccctccttaaccgtctctgccggctccccactggcaatcgatttctgcgaaaccgttttcctctgtgatatcatcaattgcggcagtgttgaaataagagtagtcaacatcgtagtccgggtagccgtcctcgtcctcgtcgatatcctgccgatcctccgccacgacgaactgatcgccggcgtgttccttgatgtaatcctctttcggtgtaacgtcgatacctgcccagtccgcctctaaccatctgccccatcggtcgttcttgatgttctccagaacctcttccgatgtataaacctcaatacggtctttgtgtctttcaataatagcctgcgccttgataggatctgcgatgcgggcaaagcagcaaatgaagctgctggagctactgttcgtcacaaaatcactacgaattttcatcttctcacctctttaatgatgactttccaggaaatcaatagagatatccccatttccgtatctatctgataatccccatccgctaaacccgttatggataaagttttcaaaagcaccgtcgttatccccgtcgccacattcatatcgaatagactctccaggctccagaataaatcggtcttctgcgtcatccagaatcttagagaccaaagataaaacgacatcccttgcagtcattgtcttatcagaatggtttgtaatcaaaaaactgctggaactgctgttagttacaaagtcctttctatacttcaaaatactactccttaatcaagccatttgttttccaggtacaagaaagcgcatacagctccacatgtgagtagcacccatatcacccagaagactacggtataaatagtttcgttctgttccatatgggcaatcacctgctctggggtcatatcacgaaacagggcagacgaatcgttgatcgtaccgttttgcagagatgtgtaaatcgtacctgtcatcggcatcggaacgacattgtaatagtagcgatcatcggaacccacataaatataattcatgcggttatctaccccgacagaatcaagattaaggcgctcggcaggaagttcgattgactcatatgggaatgtgcgcccatggaatgtgatttcctctacatgccggcgatcactccaaacatgatcccatgtgtaataaacctcagtctcggtgcgtttctttccgttgctatccgttttggtaacggttctggtgtgcctggtgtattcctctttgttcttttcaatgtagataaatccgccgccaatttcatcataggttacagacgaattggatgatacatcgccatatacaaggacatttccaaaattggtgtccatcccataatagaactggtctgtattctcgataactgtagcggtgcgatatgactcgctttttgaaactgctccttgcaagattgcgtcgctgacaaaaatgccaatgaaaatcatcacaaggacaatgatgacactgaaaagaacctctctctttttaattctcatcggcaaacaagtcctgcggtgcgtctaccggcgcatcatattccgtataggtcgtatcaatcgcctcatatcccaagatgttcagaatgatattgttgggaaaagatctcaccattttgttataggagcgaacctgctcattgtagttgttgcgatactgtgcaatctggttttccgtcaacgcaagctcattcatcaactgcttgtagttttcattggcttttaactcaggataagcttccgcaacagcagtaatttctatttgagcgccctctacatcgccatgctccatgctatttctggcggaaacgatactctccatcgtctcaccttcgtaatcctggtaagactgtacggcatcaaccagattgaacacaaggtcatagcggcgtttctctgcgacattgatatcggcctgggctgcgttaatctgttcctccaaaaagatcgccttgttgttggagctgatgaacagaccgccgatcagaaggataatggcaaggacgattcccaccacaatccaagtggttttatttttcacttgtagtcactccattcatgttacttttgataatttgaattgcctcttcatcttctatataaaatgggtctcgatcccgaaacagagaagagcaaataagcaattggcaaaacctcaaatcaggatacatttcccatatatccgcaagctgattgcagaatttgcgaattctttttatatctctcatggttacaccgtcttctccgtactgctgcaaatcacaatctgaggacgaataggacagccgcccatgcaggctgatcgcttcttacatcctgggcaggaggttcggaagtggtttctaaaatcctcaaattggctgctgttccaggcgttttgaatggtgtcgttggaaatatcgtaagcccagcgaagatcctgattgtcaaatgagcaggggagggctttcatgtcagaagtgatatacatactccatcgcccaccctcgcatgtgtcgatactgttaggatcgatattgtgcgtataattgagaatagccgggatggaacaggagtcaaacccaactttgaacggcgcatccatgtggtcgatggtgtcaaagaatttctgcacctttggatcgccggcatggagcacattttcctcactacccaggccaactggcttatggagcaggaaaatcactgcgttaataccggtgggaaaatcgtggttgctcagccgctcgatagcctcgtcaatggagttctgaccgagaacataatgaatgttcgttttgattccggcatcaagcagcatttgaatggcgcggagggtatgcggttgacgataccaggaaattgccaccgctccgcaatactctttgcacagggaaacgatctcgtctgtaaagccaaggccggagctggtgaagttggggacgatgttgctctcacgacaatactgaagaatctccgcaaagttttcatgctgatcgacatcgccgcgtccgccaagcgcaagctggaatgtcttacccttacactcatccacgatgcgcttgaaattttcaatggtcatatttggatgatgtgttttaaggccattctggtagcactggacaccggacttgagacaaaggccgctggctccatgcacacaatgtcccatcacgccgacatcaatcagctccgggtaagatgtcgtaaacgggtcaacgccggtgtccttcccattttcatcgatcactccgcttctggcatagaaccccgtcttcggatcaaacatggaaacaaagcggtttttacggtctatctttttgagcatataaattgatactcccttcctcttttgcggttgtttttcaccggtttttattgagattatttgtgtattttcaggttggtagcgattacattttgccttgtgttcccaatggaacgatagaagccgtccgggttgaattggcgaatcacctcatagatttctttccttccgttttcggtgagaaccaggttggatgtctcatccgcatgggtaaatgcgaatgtgcgatttgcgcttgggtacatcttggaaacctttttcagttcgtttccgacagcctcacgaaatcgacgctcttcaaatctgccgtatcgaaagctgccctgaaactcattccacacattggtgtcgtcactccgctcttctccaaacagctcttcagaagtacattctgtagggaaaagaccagcgccgtgccgcgtaaagtaagttcttgtaacaaaacaaacctccaaatcagcagattttgaaagcccgctattatagagaattttgttgacaccagagaacccagtgcgggaagtggtgagattgggagcaaactcttcatagaactcatccagcaacagaccttgtgcgccctcaaacacaatgccaccatactcgtgtacgatattatcatccgtcactgtgcaataccgcatcatctcattgacttgcagaatccagttgtcgatcacattttcactgaggataacattcaaatccgcaagagaaacagacgatacgccaagatcttttagccttttcgggaggtagtagtcgcgctgcatctgaagggagtgctttagatctacagaaccaacacagccgggggtgattgtgtacccaacgccatggttacgataccgcagaaccgtttcgttaatgccgattccgcagcttccatgcctttgatcgccccttgctctctcaacaatttggtttaccagcatgtcgtagggagttgtaattttacagttgtggttgatatataccttgggctgcaaccaccattctctgcgaagattatcaagctccttgcagaacaacatggggttcaaaataaaatcgccagaaaggtaagtatcggtattcctcacgaaactcccagcaccaaagtgactgaacacatgacgctttggatttccatatgcaggaaccacaacggtatgtccggcctgtgcgccgccattgaaccgaatgtttaacacactcccgttctttgacaacttgctacagaagtaatcggccatcaatcccttgccctcgtcgccaaagtttgcgccaatcacaacctttacctgcttattcataccaatacccctttctggcatttcatcttattttatttttagaactcaaccacatcgctcttggcggttacactcttcagaccgtccagggcgctcttcaccacaatggaggtggagccgtcccagcttgcggcaacctcgtcaacatccttgccgcccatggtttccagaatggacacaatgatctccggcaccttggtgtaatcgctgaccttgataacgcgctcgcccatcaaagaccgccactttgcaattcggctgctgtccccgtaacgatccagaaccagatggaacacctcgtacttgcgattgaccaggttgagaagttcatctacagggatatcacgctcaacggtgtcgccaaagatttgcttgatttcccgcgcagtcagcttagtgggataacagtcgtcgcccatggtgaaaaggaaacccttttgatttcgcttgttcagacaatcaatgtccgtgtgcatggcggcaaagtaccaggcgaggggatagctctcaaacccgtttccaccaccgccgcgctcaaagtagagctgcgtcaactgctccgcaatgcggatatcggactcgaactgcgtagcctgaaacggagtggtgtcgcacatggcatccccaatggcgttgaacataatctgggggtcagtgacaggcttgcgatccagaatctcagagaccagcacattcagcttctttgccacaccctccagaatatcgctcatggagcctgttacatccaggccaatgataatcgcattgctgttcgggtggtctgcgctgtcccggctttctcttacagggatatccttcggatcaaattctgctttcatcattttgctggtgtaaataccagcggcgctctttccagcgatagaactcttggaataactgtcccaatcgtggggagtccaacttccacaacccatacttcattcctcctacttgtaaatgtctgattttgttacttgcatattgacaaacttacgttctccgtaagatttatccagtgttttgttccatcgactaaattcctccaccgcatcatgcgccgaccctgtattcagaaactggcgaaatgcttctgggagagaggacaaatccgatatctgccggccaatcagctttgcggattccaagtccgtcatggcatcggatttcttttcactctttgccttgagcggcatcacatcgtaaataacacgcgggactccaatcatccttgctccaagcttttgtgtataccaccagcctccgagcggaagaacggcgtgtttggacggagtgataaaacagttctgtatggtaagcccgttatgagcaattcctgcatagctgaaataacagcatagattggaaagccggctcataatccaggccacatgacgatcagggatagaaccgccaaagaaatctgctacatcggagagcaagaaaacatcttctggctttttcagcacaatgcagtaccgtccatcttccagagaaagcgcatacaatatctgcggcatgaatctggatatctcatcctccatttttctatttgcataccttagtcctttgatttgctccactgcgttatcaaaaaactttttatttttctgcgcaaacagatatgtaacggacgaatttgcgatatatgcttcgccaagctcaaacgggacttgcttcagatatctccccacatacttctttccagacttatcttttagaatgatctggttgctgacctcccaggtgccggcatcaatcaacctaagagcttcctcataaagctggtttacctttgccatgacctcatttgcttttggatctgtgctaatatcggggtgatacacccttgcgatttcccgatattccgcaatcacatcttgtttgcagtcagaagaaaaaatgtctccgcattttttagccgataaaatttgctgcgaagtcaccatctgaaccaatcaccccatttgatgtaagtatttttccaggccgtccacagcgttgttcatcacgctaattcgccctttcatggacgcaatcgtattttcaatctcggacttgtctctcgcaatgtagtagccgttcccattggaacagataggatcgcccttgcatctcgcagagttcaccatgtttctaacccttacgccagacacgccgaacgcagaagcaattgtggagccgcgaacaggctgctttctgccgttggaatttcttttgatgtattcggtaactgcttccatagcacattcctcctggtaaaatcaaaggagaggtggtggttccacctctcctaaaacgatcacagtcctctcagagcctcttcaacgggcgcatagcgctcggtgttcaaggtctcaagcaagcactcgtaaggatcggtctgtccgctcataaccatcttcacgatgttcgtgctgaacccgctgaccagggcaacgccaaggtcgttttccttgacaggaattgtgccggttctgctgttcacattccagaatacaaggcggggaagctgatatccggcatccgcataacgctgggcaagaaccgtgaacagccggtcatcaacacatctgtaccctctccgacgggtgttggtcacggcacatccgtcaaactccatatcggaaatgatgaggatgttgtgagggatgtcgctctgagacatgttgttcttgatagcggtgtccaaaatcaggtcaaacacggcctcgatattggtgttcgccatctcgttatggctcagcgcaatcctgatcttatcccgcagcgtcttgccgtggctgaaatcaaccagccgaggattttcagagaaagtgatgtagttgtccttgaactggccggaagagcgctcagcgaaatagatcgccagtgcgtttgccacatccagagcggtcacattaccgcctccgactctgctggtcatactgccgcttccgtctgcgacaacgatggtattaccgcatccgttcacggtatcgggaagggacttccaaagagcctccagcgtctgatccagagccttaacggtcgtaccccatccaccattggtgtaccgatgtacgatgtcgtgggggaagagggtggaggcgttgatcttagtctcgcccttttccagcttggaaaggaagtcgcggcggcgctcttcgtcatgacgcaggaacgcgctgttgtaaatcagattggcgcgggacgggacggcctcatacttgatctcgtcccactcctttgcggacatcttcttctccacgatatccagcttcgtgcgcagagcggaaagcgcacggcggtagtcccactcctgaatgccgatgtaaccgcaaatcagctttgcatagcggcgcttatcagcagaggaagagtgcagagaggggagccactttgccagcagggaaacgctgttgccgctgttcatgttggcaatgtcttccttgagctgggcgcacaccacatccagtacatcgccctgcaaatcggtatcaaacaggcaccaaagatcgtcccagcggccatactcaggcaccagccgaatcaccggcttgacatactcaggagagttctttgccatatactccagcacaacgcggaacagacggcgctctccaaggccaccgcgaatatcgcgggcgaagaacagccacttcatcgccgtgacctgatcctcgaagaaagcccttgtgaacctggctgcgatgtctgccggggttgctctgcggagagaagacacggcaaagttcagatcgagcagctccttaccggaggtacggtagccaacagcgccgttttccgtaacagagacattgtactcgtcgttcagcgtgttcttcattgcggacatgaaattgttgctcattttagattcctccttagattgattaactaaatcctaacagaaaacttcaaggcacttatgtccattgtgttgctgcttgtgccttaaaggaggcaagaggcggaaaggatttgaaccttatcgtttcagattatgagtctaaaaactttaaccagtgttttgctgtgcgcctcttatcatgggagcttttttcggaaacttcccagaaccgaaccattgctgccaactttttagggactgtttgaatggtgaagtcaactcttacccctggtgcagcaggcaggaatcgaacctgcgatggcggctggcctttttgaatattgctgttcgtgtaccaaaagcacacactttttatagccgctgtcttaccacttgaccactactgcgtaaatgtctgtctttccagactgtcaccatttctgcccatttatgaggttggtttagaatggtttaagcagctcttcctccggtgccaggagcgggacttgaacccgcgaccacgtgcttaacaggcaaatcagaaagttgctgtgtgcggatcatacaattcgcatggggtgatattacgtgctctaccgctgagctatcctggcatatggcctatgcggtcagaatcgaactgacaatctaccaatcgcacccgcattgtacttctgccggcgttacgcatagatattggtgttaggctcaccagaattgcactggagcacttctccggttctggtacaaccattgaagcgtgacccttacccaactgtgatcatattttagatgttcctacaaccaaccaagtaaagaaaggaggcggtgcgggagagaggacttgaacctccgacaaacagattcctattttgatgttgctgtacgcgcttttgcaaagcacaaactattttgtccgttgctctaccatctgagctactcccgcatgttctattatatctaacaatccagactcgataaaattaaccgcactggacattattttttgtgacggctttgggagcttcggagtcgaaccgaacgcaaagtttttgcagaacttcaaagaaaattgctgtaagtgtccgccgccctatacacattgatgctgtcaccggacgctcccatttggtgctggtggcggggatcgaacccgcacggggtatccccacgggattttaagtcccgtctgtctgcctgttccatcacaccagcagattggcggggcagacaggactcgaacctgcacatcctttcggattactggtggtttagcaaaccacttccttaccagttaggattactgccccaaaacaaacaaggcgctttttatgttgaatttcaagttcaattttgtgttagattgctgtatgcgccttaaattatcttcacccacaacacgacacatgatatgttttcaaatcttcatacatataaaattgctgttagtgtcgtaactaccgacatccgattaggatgctgtttcgctctcttcctccgcttcatcaacggccaggagcttggagaaattcttgatcacaacgcagttgcgcttctggttatgaaccagcgtgtcacgctgctctgtaagccgggagatatactcgtcaatctcggacttagtatcttcaatctcctggtttaccaattccaggccagagattgcccgcgttacgatgtcaacggcactctccgcatccgcctggagctgatgaagctttctctctttctcagagatgatatcaacatagattttcttcatcagcatcacttcaacccttccatactcacgattgcattggaaccggaaacagtgggaagctcgccgttccacttctcatacataatcttatcaatcagctcaggtgtaagagaagctgcaatctgagcatttgcatcagcctcggcctcagcagcaattctggttgcttcagcctttgcctccgcctcgatgattgccttttccgccgcaatctgggcaacctctttatctttctcggcctgcaccttggcagtctgcgcttcaatatttgcaagctcaagttcctgctgagcatttaccttcttctggatcgccgctgcggtctctgcatccacagaaatatccgtgaagtttacggtgtcaatgatgatgccgtatttatcaaacttatcacgcaggtatacatcaagctccgcattgatttcggttcgtttgtcgccaaaaatatccgttacaggataatttgcagatacctcttgcgtccaggcaataatcttgggtttgataaatgtattcttgatttcctcgccggacttacccttaaacagggtaaaggtttccgctacacggtcttcgtcaaagcgataggagaactccagattaacacgaaccgtcttcccgtcagaggtcgggatgttgaagctctcatcatcaggggaatctcccttgctctcagcagtaagataggactgctcaataccgattgagtatgtcgttaccttcttagtaggggagacaaggtgccatccctgttggagaacctcgccgtccacgccgccgttcatgttatacacgacaccgacatagccggctgggattcgctcggtacacataagacccaggattacaccgccgaaaagaatcacggcaagcacaattgcgccgataaaaccctttttaaccattctgttccgtaccatccttttcttcttcagttttttctttgtagtcatcttttgacatggaagtttttgcgtcctttatcaatcggtaaacgaacttcccgatagggataaagcaaaaggaaagtaaaagccataacactgcaacgccgagaaacaggagcaatataaaaactggcatgttattcctccgtgtctaccttttcggcagacttcttctctttttcataatcgcagtcgggcggcttcagaatggcgatgtagtcgtctccgtttgtgtaagaagacagaggacgaacctgcccattcggttgatttctccgacatccgcacttataaaagttcagatatttgcaaccattacaggtgagttttcggtctacccaataatagccgctgtcacttctggccttgcccatatgtcatacactccttattgttaaactgcgatttatcagccttggaatcaggccgatcacccgtccgccactatcgtcaggaggatcgtccagaggtcttccgcacattggacaaaaccgaaagtgaatttctttcccagatgtgtccacaaaagtgtttgtacctgagataatgtgtgcggagtagtcgccggtgccgtctgttttatccacagcccaaaacggcctctccttacgacagtaggtacatacaatcaaattacaccactccaatcatctattttggaaccagctctatttatccgttcaggtatcgatcctgccctcccataaaaggtgttccacctggaactgttcggatataaaattgattaactaattccttatatatgacttaaagggtcgcccctccaagtcaatgtgaaatcatccttttgtatctgggaagaagtattctctgaacttatgataatcacgaagcttcttatttgcaacggatacggacggatatgtttgatggaagaccctttcaatcgtctcaatatcaccgctctgaatctctccgttttccagctcgtatgtgtatgcccggttaaagattccagaccagtaaaccttgtcataggcaaagaggttgatttcttctccgccgctctttccaaagttgcgaatcaaaatacgcagcgtttttgtatcaactcgatccgcacggcatgtgcgcaaaagaaaatcggaatacacatacttgagtgtgattacgcctctgccctgggattcataactggtggagtctcgatactccttgatatagtccatgatggttttgttcgggaaatatctgcggccttgaaactcaatgcagtcgtccaggacttctgcctttttcatcgcaacagcttcctcagcggaaaagccacaccaggccaaatagattgccgtgatttgtgtgctgaatattctgtcgtcaatccgctcagcaacccatagggtgtcgctgattgattgctggagggaagagaagtccttgaagtaccttgtgtcgtagacatggttcgatggaatcatatcataggtcacattttttaggttatccaaatacggctggtcaatcaaacccctttcgttcaaccacttgatataccggttgactctgcttttgtatgtggcaaaagcatttaggtttgagacgttcatcttgccgatcagtattgcgtactcttctgttgtgtagccatcctccaatgactttccgatagatctctctgctttttcaagtctcttccagaaagcatcgtacaccgatacagactgctccgagaaattctcattaccagactggatgtactggctacggtaactactgttatccacgtgccatcctcctatttctgattgccactatggagtagattagtttactccttacgaatgttaatatagcagatgatccgccgtttgtcaataggaaatagcaaaattatttttgctttttccaggaagcgaaaacactgctataatattgtgcgtactcttgacttaggccagagcacccgttggcaaagaatgcgcttagcacctcttccacctcgtcccgatctgccaaaaccggaatacgagcattcagtttcttcccgcacactacatcgccagatgcgtgtgctgtcaaacgaacctggctgcgctggatattgaacatcatgttcaattgctcattttggatcacttcttcatatgggaaatccttgactttatgtaactcctgctgtgtcatcatgccatacgctgcgttcatcatctccagcctcatttctccccatgggcggcagggaagcagcacacggctggaggatacacttgttaaatcgaaatcaccactggtcatccgcttggattctacgccgtttcgtactaccattactacttttcctccaaaactttttgattgacttacgggaaaatatgagctataataattcaacaagcgataataaagtgtcgctgtgcctttcactatatcagaaaatattagccatgtcaacagcgaaacgataaaatattatcttttggagggacgcagaatggagtccgtgctttataccaggataaaagagctttgtgaaaacagaggcatttcgatgacaaaactctcagaggatcttggcatcgccgcctctctgatccgtaaatggaaaacaacaacatcaccttccgtcgataaagtcaaaatgattgctgaatattttggtgtatctgctgactacctgatcggcctgtccgacatccaagactccgcagaaaagctggtcggagacgaagactttgtatctctgcaaagagccaagtccaggatgtctccgcaggacaaggaacgtatgatgggtatgttgcgccttggattccacgaggctttcaaggacgaagagcaataagtcctgtttatcggacacatgatttgatatagttgcaatgagtacctggatggaggtgtatcaatgatccgatatccgtttatctataatcaggtgttgcagatatacagagacatggaacagattagattcccgattgagccagacaacatcatttcaagattttcaaactgccgtattagaacctatcagcaatttgctcaaacaaacggctgttctattcgggacgttatcttgctatgtgaaagcaaatcgggatgtacccactatgatgtggcgaacaatcgatatctgattttatggaactcagacaacgccgacaacaatgtttctggaagaaagagatggacgaaagcccacgagcttgggcatgtggttctgaaacatcttccattggtcgcagaacctatgcttgctgagcacggattttgcccgatggagacatccgattttgagattgaagccgatcagtttgcggccaccctgctttgcccaatgccgctgtttgctatgcttgaaatcaaatccccactggatatccaaagagtgtttggcgtttccaacgaggcatccaaccacagatgggatgaatacatcaagtggttgcggtatcggagaaaaaccgcatgggagaatgacatgaagcgggttgccatgcaaaaggggatcatattaccctgacaaattttgcgccgcagtgccgtttcaatatctcagccggcgttagaccgttctgcatggttccataacagatcggctttcggttgcagtatatgtaatacttgccgtccagaatttgaacgccccacaaatcctttgtcctggtttctgtgccgttcatcttcttcatcattacgaactcatccacactaatttctcctgcacatccatatgttttatcatgttcctgacagctccccaattaaggggagcttgttcttttctccagctcgtttaactcccggttagcctcaccaatagtgtcagcggagagaacgaaccgcccgcaatcatccagcacttcaatgtgcccgccgcgattcacaaggttgtaaagcatttcaaacacctcctattacatctaccgtttataaacggtgtaaattaaccatcacgctatattttgttcgccccatttgagatacatttttccattctcatccatttcgcgggacataagtacagacaggagatcgtagtccacaccgaaccgctcatagatttcatccaaatctgtgtcctgcccgcgcatgaagaggttgagcttttcctttgccaacaccatctgcatctggtttgactcaatgcttccaagataggtgacaaaataaatgttcttcatccgggtggagttgtaccgaataaaccgcatatagaactggctcatccgagagttgttgtaatgcagctcaggaatgattacagtatccacaaactcaaagtttacagaagaggggagactttgctgggtgcagagtagaattccgttcccgctttctttcagcgttttccgaagcttccgcctggccgcaagagtcgtagtcgatcccgtgaccacaaacagcggtctattaggaaagcggtcacgaatggcatccgcatatgcgttgaccacgttcttatgacgcacaccgatagccacaatctcgtcctttgcgtcatccaacatgtccattaccttggcaatttttgtaggcaatccgccatggtattcctccaccgtgtttggggcagcgctgattctaaggagcaaagtaatttgctggatcaggcgcatcatagcgtctttacgcaggttcccagtagatgcaaaataccttctgcgcatccgttcaaaaaattcaatcgcagttttgtatacctcgcgctccgcatcggagaaccgaactgcaacctggtgtatcttcttgatgtcttttccagacacctccttaaaagtcctggtgataacaaaacgatccaaaatctttttcagttcatccgcattgaagatatcctgattgcgctgggcgacaccaaacaccgtgatcttctcaggaagatggctttcagagaataacttgaaccctttgctgtacggagggatgggcattccataattctcgtttggatattcgtgaagcccttcctcaatcccgtccttcttgctatatcggtcatagcgatacaccgactggcaccaggagatcatattcaccgaattgttataggccaattcaagctgagggaaaaattcagcgatattatttctggtgctggttccggtcatcagaagtttgaacctacaacgacgaaacacattcagcaccgcctttgcccgtttgctggatgggtttgtcatttcgtcgctctcatcaaaacagagggcgattttcccaccatgggcttttacccaggacttaatttgccgctgatacttggatagcatgtttaaggtgatgatgacaaaatctccgcattgaatgcgttccaaatctttgatacgattgaccatcacataggggagatggtagctttgcagcaccacatcccagttgttcttaatggagatcgcagaagaaactacccaagtacaaaatgcgttctgccgctccatccgatacaatccagacgcaatcccagcgagggttttgccggagccttgctcccactgaagaagcatatttcttttttgcaggacaagatttaggtcatgcttttggatatcgttgagataaatctgttcgtcgttctcgctgtcgtatacagtgaactcagccagaaatcgcccaatattctcatccatcaccatggaggacaagggctgctgttcaatctggtattccttctgacggcggcggatcatccttgcaaagcgcccgtactccgccgcgtccatctggtcatacacgatttgataaatggggatcggctgtttcatctgctccgacatactgcgggacatcttctggctgtacgccttgtagccgatagaatatccatagttcaccatgcggatcacatcttgaggtttctttgcgttctgtttacgcaccgtattccgaagataggcaagcacttttgcctcagtgattctgacgcggcaccactctttgtaggacatatctgcgggctgcttctgcgtgtaatacttgttgatatactcacaacatttcacatacttttcctgcaaagctggatgggatttgattgcatacaggtatttctttacctggtacatgaagtcgcttgaagcgctgttttgctgagataactccagtaaaatatgagaacgatttttacgaaacaaagtttgtgcgccatccaaaaatgagccgcgaacctgctccacgcctgcgctgttcaaggacacgccatctgcaaacatttgagtggagtatggagatgcagtccatccgtcctggtcgctgttgcgctgccagaactgcacctttgtttcatatccattgactccaatggaagagaaggtgtccttgtccaacttgaactgaccaaggaaactgaagttccgttccagctccttaatcatattgccgtcagaaaagtcatccgccaggaaagaggatgggacaacaagcgccatgatacccataggcttcatcagctccgcagccttttgacagtaatagagctgagataaaatttggttctcatccacccaccaatagaggttgaacggcgggttgccaaccacataatcaaacttgatattgggcgaatagcttctgatatccccataggttaggtttgccttgggatagagatatctcgccaccttatacgccttgatatccagctcgcacccatacaggttgctttccatcggagcaaaattgaaaaagctgcccattccacaggtgagatccgcaatgatatccgtgtcgccggggttgaggcagtccatgatgaacttgcacaccttggcgggggtgaaaaattggccgttctcaatctctttctttgcgctggagtattcatagtagctgtcaaagtcagaatacttcaggccatgcagtccaccgtcgccggtataggcattgtagatatcctcgcgtgtaattccagaggattccgcaagatcattgtcgatcagatataaaatcttgtcgtttaattcctgccggcttgcttgaggaatcgactggttcataatctggtacttcatatgctcaactcctggattttgttatatggatggaggcttttacggagacctccaagaaccgtctctgttatatctaccagagaaataggaaagaaataaaccggattgcttaactaattcctacaaagctctaaaaattccggctttgttttttccttgatttctttccacacatccgaaaacgcaagctcatgcgtccataccggcctgcccaaaagctgttcgatgtactggtgcagatcggcaaagtcgcacataagaacgccggtatatgcggatacgacacacttctcccgcttcgtcatccagttatacctccgtcccaagaaactcatccgcaaactggcgggcatactcttcgctggtgaaacgcacatccacgcggccattcttgaagcacttgatactcttcaccttttccatgaagcacttgcgctccgtctccgtggtagtccaagaccatccaagaaggtcgtggaaagcggctgggatatagtcgatctgcccatactcaaagtaggcaatggcgcggagcacatctttcatgccatccgccagcttgatttcatactcgcccttgtgccactgttcatgccagctatcaaaagaacaggcatagcgagtgaaagacaagactgctttcttctgttcaaagtctctctttccagtgtaggagttccacgcctctttatggcacttttctttcagttcattgagcgctttttcctggaatgagaaacctccaagctggacaaaaatctcgtcaagcacctgcttataggagatttcaaggctctcaatctgctccgtatactctttcgcatcgtccttgctggagtagcgcggttctttcgggataaggtgttcgatgacaactccattgtccaaatccacacggtaagtcttgcagaagtaggagacgattttggcaatgaatgtggcgtggctcttccgcagtaaatcgtggagactggtcaggcttacgccgccccgtccgtcgtagacataattggtatatacctctctgtctaccgattccagaatgtcattctgttctttgatgaagcgctcggccaccttaatcatgtccttgagcgccttacgtccatggtcataagcggcctgctgcacctcgcaatagtgcttatcgctttttgaaattctggattccgcttttacttccacggctgaaaacttatcgagcaaattcatccgtatcacctccatcattgttattcccattctcttccttgttgtgcgcagaagcggccagcgcctcacgatatgcggcatatggattctttgcagacacaatagcctgcgaatagaatgcgccgattccatcgtacagaagcttcaaaagcatcaggataatcataattgtaagcatatcgacacctccattaaattctatgttttgcaagcggcatcaccagcgcatgaaccccagaggaaaagtcccaaagggtatcgtcgcttccaaccatcaggaaagggaatggcctgctcttattccggttgaatccaagatagcagacagggtgcttgcccacacactccagcgcatcacgaaccaactgggcatcgaacacaccgacgatttccgaaccatccagacgaaccgccctgaacatgacctcgcatctcggattgtaggccagcgtccggctgttctttccctcttccttgtgcttggcaatctgttctttgatgtaggaaaggtctggtgtatcataccgaacatcgtccagatcaacggagaaataatcgccgttaccaacctcatccagaaacacacgatatacggcatctgcttcgtatttcgtagcatatgggactccaggcgcataggcggggagaaacgctgttacgccgccgtcagtgattgcatatccatgttcgcagaattgctgaccactgaccaggaagctcgatccagaaacatgcgcggcattcatcgctttctgtccacgggacaggattctcttcattgcggccaactgcttggcagtacagtgcatgggattgaccggagtgaattcatatgcccgcactttctcttctggaagctcgcagtcatactccacatatccccaggcatctccgccgatttcggagacatattttttgtcatgaaaatttttgatgctgattacattctctttcgggtaagcgccgggagtaatggggcgctgggtactatagtatctcatgctgtttcctctctttctgtttctgtcgtgacgtcttcttcgctttcttcttcgatttctgttatgccagagtcatcgaaaagcccaaccagaacacgcggcttatactttctatccgccatattggtttccaccgccttgatctcgctgtccagggttttcatgcttgccagcagcccggtcgataacaccagacttgcaatttcgaggtggtcttttgcgttcctgcggcggatacggatttcctggagctgtttgtagagcttatagccatccgacgcgctgacattgcagaattcaatcttgtgaagaacatccaatgtttcctggtcacacttcgacacctctgcaccgtagtatctcggcagcgatgcaagcttatcaaacgaggacagagtggcggacaagaacgacttcagctcttcaaactcctgctgcgccgtctcttccgtgaatgaatagctcgtgttgtaaatatctgtcaggttgtccgttgacagaatagcaagcgcttcaataggaggaagcgccagtgcgcggggagggcagctcagaaaatttgaagcgttctcttccgtcttaaactttgtcgctttgctgagacggccaacccatgtggatgggtgcttgatatatttgttggtctgtttattgaatatgacgtaaggcatatttatcacctgcttatatcattgatttccccagctcatcctaaggatttcggcatccgacatgagatagccgcgattttttgcgtacttcttcatccagtagatttgcccattgtacttcaccaagcggccatcgcatccattccgattatatttgcggcctaccatgccatccgcaactttttgggcatcttcatggattttatcggtgaaacacctggtatcatactgaatggaaacgcacaggttttccaggccggagaaattctctttgagaagttcaagaaccttgttgcatagttccacatgctgcgccgcagaacacttcttattgaagttcagcgtcatgtaggaatagtctcttccaatcaagtcagaagtgcggcatgtggtattgaagtcgttgcaccagaaaaacaagtcccacttgtcgctgtcatatgggacaccgcaatcagaaaactggtataggacaaacgcatcggcaagcttttcaattaccggcctcatgtagttagaacgcatgacagcgccctctatgcaatacgcattccactgctctctggtagaggaatctgcaatgcgcctattttcctctttctgctcctgggtatattcataagtcaggcggatggagaagaggtcatcctccgcataaccacgggcaacaaattcattgtccagtgcattgacataagagtgatcgtgattgataatcatttgaatgcctcccttcattatatctaccgctcatctactaaaaatcttaaccttaaaataaaaaagacgctgagatttttcagcgtcttttcagaaccggtcaatcatatatgaagttttctcttccgatgtactctccagcctcatagtcttcatcactgtaaccggaataccaggtcagctttccatgttttgattcaaggtcggccaggagattcatacagtcttcttcactgcctccgccaactgtgacatcgaacccgtcttcgtattcaccgcatattctccacggttccaagatattgcttctgatatcagaaatggtattgttataaatcattcattccacactccctcaatgccgaacgtgaatctgatgatgctatccttgataccggacataaaaacgctatccgccattgcgcacatggcagtgaacacctttagctcctgtccacgcagagaggccagacggcgaatctccatcgtgataatggcatttggatgagaactggacaccggctctatatcaatgtccacgacttccatgctatgggctttcatccaccgcgccgccatggaaactttttcgtgtcgctgcaccttgcttaaatcggctacgcggccattgaaaaactcattgtcggttagaatcctatccagctcttcgtctgaaaagaaatcccggacatccacatccgcctcacgggattgctttactttttcctgataatccccctccgccttttccttggcctgggcgatacgagcggccataccgccgcagttgaatacatccgacatgtcaatcaccttgctgtttaccatattgcctccatattatatcaaaaacttattgaatccacaactgcttatcttctgggagcgacggcctgcaaaagtctggagcggtttgtgttttccacctgtccatacagagcggctccgttgccaaaccgcgcccttagatacagctcgtcaaatccgtattcctttgccagcttccgcagaatccgacacaccttattgacctcgctattgtagcggcgaattgctacactgcggtacatgtcaaagtaatatcggcagtcctcgttgtccatctccgtggggtcatccgtggtttccacataaaactggacaccataataatgcccaggcaggacggaaatcttgtggaaaaccagactttcgttgacattatcatcaagacgggattcaatatccgaaacggtttcctgaacctcgatctcgtcaacgaacatctcttcctcaagctctccgccgcactcttcgcacacatcgttgtcgctatcctggtataatccgcagtgtttgcagcacttaatctcagaagtaaactcccttgcaaagagaggaaagctttccattgtcatgtagtttgcagttgccatctgaaatacctccttctattatatcatccgccgaacacggggaattcttaaccagataattaaattatccgcagaccgccttgcggcggtttcgtcgtttacgactcatcagtgcggcttaccaaacatcgccccagccaggctgattggacagctcattaaattctttctccagcttatcggcctcatcctgttcgccctcgtccgggtagtcggaaacgtccagatcatacacatccacatcaacgccagcgttggagatgacggactgaaccattccttcatgcaccttgattgcgacctggacatccatgttcttctcatgaatttcccaatgctcgaactcgttcttgcagtagtcgctaatgcttgcgctgacatcgctgcattcccagctctgttcgtcgttctgttcgctttcggcatcaatgccccattccttgagcgcagcctgccagaaattacgcatggatttctgcgcttcctccttgctcagaaaagcatctgtgtctacgccccagctatcgccgtccacgacatgaatcagtaaataaattttcatcttcagcacctctattattaaactcataagagaagaggaagccctcaaattttcatgagggcttcaaactctttctttctcttctgttctatttcctccacgcggttaggaagaaagttcatcatctttgcatattctaaagcttcagacttagcttttgatatacttccgcagactggtatgcacggatacccttttgcatgagcataccacataccagacttgggatctttgcttacagtatacgcacgggtcattatcgaacaccaaccagactggtcatgcgatccagcagcttgtggccgtccatgatacgcccccagttgttttcctgatagctcttggaggcgcgacggggagcggagtgggaaaccatgtcgctcattgcgtttaccacaccccagccggtgttcaggaactgggcgatatctgggcgcaggtaacaaatcataaactcatccttggctttctgaacgctgttcttcttgcggtcagaatcgttctcatccacggggaacatctcgtcaagcagcttgttcagctcgtcatccgtgaccttggtattcgccagccggtcggcatactcggccagctcacccatgtaggaatccgccatctccaggcacatccgcgcctcctgcatcttgtggtcgatatctccaacatgcttggtagaccagctacgggaagcagtattcagcgccaggttcagggtattgttgcacaccacgcggatgggggtcatgcacacgcggatagcaccggaaccatcatgggtattggagaagcaaagatacggctccacatcatcacccacaatcttcttagcgggcatccgtgccagcaaccagatttttttgccattctgaagactgccagcagtttcatagcggacatcgccgccaatcagctcgtcggtgaagctgaacgcctccgcattctgcacgatctggtagcggtcagatacgacacccagcacagcgccgtcagagctacggacattggccttgaagttctcgattttcgcaccgccgcacacctgaatgcttctctgctttacctcccagtccaggccagccagacggagcgcatcagcactggtgggcgcttcctcaacgcaagtccccaggccgtgccacggcttctcacgaacataaaacatagtctcaacatttgctgccatttgaattacctcctaagtattttggttgtaggttgtaggtgaatttgtcttcctattacatctaccgcttgagcgcggcaaaaataaaccaactgctaaaatttatttttcatcgcacagaatcaaaacctcgtccttactccagccattctcttcgcagaccttccaatcgtcctctgaaaagtccagggtggagccgacgctgctatggtagtccatgatagcataggggagaccttcatcctcccattgccaatccaatacgccatagcgctggagataccacgccttgctttcttcaattttctttcgcagagtaatcatcagaacacatcctcatccagcagaatttccgcaatattgatggaatccacaccggtcatatcaattttatcaaccagctttttcatggcctcctgcctggaatttgcggatacgatatagccacgcgactgattgcaaaagcggacaacgacggagaatttcgggatataaacatcctccatgaattcctctttcgtcaggccgtccactacatccttgccacaaacagggcaggggcagaaggtatggccgggggcaacctcttctgactgcaaaatgtcggtggagaaccagcgaccgcagccctcgcaattggtaatggcatttacttcccactcttgatcgtggcactgctcacactcgatatattcgcggtcagtcccctcgttgatggtataaacggtatcttcatcctcattgataacgcggccgcacacagcacaaatcttaatcttcatttgaaaagcacctcctattatatctaccgctataaatgcgcaaaaataaaccgcttataaaaaataagcggtgaaatatggggtagggtttttgaacggaaccctccaaaaccgtatcatatcaggccggcacagcttccacctccgtctcattctttacagcgctgagccgtgccttttcagcggcttcagccgcagcctgacgctgccggtcataccgcttgacgcgcttctcaaattccgcatcggaatccatcggcatgttgtaggtttttcctccagccttgccgatgactcccttggcaggagcggcgggcatcacatcgtttttgaaaaccacgccatgcacaccggcatattttcccaggccagacttcttcggattgctattcatattcagttcctccttattattcatgggcatcgcccattgattcacagaattccttaaaggttttctttgcgttgtatttatcgatgaacgcatcatacttggagattaactcctgggtatcacgactgccctcccttaacttgagaatttcatcctccatggccttgttaatattgcttctgatgtagtggcctaatgaagatgaatcaaaatatgtttcccgaacgactttgccatccagcaaaatttcttcaaacagcctaacatcgtatgtagcgtctgagaaataatgcacaaggtaaaaagtgattgcatcgtccaggctggaatacttgcgggattgatagcgatcccacggctcaccatggttgaagatccccttgcagatgtaatcccaatcctttttgttattcacgaactcgacggtatatcttgtttcaatattcacggcgctgtcctggtaggaaaccataaaatttcacctcctattatatctaccgccgaatccaggtgagaatttactcaccctcagaaaaattttcgttttcaatatctccgccgatgctgaacacctcataggcggcagactccaggcggctgatagaggccgtggcggtcggctcccgctccttgattgcgtccgcctctgccgtcatgatgtcattcaccagattgaacgcatccacaacgtcatcatcggaaacaatcaaaacggaatactttcttttaatctgctccagcgtttcctttttcaaatacatggttacatctccttatgaaaattttgattgaatgtatcagagtatgcggcaacgccattccagtcatcgtagcgcactttttccttttgtccgccgcactcaaaaatcaggttagctctcggctcgctgccgtcttcaaatacccggcgctttccgcatatataccactttgcaaacggttcacgcctggacacctcgcgcagataatagcggccatcctcaccgcgatacacctgccgaccggttcccgcctcaacctccataaacttgaccgggataattttgtccgggtttttggcctggtcattgtaataattgttttgtgacacttccaggcaccacatatccatagaggaatagtgctgaagcttgacattttctcttatgtagtcttcacccaggcgcatataggtatcaagtcccataaagagaacaccaacatgagaatcatcatcaatggccgtgatttttaccttgtcatccagacacgacggacgcatcccgataagcacatattcttttttgtctctgtccgtgggagaagaaaaggaaacaatcattgtaccatcttcctttcgtacttttcgatctgccgcatggtcaaccactccggctttccatccttgggaaaactattccagattgctttcatgtaggcgatctgaagctgcacacttccagcccacaggtatttctcaaccatattgccaaagcccaggaaatactcgcagtccatcttcatcctggacaacagttgatagcggaagatttcatcctgatggacaaccaggttgatttcatactgctgccgctcagaaattgggttcataacattgcaactgcatttcgcagtcttcatattcaacattgcaaccacctcctattatatctgccaggccagtgacgaaaatcttaaccttgaaaataaaaaaacggggagtcatccccgttttttatttcaatccacagcatacaccagctctacgccgtcacggtcagcgaaaaacttttcggccaccggacaacggctgcacagcgctcgattgcattcaccaggggcgcggcaggccgcaccattcacgccgcaaatctcagggacttctccctttgcgtgaagaacaatgcgcttaccggttagcttttcagcaaccagccgttccagataccgcagggcggttttgtcatcgctgaaaatctgagtcccaatcttccatccccatctgctaccataatgctcagggtctttctctacggggatctcagcgccgttgcttaaatgaatcatccagtgcctttcgtccagcacctctgcattaagataaaggctatctgaaacatacatctcgaccatgatacaaacctccatatctttttggcttcctattacatctaacgcacgacaactgcaaaaattaaccggaaaaataaaaaacgacgcagattttctgcgtcgcatgtgtgttcgtgttcagcttttcttattcgccggagagaatggcatccttaaaattttccacggcttcatctttcaaaatctcagaatagtgggtgctgatagcgatatattcatccgaaagactttccctggtagcggtcagaagattgtgcgcctcttccacggttccgccaaactcatccgcagaaaaaccctcttctacgaaaaaatccaccattgcggcctgggcagacttcagcgcatcttccgcacccgtcccatccgcataggaattccaggcggacatctcatccatcgccagattgaacagttcatcatgcttttcaaccgccgcttctgccgccgctgcaatttcttccgtgttcccggactcaatgatatcatacattgtagtccgctctttctgttctgttacagagcaggcgcacagaaaacacatcagcatgacagaaataaaaagacagcacttcttcatctttccgcccctccaatcgtggtaggtgatagcaccattctatcacccccacgacgataaatcaatcttaaatcacaccaaggtttttcagggcggctcgtccaacggtttcaatatgaacatcgtggcatccgtatttatcataccaggagcaaagcacctccgtgccgacaaacgccctcaaacaatcccaggccagccggttttcaaataccttataccgcccgcttgccttgagcctgggcgcataggctttaatctggtcaatattcttttgaaagacagcttgaacgccgtccagctcagcttttagcttcatactcctgcacctcctgagcatccatttccctgatgtattcgatttttgcgccacgcagcttccatgccttgatatactcgcggccacgctgccgggcttccgtcttattctttgcggtgcatttcatctcaccgcttccgccgtccgcatcgctgatacatacggcatagtgcttcacatcgtccacgatctcaaaggaaacgccctcgataaagaggacggttccatggcctggtagaaaagcggttcgccggcctttccactcaggatgatcgccgcgaacatcttcaaaggttccgcgatacgctttcgggattgcaaggtattgagattttgtaattcgctccatggttttatccctcctattatacctaccaggttaaaacggagataatttaccatccatcaaagatttatgatggaaatggtgaggtcaaacagataggcttttatctcgttgataaagccctcttttgtgtccaccacatggaagataaactccttttcaatccgcctttgcagacgcttccactcccaggtcagcaccagcttattgggatagttgtcagcgatagatggagtgatggtaaaggtgttttcaccaatcgcagggagaatgtcatccgtgaacgcctccagcgccaggagaatttcatccagaatatctttccgcttttcaagaatcagcgcttcattcattccaatcatttcaaccgctccaatccattaaattttggtttctgttatatcacacaatccagaatgacaaaaattaaccggaaaaataaaaaaggcggggaatttttcatccccgccagtctgttacatgatgaatgggctgttcagcttgtcgcacccctctttcatcagagccagcgccttggcatcgtccaccgtggaagcgatttgacaaagcaccttgtaattcttcttgggctgctgcgccccgctatccacacgatagcccaggccgttgccgcgcatcatatccgttccctcaatcggttcatacacctgcacatgaatagagggctgctgcgccaccgtccgaaagttttccaccacatcatgatatccaaccgtgacgcggagaatccgcccatcttccagcttgatatctcgaatggcctgcttttcgccccaggtgacaaagtgcatcacatccagcttaaagccgccgctcagttgcccgttccacttttcgatctgcgccctcgtgatttttgccatgataaaatcctcctattctttattcaacggcgatccgcttgcaatcgccggaaagaacatgctccagcttgctttttacgctgccaaggttttccgcctggagctttgccatgccgcgctccatctggttcgtgctgcgccgtgccacctgctcatagtagttgatggtcagctccagagcgctcaccgtccaggtgatttccgttttcgtcagcttttccattcattacacctccaggccacgccgcatcttcatgccgtccacaacggcacagatcgcgctcattgcgtccatataggcatccatttcctcatacttgccatccgcccggctgctgctcgaccactgcccataaagcatcacggccatatcacggatgttttgcagctcaatgtccgtccggccatccagctccagcaccttcttgacttgcgccgcctcttcctggtcaatccagccacgctctttcggtttgaagttttcctttagctccatgatggagtgaaaatcggttttggttgtcatggtaacatctccttctgttatatcttccgccgttcatcaaggggaattaaccacagatgcaaatttctttggtaaaaattaagtacagtccaaaaggcaggagaagaacaaccgccgttgcatccctatcttccggggtctttccagtagcacacaccaggcaaatcaggatggagagaagcacgaaaaccagcccataaagtttctgtttccgcatcagcttccgccgctgttcccgtgttttccgccgcatcatccgtgtattttccattttctgttccctccgtctgttctacttattaaaagagattcacaccatcaggcatgatataaaggctgcttccgctatgctcgaccttccagccctccaggtggtagacatccaccatgggcaggtaaacgggattcttccagccatccaccaccaggcgaaagtccagcccatccaccaggacggaaacgacttgacgggaaacggtgccgtccgtgataaccaccaggccaccggacgcaatccacgccgccagccccatttccagcgtgggaagctgttccacactgttacagcgctgcatatcgtcatccaccgcgcccaggttgaacacacgccccaggtagtaggctttcgcctcttccaacgtcccattgaagccggtttccaggctatcgccattttcaaagccgattctgaaatacaacatgctaaagtcctccattatgatttccgctgttctgttcttgaaattaaccagggatttcactttttcaatccatccgccccagcgccggcgctcatccagcgccagggctttcggattgattaacttattcattacgccgccaccatgccagaggccaccaggtcagcgcggatcttcttcaggcgcttgcacaccgccgcctcagagattccgatcatggccgcaatttccttgctcaaatagccatcccggattccctcaataatcatgcggtctttttcgtcccgtccgttcacgaattcatccagcgccagccgggaaacgacggcgggttccgtgttgtccttgcggttcgtcgctacggtttccagcgcgtccacctgttcgccgttcttgtcggtgatggtgtccacacgaccgcgcccgcgcttgatatcgtcgttgtaaaccttgcggatagcgtcttttgcggagcgatacaccagagaggtgagagagatattgaccttgccagccgccgcccgctttgcgttcagcgcttccagatagtcagcgtccagccggtccgccagcttcagccacgcctcattcaccagcccatcaaggccatggtatcccaggaaccacgctacagtctcgttatactggagatagtgatcttccgtgctgtagccgatctcgttctttgccgcccgcttgacgcaagccgtcagcatgttgatctgctgctgctcgctcatcgcctgccactggttcaggatgttggagttcttgacgtgttcccacgccatttccagacagatggagaacacagggcgcaggccgccgggctgcttgttcgcgtggtaaatctcccacgccttgctcatgacttcatgcagattgtatttcatggtaaaagctcctttcaaatcgtcaggcggtttacgccgctgtttatcctttcttttgggttcccacgaccgcccgcaggcggtttcggaaagtccccagctttccatcatcaggtgggttactcaatcgcgccccgctttttcaagtcgtagaagcaccagcggttcacagccggttcatccattcccttgaacgcttccatctcttcatcaaactgcgccttgtaccgctcgatctcgccgcgctgtttggcaatgcttgcgccaaagtagttgtacccagcggccaagtccgccgccatgttccgcatcatcgtgcccatcatcgcctgtttatcctcaaaccagaggtcgaaccagtcgttccgctcattcaatcttgccatgctgtttagctcctttcttgaagtcccaggccagcggggagaagtctccgccgccaggattgcttaactatttccttagatgaagtacatgctgccgttgtactcaagcgctacggcctcttgccccatctcgtgcttcagttcattgcagaggataacaacatcgtcaatgtacttttcagccgccgccgtgtcacagaatgcgaaaaccatcgttgttttctcagccaccagagcgccattctcagccacccaatacccacggacaggggaagcagtagcaccgccgaagcactcagacagcaggcgcgccacgcgctcaacctgggcggagttgtcgatctccttgtttacatcgaccgtagcaggcacatagacggtgatcttgcttttcaggggaataaggtctttcagtttcatggtgtcgatctcctttcaagattgcttaactaatcccttttggggattccgcccgccgtccaccagagggggagcggcgaagcggagttgatttgctatctccttaactctggtactattataccgcactttatggacgaagtcaagaaaaaaccgctcaaaatttatcgctttttcccttgaataataaccaaacctgcaaggcttgatctgtgcaatttgacgaacgggatacgccagccatcacgcccaccgccagccctgcacccagcccagccaccaccaccggcacggcctggacacccgccagccctgcaccaaggcggagagcctggagccagggaagcccaggcggagccagagccagcacccagcagcccccaggcattcaacgcccagcagaggccagcaggaaccaggggagagccagccgccagaggacgaaaggcaaagccagcacccagcagaggcggagaggacgcaaggccagcaggggagcgccagccctacccagcccagggaaccgggaacgcctgcgcccatgcagagccagcgcccagccaaacaccagagccagccccaccgcctgcacccagggagccgacgatctggagagggagagagggggagaggggagaagagagagggagcgcacagaaaatcacagcataagagcgccgcccaccacctgcacccgatgaggccaccgcccaggcgctccacccatgccgccagccgtcccagcatcccaggccagacggccagccctggagagcgcccagcgccagggaattcaattccgcttttgtggagtatgcggaaccacccttgaccaacgccgcccacgccatcccaggagaggcaaggcaagggggacggtttacattttgaccggaaaaatcgtggcgaaaatttcgccttgtaccccattctccacacctctaaatctttcacccaaacaaattccttacatcaccaccttgttcatcgtactattctttgccttaaagattattcgagaacgggttcgactcaataggttgatcatcgcctatttctttggaatcaagatttctttcaacatctcctaacgggtggatttggcaaggaaatctgcgttgaacatcgtgttatattttcacccttgccttataaggaagcaaataatcaactttttcaccagatttcattgacaaagacaccccgctctgctataattataaacaaggagataccgtaacttttgcccgtacagcaacggtaatttccattagtaagaatatagttaaattatcttttatggaggtatcactatggaacagtacaccgagaatgcaattgttacggtagcacttcaccctggcctggaacagttcttcaagcagcagagacctcacaattacaagaagaacgaacggcagaccgtataccctatcaagaagcatgaggaaatcattgctatggcgaattggcttcttgagcataaggatcggaagtatgtgcttgcctttacgcttggcattaacctgggactccgagccaatgagcttctgtccttaaagatgaaccaggttttctgccctgatggatctgtaaggatgaatgatgatatggaggacacctctgacggcatcgaaatcctacagagcaagacgggaaagtttagaacggtgttccttaaccaagcttgtaaggatgcgttggagtggtgtttcccagagagggggagctatttacattgtaatggctacctgtttcccagcagagagggaggttctattcaagtcgggacttttcgtaaggttctgaaagatgcggcaaaggcatgtggagtgaaacagaatgttggaacccacacttgccgtaagacatggggctggcaccagtacaagtacaactctgataaggcgaatctcgacatttcgatgcttcagagagctttcggacacagttcgccggaagtcaccctcagatacttggggatcacggatgaggaagacaaggctctgtatcgaaacatgtgtattcatgttatttcagacaaaggctttgaagaccatggttttatgagaacatgagtagagaggtatttttctattcgacaatagaaaaacaatacatgtatcccccacccactctaaaagggaagcacttttcaaaattacttcatcaacggctatttccactgttttttaggggcgttttgctgagtggttttcagcaaagtttacataattaactctctgtaaggtctaaaagtcaaaggaggacgacccattggacattaaaatctgcgacgcaattatgggagcggggaagaccagtgctgctattaactacatgaatgactctcaggggaagtttatcttcattactccgtatctaaaagagtgcgacagaattatcgacaactgcccaataaagaatttcaagtccccaaaggataaaccgagaagcaaactgctcaacctgcacttccttttggagcgagggttcaacatctccagtacacacgctcttttcgccagctatacggaagatactatccgtctgatcaaagagggacattatacgctcatcatggacgaggtatttgaaatcgtgaaagagatcaatgtctctaagggcgatgtgatggatctccttgcaaatggatatatcgaaattgataaggaaacctgccgggtaaaatggctcaacgataactatgttggcacaactttccaagaccttatgctgagagctaaggccggcacactgctctactacaacgacacatttttgttctggatgtttcctcctgaggtgttccaggcttttgatgaggtaatcgttctgacatatctgtttgaagcgcagcttcagaagtattattttgacattaacggcttttcgtatcgatacatcggtgtggagcagcgtaacggcagcttttacttttcggaaactgggaatcagtttaccaagatcccaggtctaaaagaaaaagtacacatttttgacaacaagaagctgaatagcattggagacgaaaagttcgctttttcttcctcatggtctgagagacatttccgaaatccagtatcatgtacgaaaatgcgtgatgggttatacaatgttttgcggcaccactacgctggaaagagcgggaacagtatgtggactgcatttaaggcgcagaaagatagaatcacgccaaatggattcaaaaattgctttgtttcatgcagttgccgagcaaccaatgagtacagggagaaaaagaacctggcctattgcgtgaacattttcttcaaccctttcttgaaacgatattttgaggaacatgggtgtgttgtggacgaggataagtatgcgttgagcgagatgattcagtggatttggagatccgcaattcgtgatggaaatgaaataaatatctatattccgagcaaacgtatgcgaaacctcttgacaaattggctaaatgaggttagtatataagaaaggagttagttaatctaatgtgcgaattttgcaggaagtacaattttgaattggctacggccaaggtggatgaaaccggcgcatcgatttcggtttcaggaggacattggcgtttcccaaaagagcttcagttcaaattctgcccagtatgtggcagacggctcgatccgtacttttatgatggtatgtccaatgagcaggcggaacggatcttgatttcccacctaatgtatctggcgtttacaatgccgattgagtggatcgagaagaacggagagaacagcgactttcaaaaggcgtatgggatggcgttggacgctctgcggcagggaggtggttaattggagagggcaaaatgttacgaatgcaagtatagaggcaatgttcctggcgacacgcatagttgttgccgctaccctgggaacgatacgaatttatttgcaatgtttgagcaaacaaacctggtgcaaatgattaaacttggcatcaaggctgatcgatatggttttgagaatggttggtttatgtggcctgttaatttcgatccgatttggcttttgaactgcaatgggtttacaccaaaggatggtgaagagataaatggcgaataagcttatctccggccatatcaagcaggccacgcaagaagcttttttgccgagttcgttgagaactgagtttggcgaagccatggccgtggagatcagcaagacgtatatgattgctgataagacagatgaagcgcttggatgcttactctatgagctgcgccaggccggaagtgatgaagacagaaaaaggttgttgaacgcaatatgggaacggcactatgaagtggccgcacaaaaaatcataaaaggaaatagttaatcaatctttatggagggaatcaaaatgctgacgattgaaaagcctgacaagaatcatccttgtaacggttgtcactactggcgctggatcggcctatgccaagcgtgtaactactgccttttgaccggacacaagcgaggttgccccgctggagctgggtgcgataagagagttcccatggatgatgaactcaagaagaaagagcagatcaggctttttcattacggatgtctggagcggggagcatgattcctttcggatcgattgaggaatggcgtggagcagtataccaaggtgtggattatggatggagatttgaagtgtccacatggggaagactcaggaacgccaaaacaggccatgtgtattctttcggatatggagacggcgggtatctacaagcatgtatttcgatcaacgggaaaaggctcaatgtccatgttcatcgctgtgtggcagagacctatttaccaaatgaatgcggctatgagattgtaaatcatcttgatggctgcaagcagcacaatgatgtttggaaccttgagtggtgtaccaggaaagagaattactttcatgcggttgatatggagttgattgattacgatgtcccgtaccgaattgggtacttgtcccatatcggcgcttatgttggaagcagtaatggaatgtctaagttgacagaggcggatgttctatatattcgccagaactatattccaaaaggcaaggggcaaaagtgcaatcggaaagagattgcagagatgtttggtgtttcgccaaaccttatctcaaaaatagtcagcggatctatatggtcgcatgtataaagtggtaggaggtgaacgatatcggacaatttttcattaagatgaacggagaggatattcgcatgattttaagcggcgataagtcgcaaatgcgtattccagtccgacaatcttcagagacggacggagatccatccccgccgtatagtgttggagatattttaggcataaaggaaacctgggcttatgtggacggcaagtatgtttacagagcagatccagaaaatgaaacgaagaagattttatgggtgcagtctaccaggattccagaagaggcgataaggctattcctttctattagggatattcgtcaagagcggctgcaagatatttcggatgacgatatcagggaagagggtatatggcttcctggtgttatagatcccagatttgcattttcggataagtgggatatgtcgcttagtaaaccgatgagaaatcgatactcttgggatgacaacccaatggtttgggttttggagtttgatagagtttcagatacagaggtggaacatgacggtatttgaatttctttcttcctccaaagagaatatggctaatttcgtttgtgatcgtgcggttatacctccgtgtgatttggtctgctgcaatactccatgtaacgcaattgacggttttaataagactgcgagagatatctgcatgaacaatatacttgaatttttatcgcgggagattgatgcagatggatgatattagagaaacctcaattgatcatgtagcaggggaaaactatgcgactttgtttaccagtgagcgcaaatggatcaattatatttacaaactgaaagagtctcatcctgacgaagtagacattcggcatgtaaacaacgacggaagcctgatcgcacatattccagcgtcgtggatgaaagtaaagccgaaaaagaaagtggtattaacagaagaacaaattgaagcttcaaaggcgcgtcttgaacgaggcaggcagaaaagattaagtatgataggagatgatgcgcatgtaagttcagaaaggagcggtgaagatgagccataatgataaatgcgccatctgctattggtatggaaagtgtaatgaagaaaatccgtgtgatgatttcacaccgattgacgacagtttagatgaggatttctattccgatgtcgtaagggaaaattacgaagagtatcaattgcttgttgaagagcaacagttgtaatatacatgctttttatataaaaattgtggtgattctaatgtttaactttaggaaatgttcgagattggaagaagaacgaatcgctctattgcaagaaaaagaaaggcttaatgataaaatccatgagcaaaatcgtcagttatctgatttgaaacacgattatgagttagcttgttctgaagtaaagagacttgcagatgaaatcagtgctaaggttgaagattgccatattgggccttggtgtgatgggtgcgagcacaaaatgaaagctgtcatgaaaaatagagaaataagatataatggcggatgggtaaatacaattgatgaggaagaatctgttgtttattgtggaaagcacctacacgaaatgtgcccagagtttgaaaaagaacatgtcccacattgggcagtgtaagcgatcattatgatttagatctattggtaaggaagtgaattttacatggtaagtaaaacggatttgctgcaaaagaccagtgaatatatggattatcttgcagaacacaagaaaaatgttcaaaaagcctgggacgaattgaaaaatgctacaatgggcgttcctcttcttcagcgaccttatattgtggacgaaatgaattggagagtcaaatgccatgatgacagcaagttttcagaagaagagttcgtcccgtatcgtcaacatttctatcctgttgatggtgagcaggttgaccaggcagcttttgataaggcgtggaagattcattgcggaagaaatgatcatcactggcaatactgggttgatgaggacggcgggtttatttcttcgtacagcgtagacacaaagatttgcgcttacctcgaaatgatttgcgattggcaggcgatgtcgtatgttcttggaggaacggctgtgacttattatgaggccaacaaatcttcaattcagatcgacccttattggagagagttctttgaagaggttcttgctcttcttggtgagtatttgacatcgaaacagtgaggctgcgtacatgaatagggaacagaaacgggagcagcagaaaaatttaagaaagcttgggatcgacaagcgctcatttgatgtgcttgtcggcctacaggcaatcaagaagtcaacacagacgattcaaagcggagacagagtgaaattaaatgttgacgcaattagaaatggcaaagattatgatcgcctttctgatttgtataagaaatttgttgctgatcatgaagacgatgagtttacggcgattgttgatgatggcgttggtaaatatggcaacctgttttcgttgaaagaagatcctgccggctggttgttttggagcggggatttaattaaggtttgactgttagggggagataggtataagtctcgataagcagattcatatttatagctttgataccagtgcattttatacagatgaagaaaagcagttggaaaaaacaattaacgaccactgtttatgcaagaataggctaaaggctgagaaagaaatcctatctgagtaccactataatgggctatctctcgaaaaggcagaggcgaggtatcgcaagctgtataagataccaaaagattctccagtttgtatcggagacaaagatagaattcgtcagattacgaaggagataaaaaatcacaatagcagcattaagccgctaaaagatgaattgcttcgtctgttacagtctcacagagctacaagaaagcttcgggacgaatatgtggtagacaaaaatgtgatttcagtctttgagtcgatgctgaccaggacgcttggtatgcaaactggacaactctacgatgatttcatggtgatccgtacatactattttgatgtgattgaagacctaattcttaacggatatctttacaatggagaaagatatgtgtgttttactgcgtctgccggccagatcaggacgaagaagaccgtattcatcaaagagagtgtgtggaagaaacaccagaaaacgcttatgtgcggtcttactgtagattcgatcaatgagcatggtggaatcaatatcaacaaatacctcgcatacctcgctttgtgcaatagtgcaaccgatccttgggatgaatttgatatcacgaagtctatcgtggtagacgatatggaaacgatggttcatggagtcgttgattttatcgatcatagaacatatactgcggagcggaaagaaatggatatcccgattacccatacagatgggtgcgggatggttcttccgtcgtgcaatcagaagaacactatggtacggcttccttgggtaaaaggtcttcttgccgtgttcccatatgacaagttcattatggaagcggatcagaaagagcctggagtccgccatggcatagtcaaagatatctatgggaaagaacatgatattcttgaagagggcatacaggttatttttacgaagagccagttcaagatgcacaaatactattcaagctgggaagagtacattgcgatgtaccagaagtatgggtgcagcgctggaaaatgcaacgaggaagagaattttttgcctgatgccaagctgaactaccagatgcttcagacattgactgatataacgccggatgagatcgagcagcttgcggatcgctcggtcaataagattttgaaaatcgcgtcggacagagagacgatgcttgatgtgtttggggcttcgtcccaatatcaaaacaagaacgcttttcaggagtgtttaagcatatacccagagcttctttcagacccgtacaccaaagagatgttgcggcaaatcaaaaagaacctggttaaagagggcagggcagcgaagctggatttatcagcaaagtatatgttcctcatccctgacctgtatgctttttgccaatggctgtttcttggagataaagacccgtctggccttttgaaagacggtgaagtgtcgagctacttatatcgaggatgcgaaaagcttgactgcttgaggtctccccatctatacagagaacatgcggtgagaaagaatgtcgtgacgagggagacaaagaagtggttcactccaaatgcgttgtatacaagttgtcacgatcttatctctaagattttgcagtttgattgcgatggagataagagccttgtgtgcgctgatccattgattatccagattgcggagcggaacatgaaagacattgtgcctctgtattacgagatggcaaaagccggcgcagtcattgtaacgccggaagaaatcttccatggattgcgggctgcgtggactggcggaaatatcggagttatcagtaatgatattacgaagatttggaacagtgacgatgttgaccttgatgcaatcaagatcctttgtatggagaataacttctgcattgattatgcaaagacgctctataaaccaaccaggccagaccatatcaattcgaggctgtcaagaatcactggaatgaaagcgccgcatttctttgtttatgcaaagaataagtcgtcacaccaggttcaaaaaatcaattcgagcgtggtcaatcagcttgataagattgtgcctaacaagaggatgtcattttcggccaaaaatatcggcgcatttcattaccaatatatgcttagcgaacctaacaaaaaggtttcagtattgcaagatgttattgatttatacaatgaggttgaaaggcagtatcggtattcaatcagcttttatgatgacagtgcaaactttgcgtatgtgagtgatagtatccttaacaagtttgagtctttaggatatagcatgaatgatgtttgtgacacgctggttaaataccttttccatatgaagcagagcaagaggaagaatgttttttggatgtgtttcggagatgtggttctggaaaacttaaagaggaatgttcctgctggatcaattcagtgtagaaaatgcggggagaggtttgtaccaacaagtccacagcaaaagatctgcacaaaatgttcttcatatcaacctgttctaaagcggattgtgagatgtattgattgtggaaaagagtttgaggtaagtagttctgtcagaaacaagaagcggtgtgataaatgccaacaacgaagagtgagagaatatgagcgagaaaagaagagaaaacagcgaaaaactgtatgaatgtccccatgtttaatttcgatgtttcatatactgaaaaagccgtttttcaacggcaaaatatgctttgccataattggcaaaatcgcatattttgtcattcggaatttgcaaatctaaccgttgattaacgattgtttcacatccaaaatagaaatgtccctttaagggaagaaaaccgtttttattaagatattcggtatctcctgtccatctggccgtgggaatactcacggcctgggacatttttatgaaaaggattgatttattctatgattccagtaacaaaagaagaggcaaagttactccgggagctgtacccagagtacaaggtcacgcggacaatggttcaggattcaaaacgccaccattactatgcaacagagcatgagggaatgatgagggcgattgctgatacgaactatgcagcggccaacatcgtagcgcaaatcgataaggaaagggcgcttcgcaagaaacgagcagaattgcaggagcgaaaatatggctgatttcgagcggagagaaagattcgacaatgccattattgatctaagcgatatgacaataacggaatatacggattgcgatacgaagtgctatgaccttatgaatttactgaaaagatgggatggggtggttggaataaacttaaccattgagcgttgcgtcccattaccacaggatgggagggacacagcttgaatccgaagtatagccaactggaaaatgaagactcatatgaatatggccttaggttgattgaaaccaagatagagcaaaatccacctgatcttgagtggtcagatattgtggatcttcttggactcgatgtgcattatgatagccttagaaaagcggccaatgtgaccccgtactgtggatatcgggttatgaagtatttcaaggagaaatacgcaagcgagtcatgcggagaatcgtatttggacgagcttgaccaaaaaatgttggagttcaaaaaggaacggcaaagattttttgaccaaagaaatgctctcaacaaagttgtaagagatatggcaagacgtgatgagaaccaagagatccttgagagagcgattgagaatggtgttttgccgaagcttacatatacccagaacaatgtgcaacctacggagcaggatctgcttgttagtctaaatgacttgcattttggagcttgtgtcgataactattggaactattacaactctgatgtctgccgtatgatgctacaggattacatagggaagattgtctccattgcaaatttgcatggggcagagaattgttatgtatgggcaaacggagatctaatcagtggaaatattcataaatcaattgccgtatcaaacagagaaaatgtaattgagcaagttgtcggtgtttctgaactgatagcagagttcttgtcagaactgagtccatattttaagaatgtttatttctcttcagtggcaggaaatcattctcgactggaagagaaagaccttgcatccccgcatgaacggcttgacgatttggttgagtggtatctaaaggcgaggctgcaaaactttcagaatgttgtgtttgacaactacgaaaaaattgacgacaccatgtatctggtcaatataaggggcaaaacataccttggtgtgcatggagattatgacggatcgccaagcaaggtacagtctcttcagaccatggcgcagcgtcccgtgtatgcgattttgtcaggccatctgcaccacaacaagattgataatgtgcagggagtaaaaacggttatggccggcagctttcttggcatggacgattattgtgtggggaagaggatctatggctcgcagcaacagttggtttgcgtttgcacatacgatgggattatggcctactacgatgttgactttgatacaaacgcatatcgtcaacaaaggagcgaaatcgtggcgtgaatatcaacaaaacagatttaattaacgcattggcagaaaagaaatcgtataagaaatatgcgatcaagaatgcaattgacgatatttttgaagagattgcagaagctctcgttcgaggggataaggtatctatcagagggttcgggacatttgagctaaagatgttccaatctcatccagccgttcaccctggaactggagaacgcattatggtggaaagctataagaatgtcgttttccgtccaggcgacgagctgatccgcatggtaagagaggaaaaataaatcgggggagcaaatcccccgatcaatttggctgagtagagaaggtggtattcttgcctgcctcataagcaggagacattggttcgactccaatctcagccaccaaaaaagaaaaataaatttgctaattcctattgacaaattcgttttcatctggtatagtaatacatgtcaacaggagatagttaatcaatctcaaactgctggcgtagctcagttggtagagcggctgatttgtaatcagtaggtcgggggttcaagtccgtccgccagctccaacgacatcgaaccttgaaaaatcaatatctgaatcatgcttattattaactcagtgaacaaagcgtgtcagcgctctgagacgcgcagtaacttccgtattgataagtagggatacctgcttattggtgcggctcggatatagtgatatatcctggggagacggaaaccgtcaacaagaatgcgtgttgccaagagttgtcgcttcaaaatgcacggaactttcgggtgcaacaatagacgctcctgtggagaataagcctaaggggttatggtgtggcagccataatgacagaggtaggccaacaatgcacctcgtcttgatgccaaagaaatttggctataacgaaagtcgccggttaaagtagccgtatgacgggtatgaagatgatctttctttatcaaataaaggattttgtaaaagaaaatttctgaaagaacggtgaaatttgcgggtaagcattcccgcacaggtttatgtacgcagcatggcttatcctgttgcgatactggggtaagaagttaggggtcgctccccgaagctcagacttatcttcctggtggcagaaaattgtaagaagacaatggaggtagggtgaagacccagtgataggtatgattgagctattgattttttcaaggagttagttaatctattttaagggagagcagttctatgaagatcagcatcagagagaaagacattggtatgtttaaggctatcgatgtatcatgcaaggatggcgtgattgttctcgactttgactgtgccaattgtggagtgcctatggtgaacagtaggccgattgtcccagttccaatggtgtacccgctgaaggatcttaatcatcttacatggagtgagattgaggcaattggcgctgcgggaaaggctcgtgagacctttgcgcttggtgccacaaagaaagaccatatgaagaatggctatgatgctgaatggaaaatcattggatttgaccatgatgatctggccgacggaagcggcaaggcaccgatttcgtgggatatggttagggcttacaaagatgagtggtctatgaatgacgaggccacaaacgccggcggctgggatcagtgcaaggcaagaaagcggatggacggagagctgttgtctctttgctctgatgagctacaggctattatcaagcccgttatcaagctgaccagcgctggcagttgcagtaaggatattatcaagagtatctgtaagctgtggctgaagagtgaaaaggaactgtttggccgctgtatttactctgctccaggagagggacactggtatgagtattaccgtcaggaggatgtgccatactttgcacttgatgaaaatggagatcgtgtgtgtcagtggctccgctccgccttttgcaccgctgacaactatttctgcaatgtgtggactgacggctcggcccacgttaacgatgcctacggttcaggggcgttgctgcccggctttagttgctaatcttttatctaatctgcttccgcctcgaaaggggcggagcaatatggggctgtagctcagttgggagagcacctgccttgcaagcagggggtcgtgggttcaactcccatcagttccaccagtaatctgtgttggttatgttgacgcttgtgcggttcagctcattacttgactgctatccctgtcaaaaacctatcggccatggacgaggttcttcggacgcacagtaatttcgagacatagctcagttggtagagcgcacgactgataatcgtgaggtcgaaagttcaattcttcctgtctcgaccaaaatttaatatggggcagtaatgggttcgacggggttttgagagtgcaaaacacgcaggtatgataccgccgaagggtcaaaataaaatgaaacgacgaaactgttgtaatgattcatcctgcttttgctgcttttgcagaaagccggattgccgcttgagataacttgagcatccaaaacagcgaacttggcctggtaaacgcttgaggatagaagaataggccatttggtttccttgttacccctacacaaacaaggtggtggaggcgataccgttccggtacgccctgggtaagatgtgctggcatcgtggcacccgccgacaagcgaacgcttaaaagctggctattgcgtaagaatgttttgctcatgtaggaatttcggacgcgggttcgattcccgcctgctccaccacttatctgggtgtacgtcaattggtagacggcgtgatttggggtcacgaggctgtgggttcgagtcccaccactcagaccaacaaaaacattggaggaaatacaatggatcgatttgctgttacaactgaaaatggtgtaatgcatctgtattatccttcgattgacgatgcgaagaggtcatggcctaatgcgaggattgagccttatgatgacgatggctaccttcgatgtatagatctcctgattgacgcagcggacgactcctacattgattatagaggaagaacggttttgcgacgattatttccatggggagaattgaagctgcgacttacaagaatgggcgatagctggtacgacatgtgtgaatttcaagaacaaaacaacaacgcccatattgtgaatttcatgtggactttatcagatccaaaattggtatgggaaaagttctttgggtatgaagttagatatgagttgcttcaatgtgtatgtaaatcctacggacaaaggccaataaaaccaaaagaactaaagggtatgaagtcagtattcggagtcaaattcataaagctgaaatctcaggtgtttgtgaaagacaatgatatctacatatatcataacgaatacttttgccctgagatgccgattgacccagcggattatggaaccccattttcatacagagcgaataagtatcttggtaaaaacgcatccaagaaattcatctatgatgataattgggggtcgattttacttcataatgtggcatggtgcaagttcgtaaactttatgaagttgtttgaaataatgaagccaaatgatattgctctccttatgagagataaaacatatgattttcataatttcgataaaaccaagggagatgcatttcaatggcttgcgttctatgaacagatctgcaacgggattgtggatcatatgaagtgatttatataaggcacgaacagcaatacttttgtaattcttactcttcaagaaacaaagtgtgccttggatgttgagacgctaacagcaatattaacagaaacaaaaaaagatgatttgggtttatctttgtgtaagcgcttgtgcttattttcaacaatgcgtctcgtgggatgatattggcgtgtagctcaatcggtagagcatccggctgttaaccggggggttgcgggttcgagtcccgccgtgccagccaaactaaaaagcaggatagaaagcttttatagcgtgatcgcagaaggacactcacagcaactttactacacataaattgggcttatgaatgtattaaagtgtcttggcgaattgctatttttggaactatccatatattgcggggtagagaagcggctatctcgtcagcctcatgagctgaagatcacaggttcgagtcctgtccccgcaaccatgcccgtcccacaatcagagcggagactgtaaactgaatgggaaatagaaaccttcacattctggcagtgatgacttttacaaggttttgggagcaaaaccggcgcaattcggcaggcgaagtacgagccgacaccatggcttacggtgtgagtaggccaatttgcccggttagctcagctgggagagcatatgccttacaagcatggggtcggcggttcaagcccgtcaccgggcaccacaatatgtaggtatggtgtttaatggtcagcatatcggtcttccaaaccgagggtgcgggttcaagtcccgctatctactccatatatgcgggtatggcggaattggcagacgcgccagacttaggatctggtgggctatcctgtgcaggttcgacccctgttacccgtaccataaagagcacatacagcaattttatacatggaatcaacttttaactgatcaaaccaaacaaggtgctctgtgaaaattagctggcgtggtggaatggcagacgcggcggactcaaaatccgctggtagcgataccgtgtgggttcaagtcccaccgccagcaccaactatgataccgtagccaagtggtaaggcactgggctgcaaccccaggatcataggttcgagtcctatcggtatctccatatgcgccagtagctcaattggatagagcataggacttctaatcctaaggctgggggttcgattcctctctggcgtaccatccgtgtggtagtaaaagcacgatcaataaaataactacgctcgtttgtctctgccacaaaggactggatggtatggcctggtcagcgagagatcctgtttggagaatcgggagtgcaggcacggtaaaagtaaaaccccgcctttcggcggggcgagagggtcaaagcttaatgccaagtttttcagccatttcttctggagtcatgttggcggaagcttcttcgataatctttttcatcttagcggggcgaagaagttcttgcttctttgcttcaagagctgcgatctttgcgtcgatttctgcaattttgtcttccacagtgcgacgagtgcgttttgctttttcttcagccataatacattgcctccaatcgatttggttattacatttataccatactttgatacagaatgcaacatccgataagaaaatattggggtatcgccaagtggtaaggcacgggactttgactcccgcattcgctggttcgagtccagctaccccagccaactatcataagacgctggttctgttttgtgtaaaatagatgtcacaccaagttaaaactataaatgctcccatcctctaatcggaataggaggctggcctctcaagccggtaatacgggttcgagtcccgttgggagtaccaaatggtgccgtggacgaattggtagagttgccggcctttcaagccggagtttgcgggttcaatccccgccggcatcaccatgaagaaagggagatatttgtgccaagaaaatctttgacagaaaacgtaggaagtaaacagagaatagtacgaaaaattccgtcctcagaaaacggattgggcgtacattgtacgacaaaatgcggacaagaatttcagatcagccagaacaacgaaaagagaaaacatacactatggaaaattgttcctggtggatttgagaagattgccacaggggattcaccgtatgatctatatgataaaatcccttgggacaagtaatgaatgccgttatggtggaatggcagacacgccagcttgaggggctggtgggagcaatctcgtatgggttcaagtcccattgacggcaccagtatggctccatagttcagttggttagaacgccggcctgtcacgccggaggtcacgggttcaagtcccgttggagtcgccaatataggggtttggtgcaatggtagcatgacggtctccaaaaccgttgatgagggttcgagtccttcagcccctgccaataaagacacatacagcaatatcacatattttaagtattctttcaaaccatctcctttctttctacctccctttctctattgtgtcttgttatggctttccatgccggtatagctcaattggcagagcagcggatttatgccccgtagcgccagataagcggcaggttgcaggttcgactcctactaccggcaccatgcgccacggttaatggctaaaattctaccggcaaataaacaatagaagccccgcataatgaaagcgatttaatagggtgttcggcgctaacacataggggagcgccagagtcggagagctggggcagtctgtaaaactgttgctttcgagctgagtgggttcgactcccacctcccctaccaattgagattatggaggattaggtatagaaagatattgtgtgaattgtgggtgtaaaatttgcagagaaaacacatctggatattgtatcgattgtcttagagccaaaagaaaaagagaaaagatagaaagatggcttaaaataggagatgcaaacataggtgtatcaacaacattaagagggtgtatcagacaatatattctggacgatcagaatggtagatgtgctatatgtggtatagataatttttggaatggagagcgtttgaattttattttagaccatatagacggggacgcataaaataattttagaaataatttgagactgatttgccctaattgcgatagtcagcttcctacatataaatccagaaataagaattctgcgagggtgtatcgtagagcttcttaacatacggcggaataccgaagtggtcataacggcgcagtcttgaaaactgatgtgagctaactactcccgtgggttcgagtcctacttccgccgccatactccatataccatgttgtatattggagccagggaaatcgtatggcgatttccctcttatatggaacgatagcttacgaggtctgagcggcggtctgaaaaaccgcaggatgatggatcgttaccatctcgttccaccataataaaaaagacatgaacagcaattttatctatggctacataaaagcacattgccgtgtgcgcatgtcttgtgcctaaagggagtcaccaactggcgttaaataagtggggcaaccgtgcaaaccgggtaaacttaatatgcgctcataactcagttggtagagtagctgccttttaagcagcgagtcgtgggttcgagtcccgctgagcgcaccattctacgacacactttttgtgtgtcgcttttttattattgccgaaaggaggaaatggagtggcaaatgatttgaaaaagggagccgcagcaaaaacgcagcgccctgaacgaatgaatttggagaacgacgacaaatacccgtatcattgcagcgcatgtggtaagggatatatgcgacagaaggataattttaatgtcaccccgtctccttattatgcaggtaatggcggttatcttacgatttgcagaaggtgcctggataaatcctttgaatactatcgtgatgaggtgtttgacggagaccaggataaagcgatggagcttttgtgcgcgacgattaacacctgctttgatgaaggagcatgggcaaatgccaaaaagcacccgtctccaaacagaagtaaggtaagccaatatttttccaagttgaatttggcgcagacaaagggagcgtcttatgcagatacaattctttaccgcagagcaaataaagtcgaaaacgcagagacaattcaagcggtaaaagataatcccaaaattatgactccgattgagaccatccaattgttcggtcttggattcagcgaccaggattatgaaacgctacaatatgagtacgatgattgggtaaagaaatacggtgatcctgaggataagcgtcaggatgagctatataagagcctttgctatttgaaattacagttgcagaagtccgtgcagaatggagactctggaattggagcattggcaaagacctacaaagaatacatcaatgcggcgacgactgagctggaggatcgccggcagaagaaggaagagtccgtccagttgaatcctcttggcctatgggcaagggatattgaaaagtataccccggcggaattctacaaggacaaaaagttgtttaaggactttgatgatataggaagttattgttctcgctttatttttagacctctgaaaaacctcctaaccggatcgaaagagcttgataaggaatacaagctttcccaggaggaatgatgcgatgaactatgatgttttaatggatgagcggcaaaaacatttgcatgaacatttcccgtctacacactatttgcataaggcggagaatgtccagcgtgtgcttttgtggctcactttttataggagaaatccgtcgagatttgtagagcactactttgggattgttttgcatttatatcagcatatcattctgtatctgatggagtattttccaagtttctgcattgtagctgctcgttccgcagcaaagtctttccttattgccgtattcgcttgcaaagaggcgattctacggccaggggcaaggattgttgtggcatctgctacaaagaaacaggcaaggctaattgtatcagaaaagattaaaaaggagcttttgcccaagtcgccgttgctcgaagcggagatagatagttttaaggataaccagaatgagattgaggttatttttaagaacggtagctctattgtggttgtcgctgcaaacgagaatgcccgtggttatcgtgctactgttatgatctacgaagagttccgtatgattgcgaaaaatatcattgacagcgttctttctccgtttctattcgttcggcaagcagactatttgaaacaagaagagtatgctggaatgcaggaagagcctaaggaagtgtatatcagttccgcatggtatcagaaccactggatgtggaacctgattcaaacatttacaaaggatatgctgtctggaggtacatcgtgtgttattgcgatggactacagcattgctttgaaacacaacattaaaaccaggaacttcctaattaaagagcgaaagaaactcgatccgatgtcctgggcgattgagtatgagaaccagatgattgcggaaaatgccaggtctttctttaactatgatcagttgaaccgaaacagaagactaaagcgggcgttttatccgcgcagaaatgatgaagctcttttgaagcaaaagaacaaatacgatattccaaaacaggtgggggaaatcagagtattgtcttgtgatattgcaatggagggcggaaacgatacggataactctatcttctcctgcatcagacttttgccagaaagccaggagcataaggtgatggacacagccggcgagcatattacggttaaaagaggatatcgccgtcaggttgtctatatggagtctgttcatggaggggagaccactaagcaggctatccgcatcaaacaattgtatacggattttaacgccgactattgcgttctcgacggacgtaacgccggtatttccgtttatgatatgctcgcaaaggttttgtttgatgaagagagaaacattgaatacaaaccatggaaatgtatgaacgacgaaaaggttgcgaacagaattcagattgccggcgctgaagagaatgtatatgtcattaaggcacaactcgaaacgaacagcaatattgctgagtccatgcgtaatgctctgaattctgggatgatcgacttgctgatcagcaatactgaggcggttgatgagatttctaattttatcccagaatatgcgactgctgatgttgaagcgcagctattctttgaaagaccctatatagaaacggttgctttaatcaatgagatgatcaatcttgaatatgagcgaggcgatcagactgggttgatcaaaattatgaacaacaatgaccgtaaggacagatacacctctgtttcttacggtaattattttgcccaaatgcttgaacatgatttgttgtccgatacggcggagtacgaatatgttccactatttaactgaaggaggtgatgaagttgcagagtgaaaagaaatggtatcagttctggaaacgagaccgtgtgtacgaggaaaatgctgtcgttaaggctgaagatcatacccacgagttcaatacaagtattggaagcgcatatatcaatatgctttgcgggtcaagcgaatctccatataccattcaggagatccgtgcttttacgaaaaacccaatgaaccatattacggagctgcgcagaatggcaaagtgggcttaccgaacgaatggcgttgtgtctggcgcaatcgactatatgaagtcaatgcacacattagatggtgttattgtttctaagtcacgccggccagatggcagaaagccaagaaattatcgttccaataaagcaaaaatggaaggtacactaagcaccattcgatacaagcaaattatccgcgatggtattttcaagaatgccaatgatggtatgtatgtcgcttactttgaaactgctgcgaccacaccagactatagaatggcgctgactgattatgaaatccagaatataacggaaatcaatgcgcttggaatcaatgcaatggtaatccctcttcctgttgaatatgtgcggatcattggaagaaagaacaacagttatgttgtcgcatttgatttgaagtattttgattatttcacggaggatgcaaggaagaaaaagcttgccggctttccaaaagagatccaggatggatggctgaaaaagatgaatggggagctgaacgcagattggcttgttcttgataatacaaagacaattgtaacgaaaatcaagagcgagatttctgaaccatacggaatcccattttctattgcagctctcgacgatattagctacgctcaatattttattgatacgaagcgaaatgttctggactctgtaaacaaccaaattgtgtatgagacattccctgagggcaaagataaggggacatctgctctgagcgaaaaacagcagagacagcagcatgatttggtcaagaacgcactttccagcaagagcagaaacggcagcagtacatcatttttctctcttgcgagtgggacaaagcttgacaagatttcgttggatgtttctttgcttgatgaaaagaacgaaaattcgattgtagattctgtaaacaaggatatcagtgtgagcgccagcgctcttgacggcagcagcactgggaactactctacagcgacattgaatttagagcttgtcgcagcaaatgtgtattcctggattgaggatattgtggacgagctgaataagtgcatcaataaaaatatcattaaagatccaagttgcagagtcgagttttatattctgccaattacgatggtaaatcgtgatcagatggtagggtatatgtctgatctctatgcaagaggaaagggaagcctatacgcatggattgcgtctactggaattaacccggacaactatgttgcgttgatggactatgagctggatgaagactttgagaataagtacccagtgcataggacttctttcaccgtgaccggtaaagacgatcctgaatttgaggatcacaacaaaggcggcagaccaccaactaatagcgaagatcctgctgccgtgcagcaaaagacaaacggtggtaacaatatgccgaagccgtcaacggggtaagggggtgagaaaatgaatagatgtattccgactggtagaatttttgaactctctaatgaacgccagatcacgggaagaagaaaaatcaaggtagttcttcacgagattttctctaaccatgatgagtggcaggagaacggtatttcctgggatgagacctatacacagcagacgattgactccgtttctaatatgtctttgtgtgttgaatttatcagcgaagacaggacgctaccatatgggcatgggctaactgagattgccgatatgccttatatggaagatgcgactgtcgttggacacttcgagcgcggttatattgacgatatcgaaattgacggtgttacaaaaagggttttggttgcagatggatatgttgatgaaatgagataccctaagtttgtagcatggttgaaagatcggcttgaacatggaacggtcaaaggttctgtggaaattgtaggtagaccagaaaatgaaaatcgtattatttacgatggcggttacaaagagaaaggaagaatcccgcaaatctatgattatagcgggtatgccattcttggtatcagaccggcagatgatacggcaatcgtcatggagttaaataataaatcacaagaacataaggaggaaacaggtatggatgagaagatgatgagccaggcagttgagcttatcaagtcttctgtaactcagaccattaacgagttgaataataagagtggcgagtatgagaagaagattgctgagctgaacgatgcggtggccgcaaaagacgctgagattgcagagctgaacgagaagttgaacactgccaatgcgtctgttgctgagaaagaccaggctattgagagccagaccaatgagctgaatagtctgaaagaggccaatgccgcactggagaaagaaaagaagattgctgagctgaattctgctctggcggagtttagccaggaagagcaggatcttgccaaggctgagatcgaggcatttaaggccgatcctatgtcagttgagattaacagcatcacaagcaagatttgcgtggagatggttcgtaagaacaaggagacacgcgcagtcgaattgaacaactctgctcccgacattttcggcggtgtgaactcccctgaagatgacggcgatgtagacatttttggctaattaaggagggttaaaggaatgaaatacaagactattggtgcatttaagaatgtgcagaatatcccatattgcaaggcaactgaggatatgaaagtaggtatgggcgttgtgcttgaccgcgccgcaaagaccgcatctttggcagaggatgataccgctgcaaaggctattgttcacattgtcaccaacatcaatgacaagccggagcttcacaacagccctgagacttatgtggtgaacgctggcgagtatgtacgcgctgacgatcttagaactgtgaacgggcttgagattgagttcgctgcgtttgagattgacggcggaactgatggcctggccgctggcgatgctttggtatttaccacatctggcctggtgaagaaggttgctgacgcaactggctatgcagtttcctttaaggtgattgcaaagaccgcgtatatggacgatggcattcttgctgaaatcgttgctcagtaagaatttttgtttctaaaaggaggatagaagataatggataagatttttgagcttaacacagtcaacaatgtgaaagactctgttgttggttctaaggtaaaggccacctctccaatcgtagaggtgttctctgctctggcacagggtaaaaaccccgctgttgacggtaaggtagtagataaggctgttgcctatatcaaggagttggctggccgcgcaatcgacggcgatcatcaggcagtatctgagctgaacgcaattcagcgttttaccattgagcctaagctgatcgaggctatcaagatttttaacttcatgggtacatacagatcccttccttacgacaccgtgcctatgatgaagacctataagtatgagagcattgattctcgcttccaggcttcaagcggtgatgtacctttcgctacccacagcttccgtgagtacccaattgcaacacagactatttctgccggttatgcggtggactatcgtgagttgcagagcggaaactttgacggaactgttgctgagggtatggctcaggtacagactgacatgcagaataaggctgtgtactatgttatcgcaaagctttatgatgcactgaagaacgcaaaaggcgtaaagcacttcgctgagagttctggtattacccagactgccgttgacgatatgctgaaggtaatgcgtcggtacggcaagaccaatatctgcggcgattacgctgtggtttcccagttgaatgatttcgctggttataagactttcggtgcttccaccattccgtttggtgctgatgcggttgccgaagagattcgtaagaccggtttgctcagcttctacaacggttctaatgtggtggagctgccaaacgctcttgattacacccgtttgaatgaggacaagacttcctatgagctttatatgcctcaaggtttgctgttcttcattcctcagggcaacatcgcacctctccagatcttccgtcgtggcggactgaccactatgactggtgacgatatcgtaacccgtcagcacctgacccgtttcgacatggagattggtgccggcgtagcagagggcatggaggatcagattggtcttctgtctgataccaatttcgaggttcctactctttaataggaattagttaagttatctaaaaggggagggaaatactctccccttaatctttttataaggagcgaaagaaaatatggaattaacagataaggttgcaatcaacaatctgtgtagctgggcgctttattttaagcgtgaaaatggagtgggtgatatccgcatccccgcaaatgcaaagaatttttcccagttggatgtagctgaggttcagatgcagattcagcgcggcaatcctctgtttgtaggggatggcagatccaatcagggggatcacgctcgtttgtttatcgtggacgataagcagcgtaaggagcttcttggatatggagaagagtctgcccaggatgcggttgttctcaacgaggaatctgtaaaggctcttctggcgattcgtgggaaagacgcatttcatgcaaagctgaatgagcttgtaaccacgccggcagaaaagaagatgattgtccagattgcaaaggagtgcggcggagacgatgtagcggcctggaagatggctgcaattaacgagcttgccgacacaaacaccatttaagtaagggggatgaggtatggatcagcctactacttttacggatattgaaacaagttttcactccatgcctctaacgaaatataggatcgatcctggcctggagaaacagtggttagaaactgcgattgcagattacgaactcgatctaagcactgtgcttgaatacgacagtgaaagcgggtcgtttgcaaataagcttgatcgccctacagttcgcattcttgctttgatgatgtatgtcagttaccttcaaagagaacttagccgcgttatggctctcaacggtatttatgccaaagatattcaggttactggagcagacggaacaaagcgggtgacgaagcaagagcttgatagtgagcttagcagagtgaacacaatgcttcataaactcaaaaagaactgctttgattaaggaggggttgcaatgccagaatcatggtatttaatgtcccaacctttgtttaacagcggttttgagggcgatgaattctctgcgtttgcacaagggggatttgaagaaattttggattctccacttgcggatgaaatagagatttatgagaaaactctgtctgctactccggtttctgcacgtgcgattatacaaggtgtgacagcggacaattataacaatagtgtgctgcgtcaatttctttgtaagattgggacacttcggagcggacagtatatcaaggcaagaggccaaatgtggcttgtttattcgctccctgataacaataagatgtacgaaaaagcgattgcttggcagtgcaaatattcaatcaagtttgtttcaccgaccagcggagaaattgttgagtaccctgtttatgatatcaatagtacgcagtatggctctggtgaaacatctgaagaccatttgacgcttggcacatcgcagcacttaatttacatcccatataacgaagagacgataaagcttgacagtgggtttaggttcctcattgataaaaaccgtgataacccaactgcatatcgtctggcgcaagttgaccctggcggatattcctgtgggaaagatgacggcctgattcaatggacaattgttgaaagccaatttgacgagaagacggatagcaaagaattgatggtggctgactattttggcaaatcggagttgtctaagccagaacaaccgtcagaggttggttattcaattcgcgttaatccagatggtggagacgcatctatcatatttggagaaacactaaaatcttccgttattatttgcaaagacggtgtagctcagagcggattgccatttgatgtaacaatcaccgatggcgcagagtttggaacaattcagtctgttgatcaaaatggctttgtgctgtatgcgctgaacaatcgtgattttattggacaagagattacagttgaaatcacaagctctgaatgcgaagcatcgagcaaaacagtatttacggttagggggtggtattgatgtattttgaacaagtccctgaatacagagataccatcatggagagcatttgtaagtgcgatgccataattgatttgattcggccaactgaagccccagagatgagtgcaaaggaaatggcctacaaatatattttcccttatgatttcattgtggggaagacatctgaagttggaacttatatttgctttgatgttatcgccccaagaattatcaatcgctcattctcagatttcaatatctatatttggattattgcccatgaaaggactatgagaaccccgaaagggcttgtgacagacctactgacaactgaggttgacaagctgattaacgggagcaatgggttcggccttggtcgtgtggagcttaaatcgtgggatagatttacgccggctgaggattttcatgggagaacacttgtgtatcgcacagtggatttcaataggaaataacattggaatcaagagatcttgatctgagattgtgcgcaaaagatcctatttttgttgacggagttcctatctacccaatttcaattaaggaaatttctcgtattggctatacaaagtacaatactgatatccgctttatgtctttgaatgaaagcgatatcggcgctttgcttggcagggacatatccgatataggctcatttaattatctggtcggcaatgcgattcatgataaagagactatgcaaatgatgttgttttggctttccaaaatcacacatagtaagattaccttttctgggaagagactttcttttgtcggagatgggttcgagatcacaaaagataattttgatgaaatccaatctattgttagactcagaaatggcttacaagggatagaagaagaggaagaaaatccagataacgaggctgctcgtagggtcttgcagcggagaaaagaagagcgattgaaaaggcggaaagcaaagagcggcggagatgaatcctctttgacgcttgctgatctggtcagtatattggcaagtggaatgggaatgacgatggatgaaatcatggagtatgatttgtaccaattcaatgatcagttcaatcgtctgaaaatcatggaggattatgaagttaatgtccaagcgcttttacatggcgctaaaaaagaagatgtaaaactcacgcactggatcaccaagatcaagcgcgaagaagagtagtttggaacagtctgggaaaccaggctgtttagtttttttaaggaggtattgtaaatgtctaacgcaaaatttggcgcaaaagaagtcatggacgttgtgctctatgatatggagacaaacaagcctgttatccagtttgacagcttgaagacttcttcaattagcgtaacttctgagaaagtatacgcaagaggcggtaagggcaaccctaagctgattacatgggaaatcaataaggaggccactctgaccattgaggacgctctgatttctccgaagtccctggaacttatctctggcattgctcgtaaggttggcgtacagaccattcgtatgagacagactacagagtatgatgagaacggcgtaaataagggcagcatgtatccgctgaaggctgattccaccggtaagattaccctggcatttgagcctaacaccacagcagataagatcttggtgtacccttatgattctgactgcgaagagactgccctgtacgacatggagggcgctcagctttcaggcaaggagcttacggttgctgcggctaaggatcagcgtgttgtagtgtactacgactatgacagcgaagagaccgccgagacctatgtgatcgacgcagagcatttcagcggtacatacaagcttgttggagataccgtgctccgcaaccagaagaccggtaaggatgaggcattccaggttactattccgaacctgaagtttacctctaaccttgagcttggttttgctgccgagggtgatccttctaccaccacatttgaatgcgagatcatgcgcgactctgatactggcaccatgattcaaatggtgaagtattaagagttatagatttgaatatagggagggcgaaagctctcccttattctttgaaaatggtttggaggtatggcaatgagatataagatttatgtgaaagatgttctttccactgatagcggtctatgtgttgtaattgccattctgaatggtaaagacactcaaatttgtcttcctaaagattgcggaatcgaaaagtacattggagaagaggtgtattatgagattaagggcaaaaaggttcgtatctcaaaagcgcatcagccgcaagtctgtgtagagactcctattgatgaagaagacgagaaaggggaggaataacctctcctttttctttgtttggaacggaggatggtttttattaaaatcctggctattgaccaggcaagaaatggagcgtgggcgatatttaactacgacacaaaagaacttgaaacatatgggacattttcgtttggaaacaagaaatacacttacgcaaaggcgattcttgccatagaaacattagttgacgaactgataaaagagcatgatatatccgctgtgtttatcgaggatattcaattgcgtgtaaatgttcagtcgttcaaaaaacttgctcagctacagggtgtcctcgttaatctatttgagaaaaacgaatacctgtatagctttgttgctcctacgcagtggcagaattattgtaaagcacgtggtaggacttcaaaggaagtaaaagaaaaaataaagaccctcgaaaatgctggcaagaaagaatctaaaattttatcgatccagtttgtaaaagaaaaattccatatagatacagacaacgataacttgtctgacgctatatgtatcggccattatgccgtaaatcattttgagatagaagggaagacgcttcatgtcaaagaaaaacaataagatttccattaacgcattggaaaaatactgcggacaattcaatacagagccgcaggatattgagatccattatggggaagatgaagtgtttacttttacagtaaagccacttttgaccatggatgagtcagtgaggtttattgaagaggtcgtgcgggagtgcatcatgccagatgacatgctgattgtgccaattgcccgcgattttatcacaaaaaagaacctgatgacatattacgcaaactttactatgccggagtcgcaaagcaaaacctatgacctggttatggcatcgactggaattatcaatgcaattttggacaatatcgacattgatcagtttactatgatccagcggtcaattgatgagcggattgcatttgaagagcagaagatgatcgcagagcagcaaagcaatgttcggaagattactgaggatgtttctgaatttgtttctaagatgtcttcattgtttgacggcattgatccagagcagatggatgggtttatgaccagcgtaagcaaaatggcacaaaatactgagatctctgctcaaagcttagcgagtgcgtttttggagagcagaaacagtaaagaagactaaaacacttggaggcgcttatgaagaaagcatttcttgaagatgaatttatggatgttgaagatctgatggagacaacactacccccccctacattacttgagtattataggagattaaaagatcgtgagattttgtggaatgacttaatcgacgatggcatgatcgacattcctatgtatattttgaaatggaataaggaggattctggattgccagttgaaaagcgaaagccaatcaaaatctatatcaattctgatggcggagctgcaaatgtgactttgtatacagcgaatgttatttcactctccaaaacaccagttattactatcggaatgggaagagcttacagcagcggtgggcttttgctcatggcaggccataagagatatatttttgactcaacctctattttgattcacgatggctcgactggagcggtaggtgatacgggcaaggtgttggacaacctggaatttacaaaagagttcgaggcaaaagtgcggcagtttattttgacgcacacaaatattccagaagacctaattgatcgcaactatcgcagagattggtttatgttcagcgatgaagcaatcaagtatggggttgcagataaaattgttacagatcttgacgaaattatttaggaggccacttcatggcgcgaaagaatactatttcatatccaattaagccacagccgccaactaccctggatgataacccattctatggtattcagtgcgacgaatatcaaaagcagtttcgtgatgcaatttggaacccagaaaagctgattgtgttttgtaatgcaaaagccggaactggaaaaacaacgattgccaccgcgactgcaaacttgctctgtgaatatgggctttatgatggaatcatctatatcgcttccccgacacaagagcaaaagcagggttatcttgcaggatctatcgaagagaagtcagagccatattttgagccattttatgaggctttacaaaagattggcgttaatctgaatacggtactttttgataacattcttaatgagaagaatgggacagcttatatcagatgcttaacgcacacatttttgcgtggggtcaactttgagaataaagtgatcataatcgatgaggctcagaattattattttgacgaactgatgaaagttttaactcgaatccacgataattgtaaggtaattgtgattgggcatgatggtcagattgacctatacaaaaatccagagcgcacgggctttgtacgatacatgaaatggtttgcagaagacgacagatgtgctgtgtgcgagctgaagaagaattatcgaggatggatcagcgaacacgcagataatttgaaatacttttaactgaaaggcggaatcccgccttttattattttgcgaggtgggattatgccaaaattcaaaagcacaaaagagcttgtggcgtatctacaaaaaactgtagacagagttcttacagaagatgtgttcccagttatacaacaagaggaagtacaggcggttgatgatgtcgtttacagtatgccgacatctggatactaccaaagaagatacgattatgagggtattggagatccagataacatcgtgataaagggtggagccgcaaagaatggcattatggccgttgtaaacgaaacagatccgaacccatatttgaatggtagaagtggggcaagagctactgtaaataaaagcttgccatatgttattgagtatggaattggtcaacctggagatccagggtatgattattgggctggaaaaccaagacggtttacagcaactacaattgatcgtctggatgcttctggggcgcatgtgattgctttgaaaaacgggttaagaaagcacggaataaaagtgcgataaatttcaaaaggaataagttaatttacttttaagtgaggtgattgtgcgtggatgaactgcaaattctgctgaaagcgatcattgatagcgatagcgtcacatcgcttgactctcagttgtccaatattgttaaatctctgagcgcatcgcacgaagtaaagctgaaagtagccgttgatgagacttccatcagaaccacgcagagccagctacaatcaatcgctaagcaggtttcttctgctggaaatagcgggagacaggtacaactcaaagtctttgacgctgcgcaattacaggcggacggtcagagatattttactggtgtaagagatattgtttctcgtgtccaaaaacaattcagtaagcttggcagtgtagatgttgtcaatgtgtttaaggacgcacagggcgatattcagagttttaccgcaagtgtgactaaggctgatggagttgtagaaagatttaattttaacctttctaaaattcgtcatggctcaaggacatacagcggctttgtgcaggaaaactctattttgtctgataaaaatgctggtacaaatcttcagaaaacacttgattatctgaaccgaattgataacaagattgcggatattaccagtaggactctctccaatacggcaaagccactgcttgccgatatggagcagtataatcagtatcaaacaaagctgacacaagtaaaaagtagaattgatgaactccgtaaggcgaatactacgttgtctgcggatcataaacgagaaatcaattctatggtggctgatttgcaaagatacgcacgggaacttcaaacatctgcgtatgcggcaactgatttgaatgcagccacatttacaaataaaaaggccgaacttcaagctgccttgcaaactgacatccagcgttggcaaaactctggtttgttcggcgctgatttcaaggcggctgtaaacgatgcgaagcgaatgcttgacgaggcgctcgatccaaccgatcttgatgcgtacagacaccagttgtcgttgctgaatcagcaatttaagcagatgaagcttcaaaatactgcgtctggtaaaatccttgacgcagataggttgacttcaaatattcagactgcgcagttgcgtattcagaatctgaagaatacttatagctcatttgtaaatgatccaaatctgttggcaaaatggcaacagctctttgacgaatcaaagatgatcagcagcagtaaagagctgacaaatcttaacgctaaaattcgtctgtttgagcaagagctgatcagcgccggtaaacacagcagatcgctttgggatgacctaaaggcaaatgccgcaaagatgggttcatggatggtgctgggcggcgtaatcgccggcgttatgcgcggtgtaaccggcctgtatgacgcagtggttcagcttgacagtgctatgacagagctgatgaaagtaacggatgaaaccgacgcttcatacgaagcatttttgtccgacgctgctgacaaggcggtacagattggtactacatatgccgattttgtagactctacagcatcatttgcacgtctcggatataatatggaagatgcctctcagctttctgaggttgccaatatctatgctgtggtaggcgatgaggtagatggcattgaaggtgctaccaactctatcatttctactatgaaagcgtttggtattgaggttgacgacactatgagtatcgttgataagttcaacgaggtgggcaaccgatttgccatttcatctggcggtattggcgaggctatgatgcggagtgcatctgctatggcagaggcaaataatactattgatgagtcaatcgcattgatcgtagccgccaacaatgttatccaagatccagatgtcgtcggtacaatgtggaagacggtttctatgcgtattcgtggtgcgaagacggagcttgaagaagccggccttgaaacggagtatatggctgaaacaaccgcttcgctgcgcaaaaagatccttggactgaccaatgttgacggcagcggcggatttgatatcatgctggacgaagagacgttcaagagcacctatgatatcatgcttgggatcagcgaagtttgggaagatatgagcgatatcgaccaggctgctttgctggagctattggctggtaagcggcaaggtaacgccctggctgcggccattaccaatatgggcgacgctgttaaggttatggacacctctctgaatgctgaggggtctgccgttagagagcatgagaaatggatggacagcattcaggccaagcagcaacagttccaggctcaatatgaggtgtttgcaaacactattttgagcagtgatttgatcaaaggtgtctttgacgctggtactggtttgcttgggtggcttacgacattggtagatacggttggcgcattacccgccgttttcgctactgtaatgccatttttggataagctcaatttgttccgaacaacagatcagaaaaactggggcggctctggaacaggcattgcgtttgcatggaacgcccaaaagcttgaacttgataacgatattaagcttttggatgaatataatagtaagattgcaaatctcggaacatctacgggagatctaactcaacggcaaattgtatggaatgatacaattggaaaaggcagtgataggctgcgcagtgccgtaaaggtttctgacgatgcggcggtgtcttctaaggcatatgcctcttcaatggagcaggcaagcataaagactacccttatgggtgttaagtctaaggccgctgcaattggtgttcaggtacttaatacagcgcttaatgcgctgatcggtcttggtattggtcttgctattaacgcaattatttctggtatcacttctcttgtcaacaaatcaaaagaggctcgtgaagcagctttggaagctggttctgccgccgtccagagttcaaatgaactatatgatcttgcctcatcatatattgagatgagctatgccgtggaagctggcactgcctcccaagaagatctgatgagtattcaggatgagcttgttgcttatcttgagacccaaggaatcgccgttcaaaatctttctggagattacaaggatctaagagattctattgttgaagcggcaagagagcaaatgcgtacaaatatctctcaaggagcaagagcggctgatattgcaaaagaagaagctgttaaggaacttgatggatatttcaactcacacagcttttattctgcaacgggtgaagctgctggagaagcaatggcctatcttgaatctcttgggtatgaggggatcgacaacactggttcaaatggtggcggaacaatctttcttccaagcgtttatagcacagacgggggattagaagatgtagaattttcagacctaatggcaaactatgagtatctaagagatactatgaatgctgtaagggatgagtttggcactgataatcctgtttttactgtgcttgcagatgcttacaacgaatatgagtctgcacttcaagaagcaatcgaacagattgataataccaatcaaatgattgctcaagacgctttgcttgctgcacaagctcttgaccagcccgctacagtagacgagtttaagcaattcagagagcagatgatccaaaacatccagaatacatctggatttgatgaggatggtacatatactgctgagcagctggcggataatgtacttgggtcggacgatagatattctggtctcctggcggaactacaagagcgcgaagcgtctgctgaggcagtcaacgataaaatgcgtgagattgctgaaaagcttgttcctaaaacatatgaagagcttactcctggaacatctgcacatttccacgcgatggagtcttggagcgcagaggtcgaaaatgtaaaagacaaacttgaagctctatccgacgaagattttgaaattgcctacaatgcagttatcaacgaaggtgcgacaacctgggaagatatcactgctgcaattgaagagtacaatagtgagcaggctgtagcggccagaaatgcagaggcattgcagagccgtatccgtggtatgtgggactctgaggacttctcagataccaaggaagagcttatcgctatgtctcaagcagtggacggtattactccacagaatattgaagaactcgcttctgaaagcagtgtgttggctggcattttggaagaggacggaatgaatgctcaattcctctccaagattcttcagaatatggcagagggcggagacggcgtttctcttgttacggctgaggctctaaagctcaatgatgcccttgatggtatggtcgataagtttgaccaggtaacagatgcaaagtcgcgctatgatgcggctatggctgtagaggaaaaggataccgatttccgttcttatgcagaggcatttgaagagctgaacgcccaatttgaggctggtactacaaactcaaatgctttctgggctgctgctgaattcctgtttggcagtgagcagcttaatacatggggatggagtgacggactggatgagatctacgatgctatgcagcgtaataagagcgtctttgaggatgcggacagcgctggtgctggatttatccagagactttacgatatggctcaggccggccagttggtcaatgatgagggcgaagacctaatcgagatcagcaaggatgcaactggtgcattcagttttgatgttgatcctgaaaatcttgacgagattgcagaaaagatgggtatcacggaagaggcggttatcgcctgtttcgaggctctatctatgtggggcgacattgacttttacgatctcactgaggtatcagaggttattgacgaaattggcctctctgctgaaactgctgctggcaaggctatcaatgtagaccgcttgacagagcagctgatgacccttggtaaaacagataaagagatttatgatgttttgtctgctttacaagggcttgatggcgtacagctatttagtgtatctggtgatattgactctgtaacaacaagtctacagaatcttggccttgctaccagtgatgattatacaatcacggttaattatgaagggcttggagatcttcttgccaacattggttataccaaggaagaagcagaagggcttattaccaaacttggcgaagcagacggcatttcactggcaaatgctgatggtcaagtgcagagtgtaagtgacgcgcttgattatatcgatacgattacatttaccaatgttacaacatcaatcaatggtgttgaaactgcaattgacgatgtaaatgactctactacgagcaacgcagagtcagaaattgatgacattggatcagccgcacaagatgctgcaacaaaagtttatagcattggtacggctattgatagtgtaaatggtagaactgccactgtatattataatgtacagcgtaaaggtggtcttattgacagtattggtaatctgcttggctttgcaaaaggcacttctaatgcgccggctggcaatgctttgcttggagacgagtattcacccaacggttctccaaagccagagcttgttgtatcgaaggatggagcatatctcgctggaacaaacgggccggaaattgcctatttgaaccagggagaccaagtttatactgcggatgaaaccaaacggattttaagtcgttctggaaagcgtatcactggtacaattccagcatatgcgtctggaagaatcacaacaagcggtttgcgtgtcgaggttgacaagaacggctctacgggcactccgtatacttctcccacgacaactgccacggtagatgttaaggctgaggttgataacgaagagcttgctgaagagatggaggatgccataaaagaaatccaggatgagcttgacgaaatcctgggtaattatgagcacgacatctttacgcttgaaagaaatgatggaactccagaagaaattattgctatctataggaagatgcaagacactgttcaccagtatgcggaaaaataccgtgcaatgggactggatgagaataacgattacattcaggagcttggagaacagtggtgggagtaccaggatgagattgacgatatcctacatggtatttatacagatgctgttgaggcgcacgaaaataccattgaacttttgcagcaccagtatgatggcctaagcgatagcaaaaactatcgtgatatggctaccaatctggaacggcagcgtcaagagcaactgagaatccaggagcttgcccatgaggaagcacaacggttaagagcgcttggtgtggacgagaacgatgaggcaattcaggagtgtattgacgcatggtgggatgctgaagacgatatcaaggaaatcaatgaatctatcgttgataatgtacttgaaccgtttgatgagtttatcgaatatgcggatgactttgacctttgggatcggtttgatttcacaaaagtagattacctaaggcaaaagatcgccgcactgaatcggttgcttgaacagggcgttctaactctaagggagtacacggagcttttgcgcgaaactcaactcgatatttataatgagcagaaagacgctattacagaaatcattgaaaagacaatggagctggtgcgtcaggaggccgaggataaaattgacgctctggaagaacagattgatgactaccagaaaatcattgatttgaagaaggagtctcttgaagtcgccagggatgaagaggattacgagcgtgaggttgccgagcgggttgctgagattgccaaggtacaggagaaaatcaatcagctaagccgtgatgatagccgcgaggctaacgcagaacggcagcagttggaacaggagcttgccgagcttcaaaacgatcttgctgattaccaggcagactatgcgtatgatgcgcaggtcgatgccttggacaaagaagcggacaagtttgaagaaaccaaggataatgagattgctaaggtcgaggcaagcgttgacacagaggaagaggtttacagagccgctattgaccgtatcaatgcggactgggatcagctataccaggatctgattgcttggaacagacagtatggtgacatgattgatggggaggattcaattacatctgcttggcagacagcaatgcaggccgcacagcagtatggagatattgtgtctgctctcaatggtatcaataatgatatcgccaatgagcagcaaggtatcttggatcaacagcgggaagacgctgaaatcagtgcaattatgtctgagatgtatgcaaatggtcaggcgtgggggtctgcctccgacgaagagaaacagcgcctcgctgatgaaaacctacggcttggcagattgcttgccccgtatggtattaacgcagtccgtggcgatgacggtgtatggtatgtagatcgcgttggtggagagcaactgttccaaaaatatagacagtatatttatcacgacggaggaattgttggagacgattcgctgaagagcaacgaggtattcgctaagttgcagaagggcgaggctgtatttaccggccagcagtatgaaaatctgcttggacaaatcggtagtgcgattactggcgtggtagactctgttgtgcgtagtcttgctaccgcaagagacacaaccagcgatgcaattcagtctgtcattaacaacgagagcaccgacaattccatgggggcaattagcattgaaaaccattttgaggttaagaatgcggacacgcaatctgctaaggaattggcggactactattctgatcgtacaatcgataagctcatgaccgctgcaaagcgtaagggcatgaagaatagtttaggaagtcatatgctccgataagaacatgcggccaccaattacggtggccgctcattttataaaaaaggaggctttgaacatggttgtagattttgcaaaggtcaatgtgaaagagcagcctctacttattttgcagaacatggatgatacgccaatcggtgtattgggctacgcttttaatgtagaagcggatctttgctataacgagatctcaacgctatcgttcgatcttcctgggtatgtagacggcaaagcaactccgaactacgaaaaagtagttggaatgagaatcattgatctaaaggactatggaagatttcttctggtagatcctaaaacaaatagcgacggtgtgcgagaggtaaaaacctgcaccgcttattctctggagtatgagtttacatttaagaagcttgtgcttacagccggaacatacaatttgtggaatccaattgcaccgaaaggtacgattattggcatgattttagatcttatgccgtcttggaagattggacaggtagatgccagcctgattgacaagtatcgtacctttgatgatagcggtgatcaaaatatctataattttatgaagtcggatttgcaggagtcatacggctgtgtatttgactttgacacatacaaccggcttatttatgtaagagatatcgaaaacgagccggagacaacaccagtattattttctctcagcaacctaatcaaagaggtatcagttgaagaggacacggaaagcattgtaacacaactaagtgtttacggtgcggataatgttgatatccgaagtgtgaaccccatgggaacaacgagcctgattaaccttgactactttatgacccatgactatttctcgcaggatattatcgacaaatacaacaactggaaagaaacatttcaatcttaccagcgaacatatttcaattacaccgtggaagaggctttgaagacagcccagctccttacagagcaggcggcaattacaacgctggagggagaattaaaaagtcttgagaatatccaggccactacgattcaggcgattgctcaaggattgaagagccaaagcgatctgaacaaagtaaaccaggatatctctgttaaaaagggagaaatctctgcaaaacagagttctcttgctgatattcaggccgaagtggacgagcttgatgaaaagatgcaggctatcaatgagataacaaaactgagtgctttttttacagaaaatgagtacaaagtaattgaccgttatcttaaagaagattccatttcagaggattcctttgtggcaattgaggtagattcatttgacagtgctggtgagagcatccctgcgtctggctcgattttcaatatcacagacgcaacagttactaaagtcgtaaatgaaaccggcaaagatatttattctattgttggtggtcatatcggatgttcaacatcagggtttgtcttggacgctgaaatcatccgggcatctcttgattttgatgacgaccacgatttgttgtttaccgcaagactttctgccggctctttgaacggagaatcgttcccaagcggctgcgtgtcggttgccggtactggaagtacggtcacatccaatgttgtgccggattccagtgtgggcggagcaattgaagagggtagctctgtttcctttaagattggcactgcggatttgtactttaccagaagcacaacggagtacgaaaaaagagcagtagagtgggacttgcttgactatggcatggagttgatggagcgggtgtcttatccatcctatacatgcacattggacttggcaaatttcctcgctatgtcggagttcgagccatttaagaagagcttgaaacttggtagccggctatactggcaaagatcaaatggcgaagttatgcgcccatatcttgtgtccgtaaggattccgtttgaagatttgactggatttgaagttgagctttccagcaaatattatgcaaacggagacgggtttaattttacagatctgattgaggaaagcaatacggcagggaagacgcttgacagcgggaaatggacatacagccaatttgtcaatagcggtgccgaaaccagccttagtaagttcaccaaagaagcgcttgatattgcaaagaataatatcttgtcatcaaccggtcaggacatctcttggagcgaatctggattgcggctaagaaagcggaaagaagattcgccaacggagtatgacccatatgaaatctggatgaacaacgggcaaatcatgttcacaacagataattgggaaaccgcaaatttggcgattggtcagataaaaaccgaagatggcgggattatgagcggtgttatcgcagatagcctgattggtaagcttttggccggcagcagtatgattatcgagagtgcaaagaaagatggagggcagtctgttttccgtgtagacgggaatggcgcttctttgcataacgcaatttttgatatctacaatggcaaccaagttcagatcacaatgaacccgtactcaggatttgcaatcgggaaatacccattatattccgacgacgaatatacaatcaatgaggacaatgcaaacttctgggttgatatcaatggtaatgtccatattaaaggcactctggagggctgtgatggcacattcagcggggagcttgtagccgcaagcggaagattcaaaggagttgtgcaggcttctgattatcaggatttaagtggaagaagtatgctgacatcaagttataaattctctccgacctatctggaattgcgtggtttgactattaacaatggaagcaagaatactcttgttattgatagtgctggcaatattacgatggacggaaatattacgcttggatctggatcaagaatcaattggaacactgttacacaacttggtacaaacccgcagatttcaaatcttgaaagcgatatggacacacgacttaatagaattaacacgcaacttgattatgtatatgaggatatcgactggcttagtgaaaatatgtggacggagaaagaaatccgtaatatttcttctacggtcattaccgacgagttggtttcctcaccaatgattaagggtgcttatatccaaggtggtacgattcaaggttgtgacttcttgttcggcgattatggtgtaatctatgacggatacggtagcgacggagtgaacagaaccgatctggtttatatcgagtctatcgagggtattgccattgttgccgacaagggtatggcgcttcgagctggcgatggaatttggattccagatgatatccacattatggttgatggagactacattgatttgggatcggtgatttcagatctacttgcaaaataatacggaggaagtatgagagatattatcaaaaaaatcaatacggctacgatggtgttgagcaatatcgatgtacgagggaaaaataatcttcttaatcttggcggtgcaatcgatctattggagggcgttgcggctcaactaacgaagattaacattgaaaatacgctcaacaaagatgatgagcaggttgcaccaactgaacaagctgaataaagaaataaccctcaggaggtggtgttatggctttttggggtgactactttgtatatgatggaatcccatgtacggagtttggcctaagactatatgaggttaatggtgtaacacctggagagggaaaattctctgttgcatcggatgttttagaggacagggttgcaaacagatatcggcctttgttttatggtgttacacaaaatgaaccgctgtcatttaagatggtatttggcgctgataaagagttagccaattcaggcggcttttttgatgcctgggatagagaggcgatcagttcttggctatccccgctggatgggtacaagtggctggagattgagcaggatgatatggagcaggttcgataccgctgtatcattgaagagttggagatggttgaaatagggaatctcccaatcgcgttttcatgcacggttcggtgcgattccccatttgcctatcaatatcctattacctattcgtatacatgccaggggaatacaagtattttgcttagaaaccttggaagttatcgcggtgggtattatccaaagctgaaaattaccacaaatggaactgacagtatcgaaattatcaaccattcagataacgatagaacttttgcttttactggtcttccacaatcgtattttttggagattgaaattgacaacgagaatagggttatcacgaacaacatggatattaacctctatccatgttttaattttgagtttttcaaattggtgtgtggagataactccttggaagtcgttggggattgcaaattagatattacatgcgagttcccagttaatgtaggagggtaagggagatcatgattagtaaggtttataatttgcctgagatctcgtttgtaggtggagagacacacgatcttcgctttcacctatttactgatacgggcagggtatttaacgcttctggagcaaaggcaactttttcaatcgtgtactcggttaatagaactggaacgccagtattgtcaaaatctatgacggtgcttgcagacgacgacgggattgagagcgtacttgcggttacgctgcttccaaaagagaccgtaaatttgtatgggaaatatatttaccagattaccattcaggatatgtctggtgaaacagatatcccaagccaggggatcttagggattaccaacaatatcgacaaggcggtaattcgttaagtttctcaaaaggaataagttaatcaaacttataaggaggaaataaaatgaacactacatactttttgaatcaagtgatggggaatttgttcaagacaaaggaaactcctgctttgccaactgagtattacattggcctaagttctacacaaccagcagtgggcggaaccggtgtaacggaacctctttctaactctggctatcatcgtgtaaaacttgagaacctgagtgagccggacgacggcgtgattaccaacgagcaggcgatttcgtttgacgaatccacttcaaactgggggacaatgacacactttgttatttacgaccagttggagggcggtaatttgctcatgtacgataacctgtcaacagctcgtaatgttgaggctgctaccatcgtcacgattaaagcgaatagcttgactctaactctaagcaaccccagcgcctaagtaaatagttaggtggtggagaaatggcgcaaacatataacatttatctccgaaaacgactaaccgaatttgacctgatcattcgcaatttgccttatcgtgatggacttattatctataacagaatgtaccttgatgccatggtgaattatctgacattgcagaaatacatcattggcgacagcgatgtgcagctatcgtctgaaattgatgacttgctggagcgtgtttacaatatcttctccagtgggatggagcttggtgcagagcttgaagtatttgcggctaagccaactggcggatcgaccagtgctgtgctgagcacgaacgagacagaggtgcatgaagagacattcaacacatttcaaaatgttactcagcttttgacaagtgcgttgaaatacgatattgcgaaatctcttggatctggtgcaacagaaatggagctttcgtctgctcccgcctccactttgaaagaggcgttggaaaattttgaggatgatattttgttggacgcagatgtatccactgctgcggttgtaaacgctgaaggggattcggaagttgttctggacacaagtaatccaaatcttttctaccttttgtcagtggaaggagaggcgatgatgaatcttctcttctccgctgattttgaaatgtggtacacgcttggaactggcaatagttccatgtatttaagcgtagagaataatggcgtggagtctaagaagttcatgacgtatgaaagcttcctcaatcttattttggaggtagggaatatcctacagtgttttattttcccggaagagagtgaagcgcagttgcattctgaacttggtgtcgggatgatgagatatcgcttgctttctgatatggataattcagcactgaacgaacatgacgaacttacattggatgaattggattatgtaattttggcatgatgattttgaaaggggttttaatatgtcgaaaggaacgcttggtagttttaatggaactactaccgccaatgtaaacatgcttgatatttttaagcaaaatgaactggcggcacatgaaaacagcacacttgcgtttacggatctcatggtaatcaagaagattggtattaagtgcgatcctggaacggaggtagttattaacgggagtgaaattccgattgtaacaggtgtttttgagcttggctttgatcaggtcgatattacaagcctggtgttcaaagaagctaaggatgtaaacatctattacatgtactaaagggggtgttagagatggctgatttgccattcttcggagactcttctttcggtggtggaggcggaactataactggcaatccagtagttgatgctaagcttgcagaaaatggcgacatgatccttacgctaagcgatggtacgcagaaaaacattggtaatgtcgtaggtgaggatggcgctgtttatgtcccacatatctcagatcagaaagtattgtcttttacgattgaggatgaaccgggcgaagtcccagatccagtagacctaaatccgcacgatgaatggtctggaatcgacgatagcgaaattgtctccgactatgtgtgggagaaaatgtaacgctatataaactcttagagagtgtttatataagaaattctgctgtaaaggagggaaatcgaattggctaatgtaatttttaaggtcggtacaaaatcgctttacaatgcgttggagcagaaagataccaatactctgtactggttgaccgacaccaaggaaatctataagggcgataccctgttcggcactggtagtgcagcaacacaaaccgctgctggcctgttgtccgccgaggacaaagtaaagctggacgagcttgtcgctggaaccatcgccggtcttactccggtagacgcgacaatcctaatcgcggatgacggaagtggcggtaaaaccattggtgtccaagtttccgaagaggcgggaaacatcatcgagattaaggatgatggtttgtttgcgctggcaaacaacgactcttacaccattgaaaagcttagtgccgcaacagaggggtactccgctacatatcgtctgaagaagtctactgcttctggcgatagctatgttggagacgcaatcaacatcccgaaggatctcgtggtgcagagcggtagtgtaaaggtggtcacagaggctgacaacccatattctggcgctgcaatcggagacacctatattgagcttgtcctaagcgatcctgacgcttcccacatctatatcccaacaaaggatctgattgataccagcgactttgttgtggaagagatcgtgaacgatgatggcggtaaggcgatcatcatcaacgagcctacaggcggcggcgcaaaataccaccaccaggacggcactgagtcgtttgtgggcgtgaacaatggcggcgagaacggcatggttgcgcagatctacgccgacaaaaatgtagacggcaactggatcggctcccgtatcaatgtttatcgcaagggtatcttctatcataatgcggaggataaagcatccgatggttatgttgcggacgatcccaaccacgagattgcaacaaagggcgatgtaaccgctgttgcaaatctttttacatggcaagaaatgtaagaaatagcccagcggaatgaccgctgggactttattttataaggaggaatataaattatggctactgttgcttttaagaaaggtcttttggctaatctacctgtaacttatgctgagggtactttctatgtaaccacagatgagcgggctatttatcttgatgtaagcgattctgcccgtattcgcattggcgatttccaggaggttgccaatgttgctgctttgtcttctatccagaagccaagcactaccgctctgtactatgctactgctgagaatatcttggctaagtatgatggctctgagtgggtgcaaattaaccctgacactggcgctacttctattgaggtaattggcgatggtaacgccgtgactgttgccgcatacgatgccggttcccgtaagatcactctgactaagggtgccacttatactaccgcttctgatgtttccagcgcaatttccactgctattggtgatctgggtgactctgacgagggtactccatatgccaatgtaaaagcgtatgttgacgagaagatttccgatgtagtcgcaggctctatcgagggtctgggcgatctggcttctaaggatgaggtagctgaggccgacctggaggctactctggcttctaagatcaatggtaaggcagactctactcaggtagctaccgacattgatgctgctaagactgctgtgattggcaccgcagaggacgcttccactgccgatactatcaagggcgctaagaagtatgccgatgagaaagcttctgctgctcagagcgccgctgagtctcacgctgacgatgctattgccgctttggatgtttccgattctgcggttgcaacccagttcgtaactgccgtatctgagactgatggtaaaattgccgtcagtcgtcgggctttggaagccgatgatattcctgagattgcccagtctaaggtaacaggtttgactactgcgcttgctggcaagcagaataccgttgtgttcaataccgcctatgatgctgaggacaacaaggctgctaccatgacggatgtgcagaatgctgtggcggatttgtctggtgctatgcactacgagggtaactccaccaccgatcctgctgagggcgagcctactgttgccggacacgagggcgcatgggctaagggcgatgttgtaacatacaacgctaaggagtatgtgtacgacggttctgcatggcgtgagcttggcgatgagacttcttatgctgtgaaaggcagcatcaaggacgctgatattgccgcagatgcagctattgctcagtctaaggttgcgggcttgaccgatgccctggctgctaaggctactcccgccgacatcaccaccgccatcaatggtctggatgtacctgacgaggccgtggctggtcaggtcgtaagtgccgttgtggagactgacggtaagattgcggtatcccgtcgtgctttggtggccgacgatatcccaactctggagattgcaaaggtaaacggtttgcaggctgctttggacggtaaggctgtagggtctgatatcaccaatgccattgccgcactggatgttgaggacaccgctgttgacggcaaggttgtttctgctgtgtctgagactgacggtaagatcgctgtgtcccgccgcgctttggttgctgctgatattcctgagctggctcagtccaagatcaccggtttgaccactgctttggagggcaagcaggataatttggtgttcaacaccgagtacaatgctgccagcaacaaggctgctactatgagcgatgtgacaaacgctttgacttggggcagcttctaatctaaattagcaagttcatgatttcccatgttgggggcggggtaacacccgccctcttttcatttctctgtagaacggaggtaaggaaaaagaatggctctttttaagattttgaaaggcgatagttccagaatctctacagatgtgaccccattccacgatgggtatgcctattttaccccggacgatggcggtttctatattgattctgaggataacggagtccagaagagacatcgcattaaccaaccgggcggaggcagtaatgatgtatctgcaaccctgcttgcatccgcatgggtgtccggccagcaaacggtcgccattgaggggatcaccgctgataccgatggttttgccggcgttacccaaacaatttccgacgctgaattagaagcggcaaagaaagcggagctttatgtgtgtggtcagagcgatgggacattaacgattgcggcatttggtgatgtaccaacctgtgatattccaatcgtagttatcttgttgcattaaaagggggtgtagccgatgagtgagacccctaattatgggctttatttggaagatgatgcttccacgaagtttcaggcgtggcgtgaaaagataaatggttctgataactccaacatggtcaagatcgatacagctcttgggactatggcgaagaaaagcggaaacttgaccgcaacacttctttcttctgcatggagcggtattgactcaccattcacgcaaaccatttccctggaagggcttggtagtgagcaaaatggatttatctctgtcgcgcagaatgcaacgattgaacaacgggacgcagctcgaatggcgaagtttgctgtgatcgggcaaagcgaaggggagcttacgattgcggcggatggcgagatgcccgatttggacatccccgttgtagtgattcttttaggataaaggagggacatctaaatgcctattgtatctaactttccatcaggtggcggaactggcggcggagggctacagctcgccgctgtttctaatattaccaccaaagtatcgcatgggaaggtgtatgtaaagtggactgaccctgaagacctggttgtagcagagtctacactggctgaatgggctggtacgctgcttgtccgcaaagccggctctatgccagttagcagacgagacggcacggttgtcgtagacagcaaggtgcgcaaccagtatcagaatcagtatttctgcgatagcggactatcagatggtacggtttactactataaattcttcccatatacaacaaccaatacttataccgaaaatgaagattgcgaatttaccgcaactcctaacgccccggttttgggcaatgtttccggtatgagcgctacacctgccggtaacggcaagcttgcggtgaagtggacagacccagcggctaccatcgtagaagatgggcttacccttgcgacatgggagaagacaaccgttgtggttaaggctgggggatatgcaaccagcccagatgatgaagatgcggcatacacactcgctgttaccacgagaaaccaatactcaagcaatcctttggttgtcactgggcttacaaatgggacaacatactatgtgtcgttcttcccagagactaccgatggcgcggtaaatgtaaacgcaagtaatagaataagtggagaagctaaccgcatggtgattgccacggttccatctcagagtggatctcttacttataacggcagcgcacaaactccgtcttggagtaactatgatacaaccaagatgactttgagcgttacaggccagacaaacgccggtacttacagcgcatcgtttactccaaaggacgattatatgtggagcgacgagactactgcggcaaagcaggtaaactggacaatcaataaggccgctggcagtctgagtgtaaaccccacaacggttacgctggatatggagcatccgacagctcaaatcaccgtaacacgggcaggcacaggcgcaattacggcacaatcaaacaacactggaatcgtcacaacaagcgtcagcggtaatgtgattactgttcacaatgtaaatcagacgagtggtgacactacgattacagttaaggttgccgcagacaacaactataatgcgcctgcggacaagacggtgacggtcaatgctaaattcgtcagcaatacactgaacgagaacgattggtctgttattaagacagtttctgatagcgggcagggcgataactattgggatatcggcgataccaaaaccatcgtaatcaatggtaaggttggtaattttacattcaacaatctttccattgatgcgtttattattgggtttaatcacaacagttctcgtgagggaagcaaccgaatccacttccaaattggaaaaattggcgggaagatggtcgggcttgtagatagtcaatataacaactatcagagtagcaatggctattttaatatgaatccaaacaacagtaatagtggcggttggaataatagctatatgcgcaagaccttgttaggtaacactaactcgccgacaagcccgcttgccaacagcctgatggcggcactaccttccgatttgcgagctgtcatgaagtccgttactaagtttacggacaataccgcaaacggaggcgggaaccagagttcttatgttactgccactacggattatctatggctgcttgcggaatttgaggtgcaaggtagccgtacatatgcaaactcttacgagaaaaattaccagcagagatatgagtattactctaaaggtaacagtaaggttgcgtatagacacagcgctaccggtagcacggcttggtggtggctccgctccgcctattacaacggtaacaaccgtttctgctctgtgtggactgacggctcggccgtcactgtctatgccgacaattcaggggcgttgctgcccggctttgctgtctaatccaccgcagtgtatccaggatcaatcccgccaacgacagttggcgggttcccccgataggacggcaagggaggacgaagacaataaacggcggcgcgaagcgccgccgcgaatttttctgcattttcctaccatcccaaaagtgctatcacttgacaggttagtgagcgcatacaaaagctaagaatggtcataaaataatagcatgtcattgggatggaggttcttatatgccaacaaacaaacgagtgtttacgctgcgtctctcagatgaaattttcgataggatcgggacgcttgcggctcaggaacaccgctctatgacaaattatatcgagtatgttctgatcaaacatttagaagaactcgataaagaaaaaggagcgggtcatatcgaaaagaaaactgattgatgcgtaaaccagcacgataaaagaggtgaaagattgtctgtactaaaagcaaagcgaaccgtaagcaaggctgagtttgtaaataccgcaaaccagatctatgtggaaacgctgaattttctaacgaggatgtcggccaggtattcccggcttctggccgagcctgtcgcaaagctggccggcgaggttgtagatcactgtgaaaaggccaacagtatttttccgtcagatgaacagagaaaggatttgcgaaaggcgcatctgttagaggcaagagcatctctgaaagcgctggatgtgagacttacccattgctatcttataatgatgcaaaacccggaagggtgcttcacgacgagcagtgggagacaggttggctcgaaagaagctgtagaaaagcttgaccgcatggctgcaagccttggtgaaatgattgatcatgaggacgaattgatcaagggcaatatcaagtcagttggtcaggcaaaacaaaaaggataactaaattattgggtgcatgtctgtaagtgagactgttttttgtccgctctgctgtgggcttggtggtggctccgctccgccaattacaacaataacaacaatttctgcaatgtgtggactgacggctcggccaacaataacaatgccaacaattcaggggcgttgctgcccggattttgcgatgcgaggtcacatggagtaaccgtttcggtgaaagacgaccttcgcaaaaggagatatgcttcccttggtgaaagcccataaaactgcccatcgacgacttttacacggacgctgcttgcatggcgggggattgcgctgacctcgtttcatgtgtaaggtcaatgtagtttggacgcgcacctacaacttaactatgcggagggcgaataatttttatgacaagcgaagagcgccgggaggcgcgatatcgtcgcaggaaacaaaagcgactaataaaacggtggatgagaagcagtgcggtaggctctctcgaagatgtttttaactaccgcgatatgttctactggggtaagaaatgttgtaacggtgtgcgatggaaacaaagcacacagaactttgaactccatttattttctggtactgccaagagaagacggctcgtactggatggaaagtggaagccgagaaagtgcgcccactttattttgcacgagcgcggcaaggtcaggccaatcgacgcgccacacattgaagacaggcaaatccataagatagaaaccaacaaggttttatccccactctatacgccgagcatgatttacgacaacggcgcaagccagaaaaacaaaggattgcactggcacttcaagcgtgtgaagaagcacctatcttggcactacagaagatacggcagggaaggagctgtattccttctcgatctaaaagggttcttcccaaacgcaaatcacgaacttatttatcagcgtcatagaaagtacattatgaatgaggatgtacgggcgctggcggatctcattgtggcgaattctccttgtaccagcccaggtagaggaatgccgcttggagtagaaccaagccaacaggagatggtttctcttccaagcgcaatcgacaactttattaagtgtcagctcggaattcactgcgccggccattatatggacgactactacattatcatgccggacattgaagagctgaagaaagttgccagactcattgtgcgccggtttgagtctgtgggaatccccgtgaataagagaaagtgtaaaatcatccctctcacaaaaccattcaagttttgtaaggcaagattcactctgactgagacaggaaagattaaagtgaatggatgcagggatggagtgaagcgggcgagaagaaaactcaaactcttccatcgtcaattccttgagggaaagaaaactctggaggaagttgatcagtacatgaactctcaaaccgcatactacagaacatttaatgatcacggaaggttactgcgtttgagacggatggactacgcaatctttaataagtataggcaggaacggcagttaaaattggctggttgacccgcctacactatatctaccgccgatggcggtaggaaattaacctaatttcatatcaaatttagaaacactcagagtttttctctgggtgttttctttttgtttggaggtcttatagtgagttatcaaaactatattgcaagcagacgcgcaaagtttgacggaatcaatggatatgtcaacatcccatatggcacaaaattacatggggatgatcgttttatctattattgtgaaaagccgctgtgtacattatcaagcaagaatgcacatgaacacttttctcaagacgatgatggaaacggcttgctgcgcgggaaccttgtgagatcgatcaaaaatactcttgagcgtagagatgcttcctatcagagcaggtgggataaggtctgggaggatcaactgtgccagaagtataaaagaaaagagcatgaagacttctggctttggaaccatgatttctacaacgcgggaatcgacgatttgaaatacatcgctaagcttgttggcgcaaaggagggacgctaatgtatcgtattattaaggtttcagacggaacagaaattggcgtaacggattctgctgaatttatccgttacggaaacagcgggtgttttgttcccgctgatgaggatcatgccattggggtggcttatgatggagtcgcctacaatcttatcgggcatgacgatatcgaggacgcagatacagttgttgtatcaaaatttgacggcggcggtgtggtagctgaacagcagcaccttgttgacgaactaattcttacagtattggggggataaccgtgaaagaaaagctaaagtctatgtacgaagccggcgtgattgacaccactggcctgctcaaagcggtcgatcatggttggattgcaatttccgatgttatagaaattgtaggcgaggaagatgctctgtccgtggttatggccgcaaagcttggagagatttctaagacatgcaatgcggtaattgtgaatggcgtagatattacgcttggagatgaggaagtacacttcaacctaagtattgaagatcagtcaaacatcaataacttgttccgtgttgttgagcttggcggaacagagttcccataccaatctgacggcggtgtgtgccgggtttattctgcaagcgagatcgttcaaatttatgtcgccgctcaaacactcattaccactcaaaccacatatcataatgaactaaagcagtatgttcagagccttgaaagcgcagaagctatttctgccgttcaatacggaatgaatttgcctgagccttatctcactgagatgaatgaaaagcttacggtggcacagcagcaaatgcaggccattgtagagaagatggctcaatacgcatctgaggaagcgtaatcaatatgattgtacgccatagcctaaaaactgcttttctttttgtagttggtggtttgatctatatactgattgagcttttatggcgtggtcacacacatatctcgatgttcgtccttggcggcatttgctttgtcgccatagggcttattaacgagatatttccttgggattttggatttctatggcagtccatgataggcgcagtggtcgttacagtccttgaatttattacaggtcttgtcgtgaatgtatggttaggtctgaatgtgtgggattactctgacatgccgctcaatatccttgggcaaatatgtctgccattttctattgcgtggattgcactgtctgccatagcaatcgttcttgacgattatttaagatactggctattcaaagaggaaaagccgcgctataaactgatctgaatctgtctgtaaaatagtaagtcttttgtcttagtgggagccgatttatgtcgtgctcccgctttttataaggaggtctctttatgggtgataaatacagtaagcctattttgaatatgcgctactacaacaaagaaatcgacgatgatctgccttatattggtcagctcaactacgatgaggaaaccgggctgatctacgatgaagagggagatgttgtagacgaagataccattgcaaagttttgcgagggggatggaagaggcgacgacgaggacgattaaccaggcgtttatcaggaggtaattttagatggcaaatgataaaacgatatgggagttcttgaagtcgaaaggtttgaatgattacggagcagcaggattgatgggcaatctgtatgcggagtcaggcttgcttccaacaaatcttcagaatacatataacaacaaatttggtatgacagatgacgagtataccgccgcagttgataacggcagttatggcaattttgtccacgacagtgccggatatggtttggcacaatggacattttggagtcgtaaagagggacttcttaattatgcaaaatcaactggcaagtccattggagatcttaccatgcagttggaatacttgcttcaggaactcactactggctataagagtgtcttatctacattgaagtctgcgacatctgtgttgcaggcttctaatgctgttttgcttcaatttgaacgccctgcggatcagagcacagccgtacaaacgaagcgggcttcttatggtcagaattattataaccaatttgcgggcgtagcccaggaaggagggagtgtcgggatgagcaatagtccacttgtagagtacacaagaatttcacccaaccagtcaggaaaaagaaaatacgcgattgatagaatttcaattcactgcgtagtaggccaatgtagcattgaaagcttgggtgcgatttttgcaccgtcttctaaaggcgcatcttctaactatggagttggatatgatggaagaattggcatgtatgtagaagagaaagaccgttcttggtgtacttcatcagcggcaaacgataacagagcagtgactattgaggtggcaagtgatacttcagacccatatgccgttacagaagctgcctatgctggtttgctgaatctggtaacagacatttgtaaacggaacggaaagaacacgctgatttggtttggcgataaaaacaccgctttgaattacacaccaaagtcgaatgagatggtgctgaccgtccaccgctggtttgcaaacaaagcctgccctggcaactacctatataataagcatcctcaaatcgtagaagaggtgaacagacggcttgctggcggcagcgtagatactggtacggctgtcagctatcaggtaagagtaacggcagatgctggactgaattgcagaacgtctcctatcaacggctcggttattacagcctatgaaaagggaactgttctgaatatctcaaaagaacagtctggctggggatatacaggaaccggctgggtgtctcttgcgtacacagagaaaattgcgaccacaactacagaaacggaggatgatgaagatatgactttagacacttttaagaagttgatgaatgagtatcgtgcagagctgcgcgacaacgactgcggagattggagcaaggccgctcgtgactgggcgacatctactggtttgtttgccggcagcgggaatctgccagatggcacccccaattatatgtgggcagacatgctgacccgtgagcaggcggcacaactgttttataacttcgctcagaaaaacggaatggcctaagtacaaggtggtgttagtatggcggtttcaagcaccagggggagaagggttagaagaaaagaaaagaaaggtttgttcgcccatttgaagaaccttgggtttacaaatcgccttgctctctatattatgctattcttggccgctggtcttgccggcggtttttatcttgcagtaaaaagcatttcaacaggatatacaggcgcactgatgtgctggactgtagtgtttactcccatcggcactgcttgcagtatcgttttgtcccgcattgtagataaaagtcgggcggaaaatacgagcgccgatggagaggggatcaagtatgcggcggcgaaagcaaatcggtttgtcgcaagcgcaaatacatctgatttaggaagcgtagatagtccttccatttaacatgggcaacagtattctgccggatgctgctgctctttatttttttataaggaggaagaggtatggaaatggattgggtaggattggtagtctctattctgtctggtcttgccgctgcaattccactggttgttcaactggtgaattatgtgcaaaaggcggtaaaagaaaagaactggaataagatgctcgaaatggtgatggatcttatggagactgccgaaggtatgtttgaaagcggcgctgacagaaaagaatgggttatcgccatggttaaaggctcagcagataccatcaactatgatatcgacattgaggctatcagcgcattgattgacagcctatgcgatatgagcaaggtcgtgaacaactctgtaactcccgaagagacacccgacgaataagggttgggtgatacagaatgcttgattatattgagtatttggatattccagttagagtagcgattgtacttatttcagcatttcttattatgcagttggtaggggagatcctggagtttaaggggaaggtcgttcctgagtttatcaaggttcgcaaggtatttgctcgccggaagaaagagcgcatgttgatgcagaaaatggaaaaaacgcttgaccaggtgcaggtcactatggatgagctgaataaacactacagcaccgacaacattaaaatgcgtgacgagtggatcaaaactgtaaactctaaacttgatcagtacgatgcaagtatggcagaactggatcgaaagcttgataaaaataatagcgacacgctttctatcttaattgacagtaagcgtaactctattatcagttttgcctcacttgtaatcgacgagtctaagcctgtgacaaaagagcaattcaacaggatcttcaaactgtacgaagagtatgagtcaattattaaggcaaacggtatgacgaatggcgaggttgatatcgcaattcggattatcagagaagcctatgaaagccacttgaggaaccagtctttcattgaagatatccgtggctacaatctgtaatgtatacgggggagcataaaaactccccctattttttacgggtagcatttgacagaggcattttcgtgatatataattcaaaaaggcatggccgcaatagggcggggaattagtcttttcaggtgttctatcttaccccagattttaccccatttgagtgacgcaagacgcaacaagacgaactcaaaatgcgataaagattactgatttttcgtctgaaaggcgggaatatcacatgatgaacaatgatggagtctatattagacagttccccacgatgaagcccctggaaaaaaatgatggtgcgaacacgaagagtgaaggggaaaatcaagctgttgtaactcgtaatgtgtccacaaatagcgcacgcattgatctttcaaaggtgaagattgaacctttgtttgaggagtttgtggattttgaaacttttgcaaaatccgattttcgtgtggtgaaaatcgaatcctgtgaagcggtcgaaaagtctaaaaagttactgaagttcacattaaatgacggaactgagcgcaaacggactattttaagtggcattcacacttattatactcctgaagaattggtgggtaaaacctgcgttgcaatcacgaatttgcccactagaatgatgatgggaattccgtctgagggaatgctgatctctgctgtgtacgagtatgacggacacgaagggttgaatttgctcatgttagatgatgcgattcctgccggtgctaaattgtactaaaatgacatgattttctgtgttgccacagtattaccatacttgccgaaaataccacacgggatgtgggggcgtgtgatgagagagctgactgattaggctggcgaaggcacccaagtgttatattgggggatgatcgcaaatgcggtctaataggggatgtttgccctaaaataatcaaacgatatagggagtcggcgttggtccggctcccttattttttgctggggaaggtataaaaattttggtatgctacgatttatctcataagatcagaagaaatatcagctctatgtataaaacaagggtgcagaaattgggatgggtaatatcaaaaatatatatactgacatagtttcaaataagaatggggcggccgtgttttgcggccgccccattcttatttgaaacttgaggtaccccagtgaaaagtgaataaatatctgactcacttggttggtttaaagtcgactcaggagaccattggatatgaacagttctactagtcagtcactgaggtcctattgtccgaacatgtcaataaagcgtttgacacagccagagtacatgacactgctgttccacatcatagtaggatatgattttgcggttatgccccggatcggcttcgagtaaagctcatgtgagccgattatattcacaagtgccggaggcaaaaaactaattccaaatccagactgtaccatctgaagagccatgggggtatcataacactggcagacgacattgggagagaaaccattgcgctgacactcattaataagataattgttgtagctccaaaggtcatcgctgcgcagcaggcacattgggacatctcggagacgctcgataggaatataatccagtccgggtgcaggatctaggctctctgtcaaaatgacttccagtgtttcttcaccgagtatgcgttcccatgagccggagatttcacttgtagtcccccggagaaatatcacgtgaagatcgccattgctcagatctttcaaaagatccccgggagttcccatgcggatgtagtactctacattggggtattccgcatgatatttctttagaaaatccaaggtgaaagaaatagtggaatagatcgatccaagtttcaagcagccccgcagcccctggtcaatgtcccgcacactgtcgatcatggtgtgtatgctttggaagatatgcttgctttggacatagaggctctgccctgcttcggtcagttctattcccttgtttgtacgcaggaaaaggcatactcccagctcgtcctctaaaagtgcgatttggcggctcacaggtggctgggccacatggagctcctgagcggccttcgagatactttttaaccttgccgcagtagtaaaatactccaattgcctgaagttcatagtggcataccttctttatataacaaatatacgaattaagtactttttattataacacttatctgttagaattcaatatatcaaggcgagaaaaaggattaaaaactagacatcttgctgacacatatttgaagaagaaaggagaaccattatgaccccagcacatcttgacatggacaagtgcatgaccattcacttggactatgaactgcctgaatatcccgcttttgaagagggctaccgccgtgccccccgccgtgaatcccatctgactgaggccgacaagatactggccattaagaacgccctgcgctatatccatcctgatcatcatgagcagatggcaaaggagtttgcccaggaactggaggaacacggtcgtatctatggataccgtttccggccagagggaaagctgtacggcaagcccatcgacgaatataaaggcaactgcatcgagggcaaagcgttccaggtgatgatcgacaacaacctggacttcgaggtggcgctgtacccctatgaactggtgacctacggcgagtccggacaggtgtgccagaactggatgcagtaccgtctgatcaagaagtacctggagatcatgacggacgagcagactttggttgtgatgtccggccatcctctgggcctgttccacagccataagctggctccccgctgtattatcagcaacggcctgatgatcggcatgtatgatgaccagaaaaacttcaaccgtgcggcagccatcggggttgccaactacggccagatgaccgccggaggctggatgtacatcggcccccagggcatcgtgcatggcacctttaacaccctgctgggtgcggggcgcaccaaattgggtatccccgaggacgggaacctggccggccgcctgttcgtgtccgccggtctgggcggtatgagcggtgcccagggcaaggctgcggagatcgcaggtgccgtttccatcattgctgaggtggacctgtcccggatcatgacccgttacaaccagggctgggtgagtgcgaagtccgacaacttggatgaggtcctgaaaatgactcagcagaagctggctgccaaggaaccctacgccatcgcctatcacggcaacgtggtggacctgttggagtacctgtatgagaagaatatccatgtggatctaatgagcgaccagacctcctgccacatggcgtacgacggcggatactgcccgcagggattgaccttcgaacagcgtactgagatgctggacaaggaccccgaaggcttcgccaagctggttgacaagtccctgaagcatcactatgagatgatctgcaaatttcacgagaagggaacctatttcttcgactatggcaatgcattcctgaagtcggtgtacgacgccggcgtgcctgccgagaagatttgcaagaacggcgagaatgacttggacggcttcgtattcccctcctatgtggaagatatcctcggccccttcctgtttgactatggctatggtcctttccgctggtgctgtctgtcccggaaggaagaagatctggataagaccgatatggctgccgccgagtacatcagggcacacaaccgccgctatcaggatcacgacaactacatatggctgcgtgatgcgaaaaagaacaagatggtagtaggcacgcaatgccggatactgtactccgacgccatgggccgtatgaacattgccctgaagttcaatgagatggtccgcaagggcgagatcgggcccgttatgctgggccgcgaccatcatgatactggtggtaccgactctcccttccgtgagacttccaatattaaggatggctccaatatcatggccgatatggccacccagtgctacgctggaaatgctgcccgcggcatgagtctgattgccctgcacaacggcggcggtgttggtgtgagcaagtccatcaacggcggctttggtatggtgctggacggctccgagcgggtagaccagattttaaagatgtctatgccttgggatgttatggtgggggttgcccgtcgtggctgggccggaaatcccaattcgctgtcaacaatcgctgaatacaataaactgtacgagggtcaggaccatatcaccctgccctacttggcagatgacagtattgtgcataaagcactggaagatatctgagatcaaacttaggaggtatcgaacgaaatgagattgacagagaaggaacaagccatgctgaatggcgaaatgggaccaggatttgcccgggcaatgcgggtcctggtagggatcgggaaagctttcggcgctgagcgtatggtaccgatcagccgggggcatatctctctaagcaaccaggagggtgacctctggtttgtttcgaagctgctggaggagcaggcacattgtatggtgcctcccacggtcaatcccgcctatgactatgagtattttaagacgatttcgaaattagatgaggaaaatgagcgcacactgaagagcacgatcgatgtttatcggaagcttggcgccatcctcacctttgactgcaccccgttttttgaaaacaatgtcccccgctttggagaaatctgttctttctccgcttctggcggcgcagtatatgtcaactcggtgctgggggcccggacaaatcgtgaggctgctcagagcgctatgtgtgcggccattaccggtgtcacacccgaatacggactgctgctggagcagaatcgggcaggcgatgtccttattcaggtagaggccgatgtggacagtgaatacgattatgagctgctgggttatattacgcctaaaaagatgggccaggcataccactgccctgtgttcaatggtttgtccaagcagaccacgtcggaacaactgatggacctgggtactcagttgaatatccatgggatcgtccccatgttccatgtggtaggcgtaacaccggaggcggcagatgtccacactgcctttttagggcggaaagatccccctgtggtcaccatcacgaatgaagacttggctcaggccagagcggagatctctgccggcactggaaaagcggacttctgtatcttgggctgcccccatttgaccatcaaccaggtgggttccatcgcgaagatgctggatggtcagcagctggcaggtcagctgtatatcttcacctctacctccaccaaggagctggcgcagcggatgggctacctggatatcatacataaagctggtggagaaatcgttatcaacagttgtgtggatcagccatgctggtcgcatctgtatgggatgagcggcgtgacggaatcgcctaaatgtgcctactatactaagcgctggaacatgacatttactgtcaagagtattcccgcctgtatccaatctgtgctgaagggggagatcgtatcatgaaggatgagagactgctgaagggtgagccgattgccagcggcattgttgaaggcgagatcctggtgtcaaaagatccgatcaatttctatatggtaagcccggagaaaggtaccatcattgaacaggatcatgcactgacagacaaagtgattgcaaagaaaatcatcgtgtttcctattgataagggcagctctgtggtgcagatggacggcctgtatcagatgtccaagtttgacaacaaacctgcgggattcattgtgctggatctaagtactgttctggtgtctaatgcgattattatggatatcccgctgatccgggtggatcagcagacctatgacaaattctgcgaggggcagagagtgaaaatggacggagactctggcgaaataacgatcctggcgtaaaaaacgcactgaaaaaaggagagaatcgctatgacacccaatcaaatcacaatgctgataatcctgatcgcctatatggcggtcgtgcttgctgtgggtctttatgcatcccgcagggtaaaaggctctgaagacttccttttggctggccggtccatgggcctgtttgtcctggtgggtactctgtgtgctacccagctgggcggcggcaacatcatcggaacctctacaaatggctataatcagggattgtccggcatgacattcggcgtttctaccggcctcgccatgctggtgctgggtctgctgatggcaaagcccatgcgtaaaatgggactgtgtacgatcagcgacttcgtttataaccgctaccagtccaacactgcgcgtgtcctcacgagtgtattctcctttgcggctctggtcgggatccttgccgcccaggtcggtgccatctccaaggtgctgactgtatttggaatcaacactacagtagcagctgtgatcgctatctgtgtgatcattctttatacagccttttccggcatgtggggagtggccctcaccgacgtgatccagcttatcgtcatcttcatcggggtccccctgactacgtttattggcctgattaaaattggtggttggagcggactggttgaaaaactgtccaccatgaacgttccgggcggcattgatacttacatgagtcccaccggcatcggtcttgcagcaatggcgtccatcgcgctgccgatgatcgcctatgaaatcatcggtcaggatttctaccagagactgctctctgcaaagaatgaacgaatcgcaaagaccggctgtatcattgccggctgtattctgatggcaatgggcgtcaacagcgctatagacggtatgctggcccgtgccttcctgggcgataccctgactgaggtaagcgccatcgcctctctggctgtggaggtgctgcccaccgtggctgccggcattgtgatcgctgctctgtgtgctgccgtcatgtccactgctgactctctgctgctggcttgcacttcccatgtagtcaacgacatctacctgggtgctatgggtaagtctgccagcgatgaaaagagttccaagacgattctgcggatgtctgtggtgactaccgtagtggtcggtatcgcatcccttttcgtggccttggccatccctggcatcattgagatcctggactatgcttatactttctatgccagcggtctggtcgcccctgttctcttaggcctgttctggaaaaagggcaacgctttggcagcagtttcttccatcgttgtaggtggcgttgtctcactgctgtgcgtatttggtattcttcccatcccggtggatgctattatcgttggtatgagtgcctcctttattgattacgttgtggtcgctctggtaactggaaagaaagagggctgaatccaactgtatcaaagcgtcatcaaataggcgttaccatccattttgctagggaggaggcgcatgtgcgtctcctccctcttgagaaaggatcgaactatcatatggaacgagtgctgctcttcaacatcggcgttcttgccactccgctgggatacggacccaaaggcggggcagctcagggcgccatccaaatccaaagagatgcgtgggtgctgctagaaggcgaacggatttttcaggttgggactggcacccctcccgacatagatgctgaacggatagatgcagagggaggactggtcacgccgggccttgtggacgcacatacccacctgatttttggcggttggagacagaatgagcttggtatgaaactccatggtgtcccctatctcgatatccttgcccaaggcggcggtatcctttctaccgtcaaaagcacacggtcggccagcgaagaggagctgacagagaaggcgtccctggcgttaagtgagatgctgtccttcggcaccaccacctgtgaggccaagagcggatatggccttacgaccgatgaggagctaaaacagcttcgcgcgatccaaaagttacaggaggggcatgccgtggacgtagtggccacctttatgggggcccatgcactgccttctgagtataaaggaaaccgggacgcatatatccgtcttttgtgcgaagaaatgatcccagcagttgcggaacagaaaatcgctaagttctgtgatgtgttctgcgaaacaggcgtatttaatgcacaagagagccgaaagattttggaaacgggccgcaaatatggcctgactcccaaaatacatgcagatgaaatcgatccgattggtggatctgtcttggccggagagctgggtgcggtctctgcggaacatttaattgtctgtccgcctgaaggaatctccagtatggcaaaagggggcacagtagcctgccttctgccggctactagcttttacctgggggccggttttgcgcctgcacgttcgatggtggaagctggagtgccggttgccatggcatcagatttcaatcctggctcttgcccatgcttgaatatgcagtttgttattggactgggatgcctgaagtacaagcttacgccggaagaagtgctaacagctgtcacgcttaatggtgctgccgcaattgggatggctgaccaaatcggctctgtggaagtcggaaaactgggcgaccttgtggtttgggacgcaccggatttggactacatctgctaccgcattggaagcaatttggtcaaaaaagttatcaaaagaggccgaatggtaccgtagagccatgaacagatactacagcgccaatcggaggctcaaagcccgtttgctgttgtgcagacagccaaatggaagtactcaaacagctagactgcgattttaactaacagaggaagttttgctaaaaaatatgggctttcacttaaaatggacaacataagttctgtacgaaaaaaacggtatatattacagatatagagttccaaatatcctatttttatatatcaactttccgtgttgttgattttttgatctacaaaattgagcaatatttgctttattacattacacaaaagccgtccggcgttcaaatcgggcggcttttttgcatggataggcgggaaggaggtggagaaatcattacagaaattcatcccgtaaaattgcgcaactttcacgaaaaggaggttggtgaatagccgatgaaaaattgaacaaaggccccggggagggtgaaccagctaagcgcggcaaatgtacccgaagtgccgccctccatctcggaatacactgtccagccagcgggcagcaacagcagaacatgcccccgccccagcaggagacttcggttccctgctttttatttctccccctctgcaccggaaattcataccggcgtgcctgatgagcggggatttgtggaagcgatttttcaaggctgtgcgttcctgccacaagagccgacgatatttgagatggaacgctaggcagaatatctctgtgaattgctatcctgttaccagcaagtcttttgcccctttctcagagacaaaaaagcggcctgcccctccagggcggaggcacgctgggggcatcgtgcgctgcatataaaggggacgaatacaatgacgcatcgggaagccctgtccgcagctcattctccttgccgatgtttttcgccttttctataagtgattctctcacataaaagccgctccgttgggcatggataaagcagacattcactgcagaggatcaaaggaggcttttatgggatctatctggtctcagacctgctctattgggcgcaggccgcccctccgggggcatttgaaaactcaggccgcagtggtaggggcggggatggccggggtgctgacggcctatgccctccagcaggccgggctttcagtcgttgtcctggaggccggccggatcgccggcgggcagacccaaaacaccacggccaagatcacctcccagcacggcctgatctatagcaggctgatccagtcctttggggaggagaccgccaggcggtatgccaaagctaaccaggatgcggtccgggcctatcaggacctgatcgacgtccaaggcatttcctgcgactgggaggagcgatgtgcctatctctacggccctgacgtcactgtcttacaggaggaggcggaggccgcccggcgcctgggcctgccggcctcgttcaccagggaggtctctatccccatcccccacgatggggcggtccgctttgaagggcaggcacagttccacccactgaaattcctgaaagtgctggcggaccagctgaccatctacgagcagagccgggtcctcaccgcggagggtgacctcctgaccacagagctgggctcggtccaggcggagcacatcgttttcgcctgccattttccctttgtcaactttccggggatgtatttcgcccggatgcaccaggagcgctcctatgtgctggccctgcagggcgctccgcctgtggacggcatgtttctgggagtgggacgggacaccttctctctccgcacctatggggaattgctcctgctgggcggcggaggccatcgcaccggcgagaacaccgaggggggccagtatgacctgctccggcggaaggcccgggagtggttcccccagagccaggagaccgcccactggtctgcccaggactgcatgccccctgaccatgtgccctatatcggcccctactcctccggccatcccggctggtatgtggccactgggttccagaagtggggtatgacctcctccatggcggccgccaccctcctgtgtgatatgatccagggcagggacaacccctatgccggccttttctctcccagccgtctggaccccgcggcgctgcccggcatcctgacggagggcgggcaggccgtcaagagtatggtcaagcgattcttccagatcccagcagaggcggccaaagatatcccggccggacacggcgggatcgtgttcctcaacgggaaaaaggccggggtctaccgggacgagtcgggggcgctccaccccgtggacatccgctgcccccacctgggctgccagctggagtgggacccggacgagaagacctgggactgcccctgccacggctcccggttcgactgcctgggccggctcatctccgggcccgcgcagacagacctggactccagtctccggaccggccggcggtctttaccgccatcagtcgagcggtctccataatgatcgatctggttcggaagggcttgtccctccgctttaccaaccaggccgcagcgctggtgtgcggatcttcggcggatgtccgcccgatgtctcttctcttcacggcctggggccagcggcgcgccccctccacccccgcggcggggggggaggtgggggcgctggtccggctggtctgaaaaaacttttgtgagtctggattttccccttgcattgcacgccaagttgtggtatattatacaggatgaaacccatgcaggtgtagttcaatggcagaatgtcagcttcccaagctgaacacgggggttcgattcccctcacctgctccaagtcggagcaaacgtctatcgtttgctccgacttattttataagtcagagcgcactcattttgctgctcatcctttacaaatcgaatccgctgtgctgagcttgcagttggggccgccctgcgggcgatgtttttgactgcaaaatttggcggaccgcttgcccggactggaggagtagagtataatagatgcgggcccggtcgaagacacaggatggttccaaagatctgtaaaatgagttgacgaggcgggcaggatatggtataatttaaacagtaattattctcattaagaaactaaaggaggaaatcatcatgcctgaactgaagggaagcaagacagaacagaacctgtggacagcctttgctggggagtcccaggcccgcaacaagtacacctattttgcctccaaagcgaagaaggacggttttgtccagatctccaagatctttgaggagaccgccgccaatgagaaggagcatgctgagatctggttcaagctgctgggcgggatcggttccactgcggagaacctggccgccgctgctgagggcgagaactacgagtggaccgatatgtacgccaccatggccaaggaggccgaggaggagggctttgaccacatcgcattcctgttctccgaagttgccaagatcgagaaggagcatgaggagcgttaccgcaagctgctggccaacgtggaggggggcctggtgttctccagagacggcgatatgatctggcagtgttccaactgcggccatatccatgtgggcaagcaggcgccggaggtctgccccgtctgcgctcatccccgggactacttccagctgaaggcggagaactattgatctgctgatccatacatatctctaaaaggacgcgcctcgcattgaggcgcgtcctttctgcgtctggtcagttctcctccggaccggccgggggctccagcccgattttgcggtagtagtcattgaataggatcttctccgaatagctgcggatataccgggcctcccagtaggtgtcctgggcgtagttttccggcacctgcgccccctcatttggggtgaaggtgtccgtgtccgcattgtaacgccccagttcggtgagatagctgtaatcgttaaagatgactagcccaggggcgtcggagaggatatcccggccggccagcaggcgggagtcatattccaggccgaacagattggacagggtggggatgatgtccacgctgtaacagggcttgtctactaccacaggctcctccatgtcaccggaccagaggatcagcgtggagcggtacttctcaaagggatcggcctccgtcccttcccccgccagctcgtcgatggcgccggtgccgtccaggccataggggtagtggtccccggagaggacgatcacggtgttctccagctcgccggcctcctccagcgtcttgatggtgtactccagagcctggtccaactccatgttgcaggccagataggcccgggcggcctcgctcatgtccagatccgccacctcatcccggtgcttggcggacatggcgttgcccgcgaagctgtaattcatgtggccgctcaccgtcatatagtagttgtggaagggcttctctccggccagagcctgggggagggtcagctgcatcatctccagatcggactggggccaggtcatggccacatccagcccggtgtcacaggcgtagaaatcatagcccaggttggggtgggagaggttgcggtcatagtagttggctgtattgttgtggtaggccagggtgggatagcccagggcccggagctggttgcccatggagaagtacatggagaccccgttttttcctgcataccgctgggaggcattgacctggttggtggggatcaggccggtggtggcggcatactccccatccaccgtggagtaataccacagggggttgtagaagttctcaaacacaaagccggagtgggccagcttgtataaggtgggggtgtactgctcgttcactgcgccgatccagaaagcctcgccggtgaaaaggagcagattcttgccctggaacataccggtgtactgatttttctccgtgggcgtccggtcccggaaatactcgtgcatgtccttcagggtgctgtccgtctcgttggcgatcagggcgtcgaagtcgatgtccatgacattgggaccggaggcggcgggggtctccccttcctccggctcctccggctggacagagacattccccggggccagcgtggagaccgagccctcacccgggtcggggcggctgggttcctccaggccaaagagggtctgctcgatatccagccgcagggtggtggccaggccgaagtgggagaccgtcaggtctgggacaaaggtctctcgatagatctggcgggtcgtcatgatcccgccggtgggcagggcgatcgccagcactgctgcggcctgcacgatgatcacgccgccgatcactcccagcagcacccggccgtccgggcggttcaggagggcgaaccgtggctggaagaagtacaccaccagagggacggccagcaggagcagggcgggcagggcctcccagatgcccagcagggtctccttccagtagctgcccagggcctgacctgccatgttgaaggacttggtgaccagcacggtggcaaagatcgtgtggtacaccgactggatcatgtaccacagggtcagcacgccaagcacggcgaagccggccttgcggttccccttcttgccccagagagaggtcaaaagggcacacatcccggccagcggcagggagaaaagcaggatatagaccagccccacatcaaaaaagggccggacatagaaagcccggtagatcccctccagccagaggatagagcccaggaaaaacaggagcggttttacgatgtcccagggagtttctctccgatacatgatatcaaatcctcgctgctctgcccgacccggggcagatgcttgatctcagtgtgcgcggaccccaggcggcccgcagtgcttacctctttatcatacctcctgccgggacttctgtccagagggttctccctttttctctgccctgtttcccggggaatagggatgacggccgagtccctctgtgatataatagggaaacaacagggaaacgggtttgcttgttcccaaaacggacatactgaccactgtatcgacagaaggggaggaccaccatgacctttgaggaactttaccgcactatgctgaagcaggctgttgagaagggctccgtccaggcagatgatctggaggccagtgccgggcatctggactgcctgctccaccctcaggaccaccccttggtctggccgctcaacccctgcacctgtcccaaagaggagacacactgcgccgccgcctgcctgtttgacgccatcgtgcgcagggacgacggtacgcttgccgtggacccggaccgctgctccggatgcggcgcctgtatccaggcctgccagtctggaaacctgactgccagccgggacgtgctgcctgccctggacgcagtcaagcatgccaaagggcccgtctacgccctgatcgcccctgccttcctgggccaattctccactgtggtgacgccgggccggctgcgctcggctttcaagctgctgggcttcaccgggatggtggaggtggccctcttcgcggacctgctgacgttgaaggaggcgctggagtttgaccggaacattcacacagagacggatttccagctcacaagctgctgctgccccatgtggatcggcatgatccgaaagctgtatcatgagctgatgccacacgttcccggggcggtatcccctatgatcgccgccggccggacggtaaaaaagctgcacccagatgcggtcaccatctttgtggggccctgcattgccaaaaaggcggaggcccgggaggcagacctggccggcgcggtggactatgtgcttaccttccaggagatgcaggatattttccaggcggcggatatccacccggagctgctggaggagagcgagcgggaccactcctcccgagcggggcggatctacgcccgtaccggcggagtcagcgaggcggttcggaccacggtggcccgtctgcacccggagcggcccatccaggtccggacccggcaggcagacggcgtgccggcgtgcagggcgatgatcgaggacatccgctccggccagcaccaggcgaatttctttgaagggatgggctgtaccggcggctgcgtaggcgggccgaaggtcctgctggaccgggagaccggacgggagaatgtagaccgttacggagacgaggcggagttcagcactccgctggacaacccctatgtcctcaagctgctccgcctgctgggctttgatacggtggaggaatttttggagcagagcgatattttcatccggcatttttaaaggaagcacagagcgcaagggcagggctgtgatcttccggctgtccccggcaaaagtccgtcccggctcctagagccggaaaaggggggagagcaaaaaggagcggaagcaaaagaggaaagacatctgcacaagcagatgtctttctttttgtgaagggcggttaagactgatatttctgtcagaaacgaaaaatgccgcccgcagggcggcccaccaactgcgagcccagcacagcgggtcgcagttggaaaggaggagcagcggcgtgagcgcgctctgacttataaaataagtcggagcaagcgatacaaagcttgctccgacgtggtgcgcgaggcgggacttgaacccgcacgtgcgtaatgcacactagaacctgaatctagcgagtctgccaattccaccactcgcgcatgggggactgcgctcttcagcgcaagtggtatcataccatataagggcctgcctgtcaacacttttttggccctccctggatcttttgtttgtccccgcccgcgagagcggggacaaacggagggctttccgctgggagccggagaaaagagggacttttgagcgagcagagggatcggcccgcccgggccaaggagaggccgggattcaggtggatggggtggagcctgccaggcggttctccgggtagcggcgcagatcgatgtggctgatgacaaagagctcatagaggcgggccagaatatcccaggtctctcggtccagctcaccagtctggggcagcatagccttctcctggagccactgggtattccggaccgaagcagcatcgtggatgccgtcgatggactccggctccagcccatccaggacatgggagaggctctgaaacatggcctgtaccgggagaaggtagttgtgggaggaaccggcctgaactttagcactgggaggaaaagcacgtatctgtctgggatcggcaagctctcgctccagatccagccactcgtccagaatggcctgccaggtctcacggtccaccacgccggtgacaggggggtggagctcccgctggaagagcatcaccgcctccagggtacgctccccgaacacaccgtccgggaccagagcgggcagaaagtcatagcgcagagacaggcggttcagcatatactgaagactccgtatgggctgggccaccatctcgcgttccagctgctgtaaggtcatgacaaggacacctcctgttgatccgactgccccaaacgcagatcggtgccgggatgctgcccgaagcggggcgtctcactgtgtccgctgaccgccgccagggtcaggtccaccagcgaggggatgagctcggaggcctgaaaggggaagcgagccacatcctgttggagcacggcttccaggctggcgaactcacggtacagggcgtcccaggtggcttcccccactacgccgtcggggaggaggtcagtctgccgctgaaaggactggaccgcattggcggtggaggggccgaatacgccgtccaccgtcagcggggggatgacctcatcaaattcagccagtacggccagcatgtactggaggacctgaacctcggtgccggtgtccccctctcggaggacgccagggtactggaactggaccttatagaaggtctgcccttcgctgaccagctcagagagccgggtgacgcccacatagaggtagaccagcttataccaggtggcctttcccaccacgccgtctgacgccaggttgaagatgcgctggaactgccgcacggagtattcggtgtcttccccgaagatgccggtgacgggcttgatcttggggatggcggggtagttctgggagatgcggttcaggctggtctggaccacggccacctcctcccccacagagcccagccgcagggggctgccgggataggactgggtgatgtcctggatgggggcgttgaccaccagctcgatgtcgtccccgtaatagtggcggaggatctccatggagttgtagcccgtctgggccatctcctggctgccccactgggagagcccgtcacaggtggaggtggtcccgttgcagaacttggcggagaggggctccacaaagccctgacggcggatgtagtcgttgaagatctcgtccaccactgcgctgatgctctggaagaagctccttccccgaatgaacttctggtcataggcggtggtgttggtgatttggaagttgtagccccggctggggtagaactcggtatagacccggttcagggcaaaggaaatgatagccagcacattggcccggatcgtggagagctcccaggtgggatagatctcactggaggctacgtttttgacgtagtcggggaaagagaccgtcacattttctgcccactggtcgggcaggcccagatgcaccgtgatggtgctggggatgtaaggaaggacgatgaccggcatagggacacctcacagattctgaggggaggtgttcaggatggagctgtcaacaagactgtgctgcccctcggccaaggggatgagctccatgtcctggtcggtctcttcgccggagaagatctggacgccgtccacccgcagggcggtgtagcctgggtgttccgcccagacctggcagacggagaaggggaccatgtcctgggtgggaccggtgctctcccagcgggggggcgcagggatggtgaggggctggacccggccctcacggtcggtgatctggacagacaacaggtgatatttcccggtcgggctgatctgggtcaccacaacagtggcgtcctcgatggggagctgcgcccgggaggtatagactctgatctgcagagtcccaaactcttcctccatatggagcctccttccggcgtgatggtgcgccgtttactggaccatcctatgccgggaccgcggagcgggttcccctgtggaaaaaagatgcccgccggggcaaaaacgctcccggtcgggcatcttttttccacagaaaccgcatctgcggtgggtttccctttttttctacacagacataccatataatgtggatagatttttaaaaaaggagaaatgggcacaatatgatggaacttaagatcgcgtcaagatccttgacggacgaggcggggaaactgcgccgcctccactattttctgctggtggacgagctggaggcggggagcttcttctgcgaacagtacggagtgaagatcgcggaagaggacggagactgcgcgcagatccggggcatcaccaccagcgcggtgcgcatagacgaactgatgaccacactggtggagcagcaggtcagccctacggtgctggaggatgtggtgcaggactggctgtgacagagacacagatcagcatatcccacgcctccctctcagagaaacgctgttattttttctttcccctgtggtcgatgcgctgcatcagcgccaccagcagagcgatggcgcccaggaccacaaagatgcccagcattccctgccccatcatttccaaagcatgcgtaatattttccatgttcgaatgtcctcctttttactccatcacaggatgggattgttggcaaaatactgaagcaccacaccgccggccaccacagaggcgatctggccggagacgttagccgccaccgcgtgcatcagcaggtggttctgggagtcggcctcctgacccagcttctcgatgacccgggaagacatggggaaggcagagatgccggccgcacctaccatggggttgatcttgttcttgggggtgaagatattgagtaccttgacgaagagcacgcccaccatggagtccagcacaaaggccaccaggcccagacccatgatcatgatggtctccttctggacgaactgatccgctttcatagagaaggcgatggtgatgcccagcagcagggtgatcaggttggccagctcattctgggcggtctgggagagggaggtgagcacgccgcactcccggatcaggttgccgaacatgaggaagcctaccagcgccacggaggagggagccaccaggccggcgatgacggagaccacgatggggaagaggatgcgcaggcgcttggatacgccctgggcccggtagggcatgcgcatggcccgctccttcttagtggtgaccagcttgatggcaaagggctggatgataggtaccagagccatataggagtaggcagccactgcgatggcccccacatagcgggagtcgaggatctgggagaccaggatagaggtggggccgtctgcggcgccgatgatgccgatggaggcggcgtccttcaggtcaaagcccagggccgcagccaggaggatggtgaggaaaataccggcctgggcggcggcgccgcacaggaacagcttggggttggccagcaggggaccgaagtcgatcatagcgccgatgccgatgaagagcaggatggggaaggcctcgctggcctcgatgccaacctcaaagagccactggatgatgccgtgggtctcacccacgccctcgctgaactgattgatgacgccggacaggggcaggttgaccaggatggcgccgaagcccatgggcagcagcagggcgggctcaaaccccttctcgatggccagccagatcaaaaggccgcccacgacgtacatcagcagctgctgccatgtgatagacagaagcccctcccaaagaaattccatgctttcttcctccatttctttatagtatgtgtaccctttcggagaaaaatcggcccgcgcccggcagacagcccgcaaaaaaagacctgcgttcccattggaacgcaggtctggtcatttcaggaaaaaccagaatggaacaagctccatccatgcttgttggcctttccgcgcgggaaccgcgccgactactcccctttgtatttacggattttatcatcttcccctggggctgtcaagagaaatctccgcttttttcaccatgcagaaacggcgggccattcaccccagggagcgggtccggaggtgccccaggccgcggccgggcaggggcagcctgacggtgaagagggtgccggagatggcggagctggagacggagatccggccctgatggccgtctacgatgctcttggcgatggacagccccagaccgtagcccccctggctcctggcccggtcgctgtcagtgcggtagaagcgctcgaacaggcggggcagatgctccggagggatggcctcgccggtgttgtggacggagaggactgcctcgtctccctgggggcggaggatcagtgaggccgagccgcggggcccggcatacttgaccgcgttgtccaccagaatggccaccaggcggcgcagctgctccggatcgcccaggagctccagatcaggcgtgatctggctgtccagggccacgccggcctcaaaggccaccgactcaaaggggagcagggcctcccaggccaggtcgctgaaggacaccgtctggagacggaggggagagcgccggtcatcagagcgggccaggaagagcaggtcctccaccagtgacttcatccgctgagcctctgcctggatgtactccacccacttgcgctgtccatcagccatgtctccggagtgggccaggaggatgccggcgttggccaggatgacagtgaggggggtcttcaactcgtgggaggcgtcggctacgaactgcttctgctgctgccaggaccgctcggcggggcgtaaggccagggtggagaggagcagggagatgacgaagaaacaggccagccccagcagccccaccagcaggcacgtccgcagcagggccagaagattttcccgctcccaggtccggtcggcaaaggccaagcggaccgcgcctccctccgcatcctcccggagatagcggagggaggagacggtgccatcccggcggccgtcctccagagcggcctgggcggcctgttgggccacttccagagagacatccacttggtctccgtcgttgatagcggtgaccacgccgtcctccactgtgacggtgaacaccgggagcagggagcgctgagcgccctggccgctggaggggcggcgggacccatccaggggaaaagcgatctccggccggaggggactgccttcctctccccacatcagggcggcacgcatggccagcaggctctggtccttcaggcgttgagcactgcttgccataaagaccccaaagaccataaggaggaccagggacaccagcagcatgttcaccagaatgaatttgcgccgcagggtacggatcatggcatgccccctccgccaaagctgccgggctcatccgaggtagtgaggaaatagcccaccttacgcacggtgccgatggagacctgggaggccaggaaggacagcttcttccgcaggaaggagatgtacacttccacattgttgtcctccgcctccgagtccagcccccacaccttggcaatgatgtcgtccttgggggtgaccagcttggcgttctggagaagcagacgcaacacctcgaactccttgaagcccagccgcaccgacttgtctccccggcgcaggcagtgggaggagaggtggagggacaggtctccgaaggccagctcctcggacaccacctccccctggcggcgggtgagggcccggacccgggccagcagctcggaggtgtcaaagggcttggtcatgtagtcgtccgccccgcagtccaggcccttcactttgtcggagatctcgtcacgggcggtgagcatgaggatgggagtggacacgtgggcggagcggaggcggcgggccacctccagcccgtccagcttgggcagcatcacatccaggacgatgacatcgtactgggcggtgagcgcataatccaggccgtcggcaccgttgtggacctggtccacctgatatttctgctctgccataatctgggccagggcctccgccagccggacctcgtcctccacgatcaggatacgcataatgggcctcctttcccaattgggctctgttttttctcactataccacaaaaaactgaaaatgccctgaaaaattcagagtaatttcagcttctcctgttatactggccccagaagagcatcaagggacaggggggatactcgtgcgttatcgcgtggtgaccaccgtggccgcgttgctgctgtgtctgggcctgatcgcctgctttgtcccgggaagcgtcccggcggcaacatctggggagggagacagcagggcggccctgacagcggaggaccggtgatgcctcctgtaaaagggaccggcgcggagccacaggctccgcgccggtcccttttggcggtggagagagggggaaggccctcaggcggggaaagcgccccggcgggtcagctggcgggagagggagagcagcaccgggatcagcaggatctgggccgccaccatgcagatagtctcggtgaagcgggcgggaagcatgccgaacaggcctttgccgtacatgatgtagagccagacgctgttgagcacgagccgggtcaggctggcgcacagggaggcgcccaccacccgcagccagagagcgcgtccatggaagccctcccccttctggtggaggaacaggccgtagatcagtcccaccagtccggcggtgacagtgaagccggggaagaaggcgccgaaggggaagagggtggcgccgatcaagtcgcttaccgcgcccacggccagagcccacagggggccgaaaaggatgccggacagggcgacggccaggaaggagaagttgaccaccacgaaggtggtgttgatggagaggaaccgggccaggatgacctggagggccaccagaagggcgcaggtgaccatgatcttggtgtttttctgagctttcatttatctcttcctttcacgggctgagagagcctctcagcggtttcctcttcagttgccgtaaaaggataccctgatacgacagcggaagcggagcaccaccgcaagacagctgccttttcgtccggcggccacttcccatccgccggcacttgacgcggtactcctattctgtgtatggtcgctgggaaaacgggggaggggtcagcacagccccagatggtggcggatctcccctacggagtagagggagccccaggcgcagatcacgtcctccgggccggccagggccagggcggtgtccaccccctggtccagggtctcctggacagagaccgggatggagaactgggccagccaggccgccagctcggcggcggggagggcccgggggctgtccggtgtcaccgccacaaaggcctttgccagggggaggacacggcggaacatggaatgccagtccttatcggccaggacaccggagaggaaaatgagcttccggccggggtagaggctctccagggcggcggcaagggcgtccacgcactgggggttgtggccgccgtccacgatgaagtcgggggagcggcgggccagctccaggcggccgggccactgggccgcggccagtccccgggctgccgcctcctccgggatggtccagccggcatcccggagtgcctgcaccacctccagggcggtgatggcgttggagagctggtagctgcccagcagggagaggcggtaggggccccggccccggtagcggaagtcctgaccctccagaccggaggagaggacctccagctcctgggggtcggtctgacggagggggatgtccagctggcggcagacggactggatcacctgggtgacctcatcgctctggcggtagaggacggcccggcagcccggcttgaggatgccggacttctcccgggcgatgagagtgagggtgccgcccagctcctgggtgtgctccaggccgatgttggtgatgaccgccgcctccggggcggggatcacgttggtggagtccaggcggccgcccagacctacctccagcaccacgatgtcacactgctcctccaaaaagaactccatgcccaccgcggtcatcagctcgaactcggtggggggatcggacatcccctccgccacctccagcacctgctgggtgaggcggcccaggacttcatccgggatgggtgccccgttgacctgcatccgctcgtggaagcggtaaaggtggggagaggtgaacaggccagcgcgcagcccagcctgagccaggatggaggctgtcatggccgcggtggaccccttgccattggtcccggtgatgtggacgaagcgcaggcggcgctcaggattgcccaggctggccagcagtgcctgggtacgctccaggcccggcttccggccggtccaggcccgctgatggatcagttcaatggcttcctgtcctgtcatgaaggagtccctccctgctttaagtgacaataccaaaggagcaaggccagcccggcaccccccaggatgttgcccagggtgacggggaccaggttggaggcggccccggtcagggtgagaggggccagatcgacgcccgcggctgctgccagcgaggcgtactgggggacagcggcggccattagggccgcgccgatgtaatagaggttggcaacggagtgctcaaagccgcacaagacgaaaaagcagaccggaagaaaggcgcccatcaggcggcccggtgtctcccgggcggaggcggcggccagcacccccagacagaccagcaggttgcacagcacgcccaggcccaaggcgctgccgaagggaagggcgcatttcgcggccccgacccggatggtgtatacggccagggccccggcggagtagtccagctggccgcaggagacacacagccaggccaccagcagcgagcccagggcgttcccggcaaagaccagcgcccagttgcgcaccatcaggaccgccgatcccccctttttctccaacagagtgagggggagcatgcagtttccggtgaacagctccgcaccggtgacgacgaccagccccagaccgaaggggaagagcaggccgcagacggtccggacggtccaggtgtctgagatgccgtagaccgccgtgttggtggcggccgcggcgatggcgatgatggccccggccagcgctcccagcaggagcaggctggcggcggagcgctccattttcctgacgcccgccgcactgtacgaggcgagcaattctgcgggggagaggtagttgttcatgatctcctttgttccagagaccggcaggccgcctgggccacatgcagggccagcacggtggaggtcaccgcgcccacgcctccggggaccggcgtgatggcagccacgatgggctccacctcgtcaaaggccacgtccccatgcatggcgccgtccgggccgatgttgacgcccacatctaccaccacctggcccgggcgcacatagtcggcccggatcaggtccaggcagccggcggcggagatgatgatgtcggcgtcctggcagaagctgcgggtgtcctccttgtctgtgaagatgtgacagacggagacggtggcctcctccttcatcagcagcagggcggtgggcaggcccacggtggcgcttttgccgatcatagcgatcttcttgcctttcaaggggatatcatagtagtggagcagttccaggcaggcggtggcggtgcaggggggaaagccgatgtcactcttggtgagcaggccgcccatggaggcggtggtgatggcgtcgatgtctttctccggggccaggacgctggtcaccgcctcggtgtccagatggggcggcagggggcggaatagcaggcagccgtggatggagctgtcctcgttcactgtccgcagggtctggatcagctcctgctgtgaggcgtccgcgggcagcaggaagagccggacggcgatgttcaggctttccgcccggcggatagccccccgctcataagcgatgtcctcctcccggcgtcccacccggacgatgcccagggtgggagtgacgccgcggcgggagagcttctcacagcggagccggatgtcccggcacatgtgttccgccaccggttttccgctgagcaaaactgccatgggtctcctccttttggtgattcgggcagggggaggcggcgtgcgcctccccctgcatgtggtcatatgctcagaacaggccggtgatcctgccgttctcgtctacgtcgatcttctcggcagaggggactttgggcaggccgggcatggctccccaccgaattttgattcggtgggggccctgtttttttagatcctcgggcgaaataaattcgccctgcggaaatcctccgctgtgcttcggatttacgccgcacgagcggcggggtgctgccgcacccgaatgcccatgcccggctcagaacaggccggtgatcttgccgttctcgtctacgtcgatcttctcggcagaggggactttgggcaggccgggcatggtcatgatatcgccggtgagagccacgatgaagccggcgccggcggagaccttcagattgcgcaccgtgacctcgaagccgctgggcgcgcccagcagggtctggtcgtcggagaaggagtactgggtcttggccatgcagatgggcaggtcgccgaagcccaggtcggtgagctgctgggcctgcttcttggcgttggcggtgagcaccacccgctcgccgtgatacaccttcttcacaatggtgtccagcttctcctggatggaggcctgggtatcatacacgaactggaagtggctgggctgctcgcacaggcggatgacctcctcggccagagccttgccgccctcgccgcccttggcccacacctcggacagggccacattgacgcccagctcattgcacttcctctctaccaggtccaactcggccttggtgtcggtggggaaggcgttgatggccaccacgcagggcaggccgtacacgttcttcacgttgtccacgtgctgcagcaggttgggcaggcccttctccagcgcctccaggttctcctggttcagctcgggcttgggcacgccgccgtggtacttcagcgcccgcacggtggccacgatcaccacggcggagggcttcaggccggccttgcggcacttgatgtcgatgaacttctctgcgcccaggtcggcggcgaagccggcctccgtgactgcgtagtcccccagcttcagggccatgcgggtggcgatgatggagttgcagccgtgagcgatgttggcgaaggggccgccgtggatgaaggcaggggtgccctccagggtctggaccaggttgggcttcagagcgtcctttagcagggcggccatggcgccctcggccttcaggtcatgggcggtgacgggcttgccgtcataggtgtaggccacgatcatccggcccagcttctccttcaggtcggtgatgctggtggacaggcacagcacggccatgatctcgctggccacggtgatctcaaagccgtcctcacggggcacgccctgggccttgcctcccaggccgtccacgatgtggcgcagctggcggtcgttcatgtccaccgcgcgcttccaggtgatctgcttgacatcgatgcccagggcattgccctgctggatatggttgtccagcatggcggccatcaggttgttcgccgcgccgatggcgtggaagtcgccggtgaagtggaggttgatgtcctccatgggcaccacctgggcccagccgccgccggccgcaccgcccttgacgccgaacacagggcccagggagggctcacgcagggcgaccacggacttcttgcccagcttccgcaggccgtccgccagccctacggaggtggtggtcttgccctcgcccgcaggggtgggggtgatggcggtgaccaggatcagcttgccgtcctgagcctgggtctcgttgagcagcttgtagtccacctttgccttgtagttgccgtacatctccaggtacttctcgtccacgcccgccgtggccgcgatctcccggatgtttttcatttcacagctctgtgcaatttcaatgtcgctcttaatttccatgggaatcagtctccttcttttatgatttatcgtggatgtctatgaagttagaagttaagggagggaacggacctgggccgccataaaggaggccgggcccgggcagtccaggtgcagcggagcgctgccggggtcctggatcagaacggcttctcctgaggcaatggtactcgattccccagcgaaagtcaaggtgccgctcccctccgcgcagtagaggatgagggtggaggagccgggttcggcggagaagctgacggggccgccgctggtgcgcaggggggagacactgccggcgcatctgtccttgcgcagcatcaggttgaagtccacgcagcggccccgggagtgggtgtccgccccgccgtcgaaggcgtggacctgatagggggccagggagatgagggggccgccgtcgtgggtcagttccatctctccccggagaggggcaatgagccggtggtagtcggggaggggggtgaagtcggactcgtccaagtccacggtggcggagctcagccgccagaggaagtcccggtccgcatagagggccccctggggggcgatggcgatctgggtggtggtcccgccggaccactgactgatctggtagtctgcctgggtgaggtgagtgatatggggtgccatggggactcctttctgaacgaggacgcccccgcggcggttcacgccgcgggggcgtcccgtcggtgattcatgggagggggatcacagggactccaggacctcctggtagatggcgtcggccagaggcagggccttgtccagcagggcctggcccttctggcggtactcgtcggcaaaggcctggtcctggataccgccgatgttgatgagcacgttgagccaggcgccctggatggcggccttgaggctcagggcggcgcagcccaggtcgctggcggcgctggcgttgagcttgcccaccacggagcgggtcagctccagggcctggcaggccagctccatcatctcaaagggggtcttggtgcagcccttcagggcctcctgcatggcggccttgcgggcggccttctcctcgtcggtgtccttgggcatggcgaacacggcgctgacggcgttgaacgcctcggtatcccggtcgatcacgtccacgaactgagccttgagctcgttccccttcttctgggactcgatggccagctcctgcacgtcggcgtacttcttctttcccacggtgagggcgcacaccatagcggtgagggcggcgcccagggcgccctccagcgcggcggcggagccgccgccgggcgcgggttcatcggaggccatcaggtccacgaactcattgaccttcatttccacaagcttcataacagtcgattctccttttgtcagaacggcttattccatgccgatcaggtggtactccatgatctgattgtggcagtcgaagtcacgggccttcagatagaactcagcgcagtcgatcatggccttggcgggggtcaggcccacgatctcgctgtccacgatataggtgccgtagcgctcggccagggagcggatcatctcatagaccacatacagaggggtgtcctcatagttgaccatgttcatggagacctgagcgatgccccggtcctccagcatgaagcccatggccttgcagctgcggaagccgccggaggagccgcggatgaccttggcgatcttcttggcgatctccacgtcggaggtggccaggttcacgttgaaggccaccaggggcatgcgggcgccgatggcggtgatgccggcggtgggatggatcttccgctcgccgaagtcgggggcccactcgggctggagcagcttctcgggcatgccctcgaactgccccttgcggcaggtggccagattgcggcgctcgggacgggtggcggagtcctcatacaggaagctggggatcttcagctcgtcccagatccgctggcccaggcgcttggacatctccacgcactcctccacggtgacgcccatggtggggacgaaggggatgacgtcggtggcgcccatgcgggagtgctcgcccacatgcttggtcatgtcgatgacctcggaagccttcttggtcagctggaaggcgacctcctcgatggcctcgggggagccgatcatggtgaacacacagcggttgtggttgccgtcggtctgggcgtcgaacagggtgcagccgggcacgctgttggccacttccaccagggcgttataggcggcctcgtccttctccttgctgcagctgaaattggggatgcattccacaagcttggacataagaaattcctccttaaaatatcggtatcaaaaatgttttgagatgtagcggttgaaaggatcagcccaccagattagaggcggcggggacaaagaacttgatgaaagcgatggtctggggctgatagatgaggtccaccaggaaggcacccacgatggggaccaccatgaaggcccggctggacatgccgtaccgctcagtgacggcggtcatgttgacaatggcggtgggggtggcgcccaggccgtggccgcacaggccggagcacatgacagcggcgtcatagctcttgcccaggatgcggaagatcacgaagtaggacaccgtaacgatgaacaccacctggcagatgacgatgagaagcacgccgcccatcaggctggccagctcccacagcttcagcgtcatcagggccagagccaggtacaggttgagcatcacgtcgccgatgccgtccaccagggggaaggagaacttgtagaagtggaaggtgtcgttgaggttgcggacgatgacagccacgaacatggcgcccacgtagttggggaaggacatcccgatcagcttgctgacccatccagacaccatggtgcccagggccatgcacacgatgatgacgaccacgttcttgatgacgtccagagcggagagaggctccttgccggcggcattgacgctcttgatatcatcgtagttggcctgatgctcctcgggcttcaggtcatacttgacgatgaggcggcggcccagaggtccgcccacaagcacgccggagatcaggccgaaggtggcggcggcggcgcccacgcccatagcggcggagtagcccaggctctcaaaggtggagccgtaagagccggctgctccgtggccgccgatcatggagatggcggaagacagcagggcgtagggggcctccagacctaccgcggtgcccactgcgatgccgatgatgttctggaagatggagatcacaccggcgcacagccagtagacgatcagcaggatgccgcccttcttcagcagggagaagctggcgcccagacccacggtggtgaagaaagccagcatgaaggggtcctggaaggtgttggtgaagttgaaggtaaaagtaccagtggtgtggccggcgaaggtgatgaacataaagatgaagccgccaatgacgggagcagggatacagtacttggccaggaagttgaccttgtttttgatcgcgtaaccgatcagcagaagaatggaagccattgccagggtcatgattgcgtcggtgttgatgttgaggacgttttccacagtttcaaatgacataatgttaccctcccattgattctcttttttcctcggaccgctctccttacggaccgaaacactgccccggctcgtccgacctcctttcgccaaagcagaattggacattacaagtaccactatagtcacgaagcatctaagaaacgtctaattttaaaaaataggaggaaactctgttgagacggaagctcattccgccataaaatgcttgtttttgctgtacagctcagaggcacggtaccgctgttgggtggcgatgccgttgcgcaggctctgggagagctgctccgcctcgaatacgctggggacgctggaaagcaggcggaccccctgccgggcgtagctctccggggagtaggtgagcagaggggcgaggggggagcccgtccgctgctccaggtccagccggctgcggatgtgcatggagacaaagtggaggatgaccccctccagaggggaattcagccgctgctggcaggactgggcatcggccaagctgaccgccgcccgctcgtagtccccctccatggcctgataataggcggtgtaggctgcggcggctgtccggccccacagctcgccggaaactttcgcgttgtcatacccatgctgaaacagctcacgggccctgggatggtcctccagggcaaaagcggcccgcccgtaatggacatagacccagacgccgccgggccagggcaggtctcccagcagggagagggcccgcttatagtaggagcaggcgtcggcgtactccagccgctggcggcagacccggccgtagtcacagtagacggccgccagctggagccggaccgcggtggagcgggtctgtccccgcagagcgtccatggcctccagcagatagtagcggctcttgtcataggcgccctggagacagaacaggccgccccgaagccgctggaactgggcctgctggaccgggtcccgggtgcgctccagcaggcgcatgccggtggcggtgtagcgctccacctgttcagtggcctggcggtagagggcggaggaggccagcaggtagcaggcccggatgagcacccccgtgtcggggtggatgctgccgccgctgagggcgcccaggatatcgctgccccgggcgctgtccccctggaacagggcgatgcgcccctggatcagagcggtggccagctccagacggcccaggactgcggggtccgccccctcacggcgcagggcggacagctcccgcaggaactgctgggtctgctcctccagctcctctggggagcggggggcgggggcgtctccccccaggggggagaagggctcgaaggcccgggagctgtccagatcacaggcccggatgcggtactccagagcacgcaggcggctgccggccagctgaaagtggcgggcgatctggcggcaggcgcccccctcctggggctgctccccctgggagagcagctcggcggcctggaggtggaggggctgacgctgggagtaggagagccggtcgtagaccagctcccggatgcgctggtgggcaaagcggtaggtggggtccccctcggtgtggtgctccaggatgatgccccggccccgcagctcgtccagaccggcggtgagcaggcggtcattctggtccatcagctccagcagcaggcggctgggcacctcctcggagaagagagagatgagctcggccacctggagggccgctccggacaggccggagagccggtccatcaggatatcccccagggtctggagggtggcctccacattgccgctgcggcggtaggcctgggtcagctcggtgagcagatagaggttgcctccggtctcccggtgaaactggggagccatgcgccgggcggcctcaccgcccagctccctgcggagcagctcctctgtctgttccggggtgagagggggcaggcgatggcggcggagcaggccgtccgcctccagcgactccagccgggccagggcagagggggagaggtcgtcccgggcggtgaggatggtcatcagccccctgccctccaggcggcggagcagggcgtcccccagacgcaggctctcctcgtcagcccattgcaggtcctccagcaccaggagcacctttttccggcgggtgacagcggagaagaggagcaggaggctgtcctccagcccttggtcccactggcgcagcgcccgggcggagactccgcccggccaggcgttctcagagcggaagagagggaacgcctggcctaatcggacctggaccgggaccgggagggagagctgctcctcctggatgaactcccgcagggacagcaggatgcggtcccagggggccagagggaggccctcctccgactggaggcagccgcaccgcagcaccagcagggcggacagatcggaccagcggaggaagtggctgatgagctcgctcttgccggagccaacctccccgatgaacagctgggagcagcggcgcaccgccccctcggcgaaggagcccgccgccgcccgcagggcggcatagagggtctcccgtcccacggggacctggggcgcctctgcctccccgggggcctgggtggtgtcgttccactggttcatgatctcgtaatagagcatggtggtgctctccagggggtccacacccagctcctcggagagctgctccttcagccgctggtacacctgggcggcccgggagtacttccgggccgcccgcaggcgctccatgaggaaggcggccatggactcgtcaaaggggtcctcccgcagatactcggtggccaagcgggcagcctcctccgggtcgccggcctccagggcggcctgggcctgctgggccagccggcccagatactgctcgtggagcttctcccgggtgcggtccagccactcgtcgaaggagaaggcgtgcttgacggcgaagccctggaggaaggggcctcggtaggcggagaaatccccctgctgggtgaagcggtcgtagtcgcagtccacctcccaggcgctgttcaccaccaccagggacttctggggggagaggagaaagtcgccccccagggtctttttcagcgtatataaggtgttgcggagatttttcaggccggtggcctcgtcgcagctctcccacagcagagagatgagctcctgccgggtggcgctgcggcgcaccagcatgtagtacagcagggcgtccgcccgcttgaagggaaaggagaccgggaccccgtccagcgtgacgctgggggtctggagcatggtcacattgagcatcagaaagcccccctctttggtctgggtccagtatatcggatttggggccgggtgtgcaactgttcccgggcaaaaatttgccgggggcgcgtttttgccttgccagggggaggggaaaacactataataatataaaaaggtaaaagaggggggtgtccccgtggcccaggacagagagaggagagagacatgaagctggataaatggatcgaatccgtccccaatttcagcgaggggcgggacctgaagaaggtggagcgcatcgtggactccttccgggccaagccgggagtgaagctgctggactactccacagacccggaccacaaccgctgcgtggtgacggtgctgggccagccggagcccctgaagcgggccatggtggaggccatcggcacggcggtggagctgatcgatatgacccggcacgaggggcagcacccccgcatcggctgcgtggacgtgatccccttcatcccggtgcgggactgcaccattcaggaggcggaccagctggcccgggagatagcacaggaagccgctctgctctacggacagcccttctacctctatgagaagtctgccactgccccccaccgggtggacctggccaacatccgcaagggacagttcgaggggctggcggagaagatgaaggaccccctgtggaagccggacttcgggccggataccatccaccccactggcggggccaccgccatcggggcccggatgcctctgatctgcttcaacatcaacctggacacccccaatgtggagatcgcccggcagatcgcccgccgggtgcggaacatcggcggcggcctgcactatgtgaaggccatgggcatcgccctggaggagcggaacctggctcaggtgaccatgaacctgaccgactacaccaaaagttccatttacagtgtctttgagatggtgaagatggaggcccggcgctatggcgtccgggtggtgggcagcgaggtggtgggcattgtccccatgaaggccctgctggactgcgcggagtactacctccagatcgaggacttctcctccgagcaggtgctggagctgcatatcgaatagacggacaagcaaaaggagcggcccctctggaacagaggggccgctctccctttttcgacagtttcaggagatctggatgctgacgccgttgacctccacgccctcgttggcccggatgaggatgtaccgggtgccctcgatcatgcgggtctccaccaggtcgctgcgctccgggttgacgtggatggtgacgtcgggagtgcggacctccagctgcttggggtccaccagattgcgggggctcaggccggcctccgggccgaaggcctggtcatactgggcctcaaaggcatccacatggggggcggccacgccgcaggaggacaggacggaccgcacctcccccttggagagcaggaggggctgctcctccttgctggccttgtgctcttcgatcatgtcccgcagctggctgtggacggcctggaccacgtgatagctgcaatcctccgccagcgtctcccccaggagggattcaaaggtctccttctggacggcggcaggcatgggaggaggggtgcggaacagggcgtcaatgagctccgggtggttctccccgatgtcccgggagtagtagagggcattatagaggttggtggtgcgctcgtcaaaggcggggaagaggaagcctgcctccggcggagagacgacccagtccgccttcaggtcgtggaaggcattttcatagacaaagtagctcagggcgggcttggtcagcttcaccgggcagatggagcacaggatgtaggagaacacctggtcggaggcgtcgtccatccgctccccgtctttggcccggtaggggacgtcgtaggtgtcgtgggccaggaggatgagatagttcccctccagggtgagggaggagatgacccgctggaacagggcctgcacggcctcttcgtccgccagggaggagccccgcagggccatgaggagccggtgctcctcgctgtccaccacctgctgggtggagaaggtgatgtccgccaggtttttgcccagggtgccggacagggtgcgccggaggatggccagcagcttttccgactcctcctgggacatcagccccagggactggtcgaactgggagacgatctcccgattttcattgacataacatccgcggatgtgggagatgccgctcctgtccggccgaaaccggcggcggatctcggaaatttccttttcgttcatagagactccttttgtagatggattgttttgtatctgcagtcagaagggggcgcggacaggaataagagtgtcctgaagggattgggtttggagatagcggtccgggtgtacgccgaagaactgctcaaaggagcggataaagtggtacacatcatggtaggctagccgtttcgcgatctctgatgtggacatatgactccggagaagataggtcctggcagtgcgcatccgacagtagatcagatagttgataggggaagtgtggtaggcgttggagaacacccgggagatatgggaggcgctgaggtggaaggtctgggagagggtctccatggtcaccttttcgtggatatgggtctgaagataggtaaggatatcgttggcatactccggaaaagaggtcctgaccaccgtaccggaggcccggagctccgggaggaccagctccaaaatagagaggactagggtctggaccgggcggtctatctgtccgccgttttcaccggccagctcctgaatgatgtccagaagccgctggactgtggacatcttttcaaagggggcgcaataagcggggcccggagccagaaggtcgttccaggcggtcagccgttccgctggaccggtgaaccggatggcataatgtgtggagtccctatcatcgtcgcactgaaaacaatgaggagtcttgggcggaatggagacaacgctcccggcctgcagcgggatagtacagccggggaggtttaaagagaagtgccccctggtaatgaaggcgagctcatagtccgcctcgtgaaaatgcggatacacagtccagggaacgggaacagggagataactgatctgtgtgatgtgataaaaaggaaatccctgatggggatctcgttcctcagaagtgcgttcaaaaagccacatgggtctctcacatcctttgacgagttccaattataatggatatgacggagaaaatacaagaaaaagggcagaattatttgcgacatgataggatttttccaaatggaacgggaggaggggagacagacgggagaaaacagcggatcgatgataggattttaagcgggaaggcgaacatgtgcagggacaggtatggtatgctttgggaaacagcaggatcgctgctgacgaaagaaaggatgaatgaacatgagtctcaagcacaaggtactcagcgggctgatggcggctgcactgtcggcctccctgctggcctgcagctccgcccccgcacctgccgcgtcctctgcacctgcctcctcactcccctcagtctctcagcagacggagacgcccagctatgcctatcagcggggaacggtgcagaacacacgctatggcactctggaaggattttctgaggatggtgcgctgcactggttcggtgtcccctatgcccaggcgccggtgaacgaactgcggtggaaagcgccccagccgctggagccctgggagggcactttggacgccactgagagcatggtcgccagtcagaccgcaagcgtacaggccagcaaagacaaggcgggcaacggcacagtggaggccacaaccgccctgctgggcagtgaggagggggcggtcaccctggacatcacccgcccggacacggacgagaccggcctgcccatcttcttttatatccatggaggcaacaaccagactgggaaaagcgcggctttcccggcgactcagttcgcccaggaggtcaactgtgtggtagtctcggtgaaccaccgtctggggctgctggggtacaacgcgcttcccgccatccagacaggtacggaggaagaaaattcggggaattttggactgctggatctggccgccgctctggactgggtggcggagaacgctgagagtttcggcggagacagcgggaacatcaccgtcaccggctcctctgcgggaggccgcaatgtgatggccatgctgatctcccccgtgtttgagggaaaattccagaaggcgatctcttacagcggcggcatgacagtggccgatatggaggacagccagcgggtagaggccagagcgctggcaccgctggcggtggagaagggggtccagtctgacgaggagtccgccgcccagtggctgctcaccgatggagaggacgtgcgggacttcctgtacagtctgtctgatgaggagctggccgccgctttcggcggcgcgggcatccgcatgagcgcgttcccccaccactttgccgacggcgtggtgctgcctaaggaggggttcgataccaccgtttacaacgacgtgcccgtcctcatggtcaacggtgaccgggaattctctaccttctgtaagagctctcctcccttcaatacccccagcgtggccgagctgatgaaagatgaggtcctgctgccccagtatcgatttgccgagaagtacggcagcctgatgtacggatactttaacggggaggagtctgccgagcggatgctgggcagcggctatgagtccccaatctacacctgtatcatccgctggggcgatgatccggcggtggtaggagaggagtatgctacaatctatggatcttatcattgcatgaccactccgctgatgacccatgtgctaaccaatgcctcttccagctatccggagctctatgcctcccccagctgtcaggccgtctcctccatgctcaacacttattataagaatttcctgtggagcggcaatccaaatggtggggaactgccccagtgggatgcctggaccagtctggacggcaccactcagctgatcgtggacgccaatgacgatggggcttgggccgagatgtccaccgaccacatctcctatgccgagatcattgagaggatggaggcggaccactccattcctgatgaccagaagaccgagatgatccggactgtcctgaatggtcgctggttcagcggcgaaatggatgcatattacggaaatgaggacctctgggcctgaactgccgtacaaaatgtcccgcgagctctgctcgcgggacatttttgtgtccggcgctcaccgctgccgggccagctccttgcggacggcctgggtgaggatatcctgcccctcaggggagcgcagggcctcctgtaccgcggcgcggatcatatcctgaaacgccttgctgtggaggaaggcgtcaaacaccgtgccctggtcctggccggcggggccgctctgggggacgggccgggcggcgcggcggggcgggggagcgggctcctcctcatcctggaagccgccgtccatccaggtctcctgacgggtgcggtcgttgctctccccccggagatagaagagggagaccccgaaaaaggcggccatcttctcctgctgctcccgggtgggggtctggcggccggtctcgaacttttccgccgcatttttgggaaagcccagggcctgggagagggcgggacggctgagaccccgttcggtgcgcagggcttcgatgcgctgtgccaatgtgatcatagaaaagacctcctcagtggaatggctctattatacaacaagagggacagggggaaaagaggaaaagaagggggcggtcatttgacccactcccgggcgaactggaccgcggcgtccaccaggggggaggccgcgtcccggcgccaggccacccccacctccttgacgatccgctcctccagtttgatctcccggacgccggagagggtatgggagcggaagtcctccgagggcagaaaggccaccccaagcccgccctggaccatgtagaggctggtggtgggactgctggagcggcagacgatgtccggctcaaagcccgcccggcggcaggcggtgaggcacagctccgcggccacctggccggtctggtggaaaatgaagtgctcccccctcagctcccgcaggctgacctcctcacgaccggccagggggtggacacgggggactgccagggagtagtgatcctcccccagcttgacgaactccaggctggaggccagctgggacagggggcggttgagaaaggccagatccaccttccggtccagcagcaggtccagcagccggtgggtcccctcctggacgatgttcaccgagatgtcggggtaactgccacagaaggcggagagcatgccgccgaagttgatgcactggaggctggtgatgatgcccaggttgagggagcccttgcgcagcccggcatagaaggacatctccgcctggagggcctgggcgcgctgaaggatctccctggcccggagaacaaaatccttgcccgcctccgtcagggtggcacccctgggattgcgggcgaagagggccacccccagttccttctccagcttggcgatctgctgggacagggcgggctgtcccacgtggcaggcctgggccgccagggaaaaattccccgaatcggccacggccagcacatagcgaagcgtgtaaagttccatatggtttcatgcctccaatcaatgggatggccgccagtccccgcggcgggcggagcgggcggcaaaagcgttttttcagaccaacaaaatagagagcatctgttttgtgcaaaatgtcaaatcaaaaggaaaagcgggggctcgttccagagtggagaagggctgccaaagctcagtatccgctattttcccggatttgtcaagaaagtttggggctgcgatatcatttttaatgataccagctgtcacaaacaagaattggacttttttcgccggtggaggtagtctatgggcgaagaaggaaacaggcccccggcaaaaggctgggagccagggagaacaaaaactgatgtagaaaggattgaacgatggtgaaccacaactacttcacccaacgggatgtggaacggctggaagagcaggccgtccagatccgacaggacatcatctccatgatccacgccgccaaggctggacaccccggcggctctctctccgcggtggagatggtgactgccctgtacttccacgtgctgaatatcgatccccagaacccccgctgggctgaccgggaccgcttcatcctctccaaaggccactcctgcccggtgctctatgcggcactggcccgccggggctacttcgaccccaaggagctgaacaccctgcgtcagtaccactccatcctccagggccatccggacatgaacaagacccccggcgtggacatgaccgccggctccctgggcaacggcctgtccgtgggcgtgggcatggccctgtccggcaagctgcatcaccaggactacatgacctacgtcatgctgggtgacggtgagatccaggagggcatggtctgggaggccgccatggcagccagccatcacgacctgaagaacctggtggccatcgtggactgcaacggcgtccagatcaacggctgggtcaatgacatcatgacggtggagcccctggctgacaagtggcgcgctttcggctggaaggtggtagaggtcaacggccacaacatgaaggacgtgctcaccgccctgcacaccgccaagaccatgcgccaccccactgccatcctgatgcgcactgtcaagggcaagggcgtctccttcatggaggacgactccgtctggcacggctccgcgcctgacgacgagcagatggtcaaagcaattgcggaaatcaaggaagggggcgttgtgtaatggcaaagactcttgccacccgtatggcctttggacaggagatcattgagatcgccaagaccaacgagaattttgtggtttgtaacgccgacaccaagacctgcggtctggagaagttcggcaagtatttccccgagcgggagttctccttcggcattgccgagcagaacctggtggccgcctccgccggcatggccgcctgcggcaacaaggtgttcctggccaccttcgcggtgttcgcctccatgcgggcctgcgagcaggtgcgtaccttcgtctgctaccccaacctgaacgtcaccgtcatcggcacccacgccggcctccaggtgggcggcgacggcgccacccacgccgccattgaggacgtgtccatcatgcgctccttccccaatatgaccgtggtgcagcccgccgacgccgtggcggcccgggccctggcccatgcggcggtggatttcaccggccccctgtacgtccgtctgcaccgcaacccggttgccgacctgtatgaccccgccacctacaagttcgagtggggcaaggccaacaccgtggtggacaacggcagcgacatgactatgatcgtctccggcatcctgctgaagaaggcgctggacgcggccgccatcctgaaggagcaggggatcggcgtccgggtgctggacatggccaccatcaagcctctggacaaggaggccgtgctgaaggcggccggcgagaccggggccatcatgaccatcgaggaccactccatcttcggcggactgggctccgccgtggctgaggtggtggtgggcaactgccccgtacccatggagatcgtgggcatccaggaccgctttggtgagtccggcgacccggagctgatctacaaggaccacggcatggacgtggactccatcgtggccaaggccaaggctctggtggcccggaagggttaaaagagacaggcacttcggacagggcgctgtccctgcccgaagtgcagaaaaatgtgagaaaggatgaacccaactatggcagcacctcatgtgtgtattcttcagaccagcttcgccaagcgggaggacaccgtcgccttcctgaaggagaaggtccccggcgtgcgggtggaattcatcaccgacagcaccctgctcactgatgtccgggccaatggcggccccagccaggcggtcatcgaccggatgaccctgtacgccaaggcggcggagatctccggtgcggacctgatcgtcaactcctgctccactgtgggcgaggtggcggacatctacgccaaagaggtcaacgtccccgtgatgaagatcgacctgcccatggcccaggaggccgttcggctgggcaccaagatcgccctgatcgccaccctggagaccaccctgggccccagccagcggctgatcgagaaggtgggcgcggagcagggcaagaagatggagtgcacccagtacctccagaaccctgcctgggacgctctccaggccggccaccccgaggagcacaaccgcatcctgatggagagcatccgggagctggacaaaatgggctatgacgccatcgtgatggcccaggtgtccatgcgcgccctgctgcccgacctgaaggacgtgaagacccccctgctgtgcagcttcttctccggctacggtgccatcgccgacaagctcaacgagatcgcggcgcagaagcagtaaatcccccctgaaattcggaagaccgagacaatcaaaaaacggaggaatcgaactatgagcaagaaactggtatctgacctgttggtggactacctggagcgccggggcgtcaccaagctgttcggactgtgcggccacaccgtcatcggcatgctggacgccctttcccgcagcaagaagatcgagtacatcggcacccggcatgaggccattgcctccaccgcggctgacggctacgcccgcatcacccacaaggcctccgtggtcatgtgccacctgggccccggcctgaccaacgtcatcaccggcgtggccaacgcctccctggactccatccccatggtggtcatcgtgggcgatgtgcccagctattacttcggccgtcacccccatcaggaggtccagatgcatgaggacggcgaccagtacagcatgctcaagcccgtgtgcaagcgcagctggcgcgtggacgatgtggaggccctgccctacatcctggacaaggcgttccgtctggctgaggccggccgtcccggccccgtcctggtggacgtgcccatggacatgttctcccgtgagatggacgaggagctgtgggcccgcacctacaaggacagccacgagaccctgaagcccgccctggaccccgctgccgccaaggccatcgccaagaagctggtggaggccaagaaccccgtcctccacgccggcggcggcatcctgctggctcaggcctccgaggagctggccgctctggccgagttcctggatctccctgtgtcccgcactctggccggccagggctgcctgtccgaccagcaccccctgatgatcggccagaccggcttctggggcctggagttcacccactccctgaccaccaatgccgacgtgatcctgggcctgggcacccgcttcggcgaggccgacagctccagctggtatcagggcgtcaccttcgatcccgataagaccaccttcctgcagatcgacatcgaccccaacgagatcggccgcaactaccctgtggagatcggcgctatcggcgacctgaagatcggcctggcccagatcctggaggaagtgaagaagatctgccccaagggcaagagcaaccccgagctgcgggcccagatcgccaaggccaaggctgccttcaaggagagcaacgcggcgatctccagcgacggccgcttccccatgactccccagcgcatcctgaaggacgtgaaggaggtcatccccgaggacgccatcatcttcaccgatgtgggctggaacaagaacggcgtggcccaggagttcgatatcaccctgcctggcaccatccaccactcctccggcctggccaccatgggcttcggtccctccgccgtcctgggcggcaagctggctgcccccgataagatcgtgctgaacctcaccggcgacggcggcttcggcatcaacccctcctgcctggctgccgccgtggagcacggaatcgcctgcacctgggtggtcatgaacaatgccgccttcggcaccatcgccggcctggagaacgccaactacaagaccaagttcggcaccgtgttctatgacgccaacggcgagcgctacacccccagctgggccgacgtggccaaggcctacggcgtggactccatctgcatctcctccgccgacgagttcaagcctgccctggagaaggccatcgaggccaacaaggccggcaagcccttcctggtggaggcccccatggagaacatcgtggtgcccacccccggctgctggaacatcaacgacatttacagtcccaacgagctggtcaaggagggcaagctggtcaagaaggagaacggccagtacgtcgcccccagccactccaagtcccacgacgcctgatcgggacatcctgtttgctacctgtcttcaatcctctatatcagccgaagggccgctccatctggggcggcccttcggctcagtttgctgaaagccttttttcagagaagatgttttgggatcgggcgggggagttcgagggggcggaagtccgcctcgaatggaaatcccaacccccgccgcccttgctccgcaagggggcggtgagcagagcgaggcgagggcttttccgccctgtacggggcggaaaaggatcgggatgccggctgagggaaaagtcctccagggactctttttcctcaaactgaagggccgccccagatggggcggcccttcagcatttgtactgcaaagttttacggatagagtgccaagatccgggtccagacgccggtggcaccctgggagttggggaaggtgccgatggtatagcagcgatcggcctcgatgtcccccaggttgcacacgttctctaccacgccgacgccgttgcccaggaggatctggtggctctcggtggtggtggtgtcgggagagatagactccatggcgatatagcgcactcccttgtccaccatatattgggcagtctcggggagaagataggggtagttggtgatatactcgtcgggatcagtctcccagagggcgtcatggccggtatggaagaggacagcctcaccggactggatctctccgttctcctcctcccaggctttgacatcgtctactgtgatgccgtaggagccggcgggcacatccagctttactacacaagcggggccgatcagaatgagggggtccacggtgtcgatcccaccgccagtctcgatgacatgatagggagcatccatgtgggtgccagtgtggacgcaatagctgaggacctccaggttgtgcagtccgccgtctacgccgatacggccgaagaagtcagactgggggagctggagagaggggtccgccggcatatcggcttcttgaagatgagagatgtcgaccaccgtgtactggctcaggtccatgcccagggaggctggctcttcggcttgagtggaacaggcggagagggacgccgcaatggcgccggtcagaaggatcgcagtcagttttttcatcgtaattctcctttcaatctggtccggaaggtgatatgaaatcttccaggggcccgctggaaggacttcatcttgaaatggctctaccagggaagatcctggtccagataccactgggcgttttcccgcgtgatgatatcggtttgctgataattggagaaggacagaggctcgccgtccaggtagcggcagatctcttctacggcctccagcgccatatcgggatattgaatgacagtgccgtctatgccgccagcggcgatctcctccaccacagaacgctggccgtcgatgcccaccagagccacctctccggccagcccccggcggaccagagcctggtagcagccctcggccatgaggtcattttggcagatgaccccatggagatcagggtaaacattgaggcagtcatccaggatgctctcagcgttgaggcgggagaactccccgttataggtgcccaggagacggatgcggggctcctgagagagcacctgggtgatccccttgtcccggtctacggcgccggaagagttgggaatgccggtgaggtagatcacgttccactgggcggcgtcaggaaaatgctcctccagagcggagatgagcagccgggcggcctgttcccccatggtgacgtgctcagcccccacatatccgatggtgcgggagagggaggaggactctacccggttgtccaaggtgaggaccgggatgccgcggtcgttggcatactggatcgcgggaagggggccctccatggtataggggatgaggatgatcccgtccacaggatcatcgatcagatttaccaggtcctgattctgtttctcctggctgttttccccatcgcacaggatcagctccacagatccctcggagagatcgaactcctccagaagctgaaacatagcgctgcggaagagcaggctggtggtgggaaaactgacgccgatccggtatgatccctgatccgcctcctgagaggcgggcgaggaggatgggggaagggacgtccggcaggagcagagcaggagagcgagggtgagaaaaagcggtgtcagcggtctcatggcagagtggtcctttctggtaatatggccattcgccccctttaaaagtttgctttctctctctaccaacattgtatcagaaactttttcagggtaaatggggcaatctttcattttggtgtgttattttatgccttccctcagaacagatggctctcccggtattcccgcggggtcatccccacctgctttttaaagaccttcataaaatgcttcacatcctgatatccgacctgggcggcgatctcatagatgcgcctgtggtagtccagaagggcctccttggcatgctggatgcggagagcggaaagatattcggaaaatcccatcccttccacctcggcaaacagcttggagagataggtgggggtgagatacaccagggcggcagcggaattcagggtgatgcgctgggtgtagttttcctgaagatactccttgacctgctggatgagcaggaccttgctcccgcggggctgggcgttctcgtgaaaagaaggaggttccggtccgggctcttccagagggaccgggtcgtcagggccgcgggtctgatcggtgcgctcgatgcatttgaaaacagcttcaaagagctcgtcttcggaggcgggtttgagcaggtattccaccaccatcccgctggaaagcattttcctggccgcttcaaagtcactgtaaccgctcaatgtgatgacctttgtagagctgtgccggaggaccagctcgtccaggagctgaagcccgctgaggccgggcattcggatatctaagatgagaatatcgggctgatgtttcaaaagcagggccagggcctcccagccggtggaggcctgatagaggggacggatgttcagcgtgtcccaggagatatcctccaggatgtgccggcgggggatctcctcgtcatcagcgactaataaagaatagttagacatggggctctctcctttccagagggatgcgaaagaaaacacgtgtgcccgcaccggggcggctctctatgtggatatcccggggcccataggcaatgcagagctgctcatggatattgcgcagagcgaagctccgcccctggatgggcccctcaccattgatctgacgcagcaggggccccagatcctggggcgagatcccgatgccgtcgtcggccacctgaaagaaaagcatgtcgccttctttttgaaatgtgatctcgattcggtgctgcgcggggcgtttttcaaaaccgtggacgatggaattttccacaatgggctgaaagagatatttgagtgccacaaactgctccatctccgggaaacgctggatctgaaagacaagcgagcggccgaagcgcatctgctggagctggagatagctgcggagcaggtcggccagctggtccagagggagcttgtcgctgccctgagagagactgatccggaaatatcgggacaaggtcaggatcatccgggcagaggtgtccgcgtgttcatggctggcctggctgtaaatggtgttcagagtattgtacaggaagtgctcgtccatctgggactggagaaacgaaagctcagcctgctttcggagcagctgctggacatagatctcgtcgatgagcttttgcagccgttggatcatttggttgtaccggtggaagagcaggctgatctcatcccgctggaccgggactggagcctgggcgagtgtgccctgctccatatcgctcagatggctcataagggcggaaatgggcctcaccacataccggtacaggatcagactgcccagagagatgcccagggcaccgcacagcagggcaaggagagagaaggcccgagcgccgccggagccggagaggacgatatcttccgggacacaggagagatatttccatccgctctctacggcgttatagtaggagatcagatagtcggtgccatcctcctggtaggagtaagtcccatactggcggttttgcgcaaaagcctgggaaaagcggctgtcttggccaatgttctgggacgtggaaagcgtgctcccataggagaggagcacctgtcctgcataattgctgatccagacagaaccggagtacagctccagagcggaaagagcggtctgccaggcggagtccttcagattgcagatcaggatgcacttttcctgctgggcaggacctgagaccggccggatatgggagagcatccggctgcctccgccggcggaggggagcaggtgccagacgatgggggactcaaaaacatcgtagtacatctggtacagctgctgagcatagtggtgggaaaaggagagctccttctgcccgggcagcatggtgaccactgtctctgtctcgggaaacatgagatagatggaatccagggtgcgcagctggcccacatactggctcagagccagggagagctggctgcgtgctttttggcgctggtcagaaccggcatcggcctgctggtattgggagatcagagagagaaagccggggtcctgactgatctcccggctgaaatcactgacctgctccatcacatcatccatcaggagagaggccccatagaggttggtatagatcagatttgacgtttgactcagcatattttttcgggtcagctccatggaatagtgccagaagaccacgatggggaccagaaggacgagagcgatgacagcagggatgcggaagcggatgctgcggtaccaggaaatctgtttcataggcttcctccagcaatagagtggtcttgtttgtgttctattataggtattttccggcgcaccggcaagagaaatcgtaccggtgagagaaaagggccggacggcgaaagccgcccggcctcaggctgttgaaagagtccccgataaggtgggggtgggagaaagcggggagaataagaccgcggccggacaggatgctcccgtccggccgcgtatcgtctggggacagcttcagttccccagcatgatgttcaggatctctacgtcggtgctcttcatacccacccggcccatgcggcccactgccgcgatggtgtcctccgggtcctccatggtcatgccctcgccgggctggaagacgttgcccgccaggctcagctccagggccatcagggcgttctccaccgccaggccgatcttggccgcacagctggctttggccccgtcgcacaccatgccgcccagggtctcgatgctgttggtgatggtgtcacagaggatctgatagatccgctcctgctcccccttctggcggagcatcatataggccacgccgcaggcggccccggtggcagcgctggtggcgccgcagtaggcgctgaggctgccgatgtacttcttctgatgcacgctgatcagattggccagcaccagggcgcggaggatcagctcccggtccgcctgccaggcccgcccatagatgacgatgggcatggtcacagtgatgccctggttgccgctgccgctgttgatgactaccggcagggagcatccgctcatccgggcgtcgctgcctgcggcggcggcggcccgggcctggaggcggacacggttcagcccgctggcattccccgcgttctccataaggatgcggccggtctccacaccgtagttgcctttgagaccctcgtcagagatggcggtgttatagtcgatctggcggccgatgagctcctccacatcctccattttcaccgtgtccgcgaattccaggatgttggccacattgaggagcatccggtccggaccgccgctctgttttttgcagctggggtcggggcggctgtccagcaggaccgtgccgtccttcttcatgtaggtgatgttgttgtggtgctcctggatctcgatctcagcggagtgtccgccgccctccagctccaccacgatatacaggttgtccacgtcctccaccagctcgcaggtgcagaagccctccttcaccagtgcctgggtggtctggatatccgccggcgtcacggtctccagcacggccagctcccggtccgggtctccgcccacgatgcccagggtggccgccacgtcgatgccgcgcataccgccggagttggggacgatgacgcccttcacgtttttgatgatgttgccgctgcaccggacccggcagtgctctggtattacgcccagcagctgccgcgccttggcgccggcataggcgatggcgatgggctcggtgcagcccagggccaccagcaattcctcccgaaggatgccgaggtgattctgataaagtgcttgatccatgctgtatcgctctcctatctggggtggtatctgaaaatgaacacttgtaaagcacaagcaaatcgaataaaataagcaagagatagacaactgtttgattggaggagacggccatgttcagtctgaccagtctgaaatgcttcgcggcggcggcggaggagctgaacttcacccgggcagccaagcgcctgttcatctcgcagcaggccctgagcagccacatctccaagctggaggaatattacggggtcaggctgtttgaccggggcatccccatgaccctgaccgatgcgggacgggccctgcagaagcatgcccgggagatcctgagctcggtggacgactacgcccgggaggtccaggacatcaagaacttccggcagggcgagctgaccgtgggcatcccggtgacccgggggaccatcatgctgccgcccctgctgtccgcctttcatcagctcttcccccagatccggctccatctggtggaggggaccgccagcgggaacatcgcggatgcgctgtacgatggcacagccgacctgtgcatcggctatcagcccgaaaacacggaggagctggcggtgacgccgctgtttgaggaaaagttcgtggtgctggtccctgaccggctgatgaaggagcaccatctggaccggaagctgggggagggcgccctgtccatggaccgctttgcggagctgccctttgtggtgcagcatccggagaccatgaacggccgggtctttcagaccctgtgccggaacgccgggatagagccggaggtggtggtctcaacccagaatctgatcacggaggcatccctgtgcatggagggaatgggggcctgtgtgctgcctctgaccttcctgtcacccgaccagcggctctccggccacgggagtacccccctgttcagccaggaggggctggacaggctctctattttcctgctggataccagcgggatcggccggttccagatctcagtctgccgcctgaagagcaagctgctcacccgggcgggccgggaattcatcagcctggcccgggaaatttacagcggcgtcagcgctggtcaaataccgcctcaatttcatttcgagtcgtcccgataaaggagagcatgtcgtcgtccagggggtagcggatgacgcagcccggggtgaggatctgatgccgtccgcccaggagcttgaagcactggaagatctggttctggatggcgccccggttctgctgggtgatgtcggtccggctcaggccgcccatgaggcacttgccggtgagggcataggcctcgtccagggcgggcagggattcccaggcgtgccagttgaagacctggacggggtaatccttgaggatgtggaacatgatgtggtctccgtggcagtggatggtgttcatccagcccttcccggcggcctccagcacccgcaggtcgtagggcttgccgtactccagatactggcggtccgtacacttgtcataggagctcatctgggaggccaggaagatcccgtcggcccccatgtcgatggccgcggccaccagctgggcggtggtctcggtgatgacctccagcgccgccttgacatcgtcgccatggccctcctcgatgtaggagatcagcttcccgccgctgatcttgtctgcgatggtgatgggggtgaaggcggtgaagatgacggggacctcctcgcccttcagcttctccaggaccagctgcagatggcgcagctcccgggcgttgctgccctgggtgcaggggcagaccgtcagcttccgccaatcggcggcgcaggagatgggggtgctcaccaccttggccacgccgcccttgacgatctcggagtagtccacggtgcagccgaagtcctcgatggcgtacatgccgttgttcatggtcttgacgaagtcgaagtcatattttttgtagaactcataggtcttctgggagatggcctccgggtccagatcggtgcccggcatgtgggtccagaaggagtagggcatcttgtccggcttctcgccgcggatggcggcctggatgcgttctttttttgtcatgagatcacagctccttttttatggcgctctcgtgcgcctgcgtcaagctccggcccgcctccagcagaggcgggccggtcaggttcagccttttttgatgatgatcttgtcccggggggagttggtcaaaaactcgaacccgtcctcggtgatgagcactgtgtcgctgttgcgcaccgcgcccagctctgcgctcatcaggccgggctccaccgtgaggatcatgccgggagccaggggggccttgttgcccttggtgacggaggggaactcgtgggtggacaggcccatcccatggccgcagcggccggggaggatgctgccgaagccggcgtcctcgtactccttcatggcggcgaagtacaggtcctcgaagatggcgccggggcggagcatgcggaagatgttgtcccgggcccggagcatggcgtcgtaggcccgggtgcgctcctcattcacatggcccacgatgacggtgcgctcgttctccacattgtagcccgcgatccgcgcccagctcatgggcatggtcaggtcgccgggcatggggacgtagccggtggggcagtcacagccgtagttgagccgctcgttggacatgcaccagaccacgaaggtgtcgatgtcggcggtctccgagttggagaagccggacacctcgtactgctgatacttctcatgccagcggttgcgcatggcgtactgtccctcggtggcggcctgagcctcgctggcgccgccctccagggcctcgatggcccgggtgacacccaggtccaccagctcgccggagatgcggcacatcttgatttcgtgggggtccttgatgagccgcaggtccacagcgtcctgggcgatatccacatagcccttgacctggagtttcgtcttcaggcggtccaggaagttcatgctggcgtagtcgccctccacgcccacggtgagggggccgccgcccagaagctcccgcatggcgtccatggcgtccatggccacggcctgggtggcgccccacttgccgtagcacaggaccttgtccaccgcgccctcattgacggcgtggtcgtggcggatgcagtggaccagcagaaaggcgtcatcccgggtgaggatgaagtaggggacgtggctgatgaggatggggttgaagttgctgaagtagaacacgttctcggggcgcatgaggatggtgacatccacccctttgcgggccatgacgtcctgcatcttccggatgcgctccttgacatagccgcgcagctccgggctggagcgcttttcgtctaaaacattcatagatgacctcctgataagattaaaattggacagtaaacgaaacaaaaatattacatggagaaaaatacggagctgttggggcccagcggcaggccgaagaagaaccagaccagcagttccactaccatgaacaggaagaacgcgatgacataaggcatcatgttggacatcagggtgccgaagccggccttcttgtcatacttctgagccagggccagcagcatgccgaagtaggcgaaggtggggcagatggggttggtgaaggcgtcgccgatgcggtaggccatctggatcagggcgggggagtagcccatcagcatgaacatgggcacgaacacgctggccaggatggaccacttggtggaggcggagccgatgaataggttcagggcaccgcacatgatgacaaagatgaccaggatcagccagatgggcagcccggaggcctccagggcaccggcgcccttgatggccaggatcaagccgaggttggaccagtcaaaatatttcaggaactgggcgatgaaatagaacagagcaatgtatccggccattcccgccatggcagaggtcatggctgcggctacgtcatcaaactttttgaagcggccggaggcgtagccgaaggcgatgccggggatggcgaacatcagggcgatgagcacggtcattccgctcatcagaggcgccttggagttgagcagagagccggtctcgtccgccaacacaccggtgacgcacaggaccacgatcagggcgatataggccaggaaggcgatcaaagctgccttcagccctttgttgtccagaggagtgggatcatccgcctgctctacataatctccagtatagcggcccatgcggggctccacgaccttgacagtgatcaaggtggagaagaaagtaaggaataccacggagaccgcggagaaataccagttcatggagggactcagggaaatgtcggggatcaaaagctttgctgccgcttctgtgtatcccatgttgaccacatccatagatgtgatcatcaggttggaggcgaacgcgccggacacagaggcataagctgccaacatgccggccatggggttgcggcccatggccgcccagatcagggcacccaaaggaggcataacaacgaagcccgcaccgccggtacaatctgccatcacacacacaaaacagaagatcgcgatgacctttaggtcggagcctttggcttttgccaatcctcttaatgcgacgtggaagagccctgaggcctcagccacgcccacacccagcatacaggtcagggtcagacccagagcggaggtgccggtgaagttggtcacaaaagtagtcagcatacggacaaatccatccttgctgaacagattgactacttctaccagttcacctgtgactgggttgactgcgctgacatgaaaaatggaacagactgcggagattgcgataacagcaatacataagtagatgaagagcaacatgggatttggaattttatttcccatgacctccacacggtgcaggaatcgctccagcacgctgacctttttcttctctcccataaaacctcaagacctccccaattttcacttttttgatggcctgtaccggaacgtggatctggcacaggcagcttctctcctgccggaaaaccggcgccaacggcttggtgggccccactagggcagattttggccttcctgccctaacacaatgccaattataacgggacataaaaactaagtctaacagaaaaatgaaaaaatcaacaagcaattggttgtgacattgaggaagccataggtttttcccccagagcggcccggggagctgcaaaaaatgtctaaaaccggcggataaattttgtatgcttctgcatcccatgtttgtggtcaggctctcagccggggccggggctggaaaacatgagggaatatgcctggataaggcggcccggggggtgagatcttggatattccgcacaaagatgggaagatgcacggaaagagaggagttgaaaaattccccgctttatgctctaatagaacaaactttcaaaggtaggggaagcagaatatgaagtttgcgattttgggagcgggaaataccggaaaggcgtacagcgcatttttgtcccacggggggcatcaggtccttctctatgaccggagccaggagcggctggcgcccatccaggcccgggggatctccgccaccggcgtggtggaggggcgcttccctgtcccggtgaccacacagctggaggactgcggggacagcgacgtgatcctggtgtgcacggtggcggcgggacaccgcccgctggcggcggggctggggggcgtgctgcggccggggcagatcatcctggtgaccaactgctgctggggcgcggtggaatttgatatggagctgggagcggaggcggagcggaagggctgccccatcggggagacggggggacagctgatcctgtgcagctcccccgcgccggacgcggtctatctgaagaccgtcaaaaagagcatgggactggcatgcgtcaggccgggggataccgccggggtgctggagcggctcgcccctgtattccctcagctgtgccctgcggccaatgtgctggagacctcgctgaacaactccaaccccatctcccacgggccgctggccctgttcaacatcacccggatggagaacggggaggacttcctgctcttcgggacaggagtgacccccagggtggcccgctttatggagaagatcgacagggagcgggtggcggtggtccgcgcctgcggcgtgtccgcccccacagagctggagatgctcaattccttctggccggagccccaggagagcctgtacaatgtgctgcataacacgccggcctattccgtcaccaagggccccaggaccctggaccaccggtatcttacggaggacctgccctatggcctggtgccctatgtgcgcctgggccggaagctgggggtggagaccccgttcctggaggcgctgatcgggatgttcggactgtatatggaccaggattatttccagcaggggccggaggtggaacagctggacctgtcccggtaccggtaaggccagcgggggccc

SEQ ID NO: 708 - DNA, 864073 bp, Lawsonibacter asaccharolyticus
  source 1..864073: mol_type = genomic DNA
gccagagacatggcctgagacagaagctccccgtcctcctgtgtcacaggggaggagctgtcccaaagcaccaggatcagctctgccgactccatggcagcccggctgcgctccacgcccatctgctctacccggtctggggtgtcccgcaggccggcagtgtcgatcagccgcagcagggtgccccctacggtgacggtctcctccacggtgtcccgggtggtgccggggatctcagtgacaatggcccgttcgtagcccagcagggcgttgagcagggaggacttgcccgcgttgggacggcccacgatggcgcaccgcaggccgtggaggatctggctgccccggcggcaggtggccagaagggcccggagctgggcggcctgccgggacaggaccacctccagttcgctctcccggaaggggtcgatgtcctcgtccgggtagtccagcaccgcgtggaagtgggccatcacgtctaccagggcggagtagatgccgccgatccgccgggacagggccccggacagctgtccggcggcgtggcgggccccctcccggctggaggcttccagcagatcgcccaccgcctccgcctgcaccagatccagacggccgttaagaaaggcacggcgggtgaactcccccggtccggcctgtcgggccccgtgggagaagagggactccagccccagagagagcaccatgggggcgccgtggcagtggagctcagcggtgtcctcaccggtgtaggaggccgggccccgggtataggtggccagcaccttgtcgatgaccgccccctcccggtccagcaggtcgccgtagatcaggcggcgggggggatgggcctccagcggccggctgtccgctgcccggaaggcggcggacgcggcggagacggcctccggcccggacagacgcaggatgccgatagcccccggcccggcaggggtggccacggcggcaatggtgtcggtggttctctccatcagaacgatactccttcctggcggcgcgcttcgacaggaaacgcagcggttcctgcaaaaaatatttttgtgcaaactgggaggaaaaaatcccttgacaggcgttatgaaaaccgccgggctgcatacggacagcagagagtcaacataacaccctgtggaaaaccctgtggaaactgtggaaaacccgcccggcggtggaaaagaaggagggagaggcagtttccaagggtatgcatcgccctgtatatccgcatgtcaaaaaatccgggggcggagtgaggacagggacggagcggaaaaaagagcgaggaaaaaatgaaagaataccgccgtgtccgccatgcggcgaatacggcggtcctgactgtgaggggatactcagacctgctgggagatgcggcggctgatggcccgggcggcctggacgccggaggcgcccgcctgggccaggccgcgggtgacgcccgccccgtcacccgcggcaaagaagccggggatggaggtctccagctcgccggacagctccagacgggaggagtagaacttcacctccgccccgtagagcagggtgtcgtgattggcggtgcccggggcgatcttgtccaggacgtagatcatctcaatgatgtcatccagctgccgcttgggcagggccagggacaggtccccggggacggcagcggtgagggtgggccgggtgaaggacttgcctaaccggtgttcgttggtgcgcacgcccttcaccagatcgccgaagcgctggacgagcacgccgcctgccagcatgttggacagggaggcgatgtgcttgccgtagcggtagggctcgttaaagggctgggtgaagcggttggacaccagaagggcgaaattggtgttctcgctgcgcagcttggggtcggcgtaggagtggccgttgacggtgttgatgccctccacgttctccgccaccacgtggccgtagggattcatgcagaaggtgcgcacctgatccccgtaccctttggtgcggtagacaagcttggactcgtagactacgtcagtgatgtgctcaaagacctgggcgggcagctccacccgtacgccgatatccacttggttgttgatgaggtggatgccaaggcccttgcactcctcggcgaaccactcggcgccggagcggccgggggcggcgatgagccagcggcaggagagctcctcacccttgcccagggtcaggcggaaatcctcgccctcccgggcgatgtgggtgacgggggtgttgaaccggaactccagcttgtccttcagcccctcatagatgttctggaggatgcgcagattgttctctgtgcccaggtgcttgcaccgggcctggagcagatgcaggtcataggccagcgcccggcgctccagggccctggcctcgggggtggaggtggagaagcactcggtggtggcgccgtgggccacgttgatggagtccacatagtcgatcagctccatcacctcccgggcgtccatgaagtcggtgagccagccgccgaactgggtggtgaagttgaactttccgtcagagaaggccccggccccgccgaagccgcacatggtgtcgcacaccgggcagtggatgcactccttcaccttgcccgccacgatggggcagctgcggtggtagatatcccgcccctggtccagggcggtgatcttcaggtcgggatggaggcgtgccagctcataggcggcaaagatgcccgcctcgccgcagcccaggatgacgacgtcgtacatggggttcatgggagagctcctctcatagtgtagtagaaaacagatggcaggcccgcccaacaggacagacacatctatgatagcacagaaatgagaaaaagaaaagggaattggacaaaaacaggagggaaggagatcaattccgggacaggcggcccaccaccagttgggcgcataggccggtgagggtgccggtaatgagcccggccagcaccagataagggagatagaccagcaccacccagctcttggcgatggcggcggcggccagcagctggcccaggttgtggcatacggcggacagggggctgctgacccagagctggccccggcccagcacccggcgcaggaggagcagggcgagatagctgagcaggccgccccccaggctgtacagcagggtcatcatctggccggaaaacaccgcgcccagaaagatccgggagaggaggatgagcagggtgtcccggggccccaggacgaacatggcgtagacggtgacgatgttggccagccccagcttgatgccggggatggggaccggagggggcagctgggcctcagccagaaagatggtcagggcgatggcggtgagaagggcggcccgggtgaggcggcgggcctgggaggggcgcttatcctgtggcggagtcaagaccatcccctcctccctcgatttgaatgaccagccggttgggcaggcagaccacggggacggtgccgtcggagatccatccctggtccacacagacctggtccgggcagtccgcggactccaccctgatccggcccggctgggcggtgatggtgttggtccgtccctggaactccactgtaaaggtgagaggggcggagagactgtccagatcgatctcccggatcaagacaccgtcctgatagatacgggccatgtgcccgcccccggaccagcggcccagcaggaggatggcgccgacggacagcagggcggcggcggccagcacgcctacccagaatctcgtgcgtttcatagctggatcaccgtcacctccaggtcctgatagtcctctgccagcgtgaaggaaccagccagaccggcagtgacccacagggaaccgtcctccagcaccagcaccatctcaaagtcctgatgggtccgccaaaaatcggccccccagtctgccccccggacgaacacggcggtggagagagcgtcgcagtacacccccagaggagagacgatggtgacgctcttcaggccggaccgggcgggagcggcggtctccgggtccatgatgtgccagtaagtctggccgtcctcctcaaagtagcgctcatagccgccggaggtgatgaccgcctggctgccggtgagctccaggacccccaggtagccggagctccccgcctccggggtctggatgccaatgcgccagggagagccgtccggcttgtcccctgcggtccgcacgttgccgcccagattgaagatggcgggttccccgccggccagctccgccagcagatcgctggcccagcccttggcgatggagcccagatccagctgcatcccctggggcaggcggacccggcagccctccgggtccagctccacctgggtgtagtcgatgcgggcggccagctccgccagctcctccggtccggggacacggtactcgccggtggtgaagccccaggcatgaacggcggagtaggcggtgatatccagagccccctgggtctcccggccataggagagggccagggagagcagctggaaggtctcctgagagaccgggacccaggccccttccccatggttgatggcggagatgtcgctgttctcgtcggtaacggagagcagatgctccagctggtagatcctctccgtagcctggtccagcacctgctggccgctgtcaccataggcggtgagctccatcacggtgttcatggcaaatatggtagaggaggtctccctggtctgggcgcagccggacagcagcagggacagcaccatgggcaggaacaagaatcggacagagtgcacagcgttacctccaaagatcgggatgttctgcatacacagtgattattattttaacatatggccggggctttgtcatgaaaaattgaaaaagatatggagagccatagatcggaggagcaggggccgcctggacggaaatgctgaggggtggacctgaaataccttttccgtggaggggaggtgccccgcgcatgcgcaggggatgagagggcgtcttttctctccggggcagggggcggagcgtgccgggaggctggacttttcaaggggcggggcccctttgtcgttgcttttttcctcgatttggtgtaaactagggtatcattttattgtcaggaggagaacatctatggatgacaaggtaaaagaactgctggaccgcatcagagacaccgcctccgcagccgccgacaccgcggcggacaccgcccgggtggccggacggaaggccggccagatggtagacgtggccaagctgaacgtccagctctttgacctgaacggagagttctcggacattctgaaaaagctgggacaggtgatgtacgacacccacaggggccagggcggagagagtaccgacgtggccggccttctggagcgggcggacgaggtctcggaaaagatcagagaggtgaaggcccgcatctccgatctgcgccagagccggacctgccctgcctgcggcgcctcctgcggcaaagaggacaaatactgccggggctgcggcgcccctctgtaaggagacggagatggacttcacattccaacagtatgaagagagcgcccaggccatccgcgcccggctgggcggcttcgcgcccaaagtggctatgatcctgggctccggcctgggttacctgggggaccaggtagagggggcggtgacggtcccctacggcgagatcccttatttcaaatcctccaccgccccggggcacaagggccggctggtcttcggcactctggagggccagcgggtggcggtgatgcagggccgcatgcaccactatgagggctactcctatgaggaggtctcctacgcggtccgggtgctccggctgctggggtgcgacaccctcatcgtcaccaacgccgccggctgcgtccatacgggctggcaggcgggggacctgatgctcattactgaccacatcaagctgttctcccagtcacccctgcggggggagaacctgccggaattcggagtgcgttttccagacgcctccaagctctatacgccccgcctgcaggagctggcccggcagaccgctcaggagcagggcctcaccctgcgggagggggtctacttctactgctacggcccgcagtacgagacccctgcggaggtgcgggccgcccgcatcctggggggtgacgcagtgggcatgtccaccgcgccggaggtcgtcgtggccggacactgcggcatggaggtgctggggatcaccctgctgtccaacatggccgccggcatcctggaccagcccctctccgagcgggaggtgctggacgccgccgaggcggcgaaggagaagttctcggggctgatccgggcctgtctgcggcggatgtgagccgcaccggcgcgcccctgttccgcagcttgaggagaagggagcgtctctatgctgacactttttaaccgcgcggagctgctggtcacctgtgacatgatccggctggcccgggtccgggaagctctggctgccgctgacatcgattatatctgccgagccaaggacctgtctggccgcggggggcatacctccagctttggcgtgggccccggggcccgggtggagtataaggtctatgtgaaacggacggacctggagcgggccaagactgttttgtaaggagcgagaggatgcccattttattttctgacgtgaccgttgtgcccatggacggggcgccgcaggtgctggaacacgcctatgtggcggtagaggggacgaagatcgcctccgtggggactgagccccccgaggggacctttgaccgggtggtggacggcgccgggaaggtgctcctccccggctttgtcaacgcccacacccacctgcccatgaccctgatgcggggctacggcgggggatgcgacctgcacacctggctcaaccagtatatctttcctgccgaggcgcgcctggacagccgggcggtggcggcaggggccgggctgggcctggcggagatgatcgcctccggcgtcacctgtgtagctgatatgtatatgcacaccgggaccatcgcggagcagatcctggaggcgggcatcagtgccaacctgtcctgcggcggggtgtacttcggcgcgccagaggatttctcccccgagacctgcggcgactgccggaaccaggccgccctgacagaggagtggcatggggcgggggcgggccagatcctggtggacgcctcggtccacggggagtacacctccaatccccctctgtggcggtggatggccgagtacgccgcagagcaccgactggggatgcacgtccacgtctctgagacccagtcggagcaccaggccagcctggagcggtggggcaagacccccatccaggccctggacgggtgcggggtgtgggactgcggccgctcactggcggcccactgcgtctacaccacggaggaggactgggctctcatggcggagaaggggatctcctgtgtccacaacccctggtccaacctgaagctgggctccggggtggcccctatcccggccatgatgcgggcgggagtcaacgtggccctgggcaccgatggcatgtcctcccacaacagtgccgatctcttctccgatatcaagctggccgccgtcctgcacaacggggtggagcgggaccccatggccgtgaatgcctgggccgccctggagatggccaccgtcaacggcgcccgggccctgggcagggataccggggtcatcgccccgggaaagacggcggacctgatcctggtggacctctccgcccccaatctcatcccctgtcacgacccggtggaggacctggtcttttccgcccacggctctaatgtggagatgaatatggcccggggacaggtcatatatgagaaggggagctttctcaccctggacctggagcgggtccgctgggaagtggagcactacgccctcccgctgatcttcgggtgaggacccagtctcacaaattgaggaggatacactatgacccgacaagaccaagcgccccgccgaatggcagcggccaaaccgaatacattttttggaggagccgccatcctggcaatggggatcttggtggtaaaggtcatcggcctgttctataagatcccgctggtcaacatcatcggcagcgagggaagcgccgatttcaacaacgcctacaacatctactcagtgctgctgaccatctccaccgccggcctgccggtggcggtgtccaagatggtgtcggaggccaacgccctggggcggcagaaccaggtgcacaaggtgttccgcctgtccctggcagccttcctgaccctgggtgtggtatccttcctgatcatgtattttggctcagagcagctggccggcatgatgcacgactcccttgcggcggcgggcatccgcgcgctggcgccggcggtgatctgcgtgggctgcctgtccgccttccggggctatgcccagggccacgggaatatgacgcccaccgcggtctcccagattctagaagcgctgtgcaagctggtcatcggactggggcttgcctactggctggtgcgggcaggccagcccagccatgtggcggcggcgggggccattaccggcgtcacggtgggcaccatcctggccctggcctatatgatcttcaacttcgtctccacccgcatgcgggaggagaaggacactcaggacgctccggactccgcccggcgcatcctgtccaccctgatgaagatcgccatccccatcaccatcagctcctccatggtgggcatcgtcaccgtcatcgactccgccctggtccagggacagatccagaaggtgctcatctccgacccggacagctgggcgctgtaccagcaggtggtggacttcgcccccctggaggcggcacgggacgcctggcagcaggccgtgagctccggcgcggcggccgaggcggtctcccagctctacggggcggtggagctggcggcggaaaatatcagccgtagcctctatgggaattacagcggcgcactgaccatctataacctgcccctctccctgatggccgccatcaccgcctcggtcatcgccgcagtctccgcggccctggcccggcgggaccgccggggggcggccaggatcaccggctccgccctgcggatcacggctctgctggctttccctatgggggtggggctcttcgtgctgggcacccccatcatccgactgatctttccggagctggacgcctctgtggcggggcccctgttgtctaccctgggcatcgcctccatcttcgtctgcctgatgctggtgtgcaactctgtcctccaggcccatggcttcatcaatctgcccgtggtcatcatggcactggggggcgtagtgaagatcgtcaccaactacaacctggtagccgtgcccaccatcggcatctccggggcaccggtgggcaatgtgctctgcttcggactgtgcatggtactggacttggtggtcatcgcccgggtgatccacggccggccggactacctgcctctgctggccaagccggcagccgcggcgggcgtgatggggctgggggcctgggcggtgtacggcctgctgtccaagctgctcagctatgaggaggttacccaggcgggggagacgatccagaccctggggaagaccggcaacgggatcgcggtgatgggagccatcctgatcgcggtcatcatctatgcggttttggtggtggctctccgcgctatctcccgggaggacctctccctcatgcctaaaggggacaaaatcgcgaaaattttgaggctatgagctgatttctagtgaaaataccttgcagaggatgagaaactgtggtaaattttcaaagtatggaacgatacagcttccaggacctgaaccggatcatggcgctgctgcgccagccgggcggctgtccctgggatcgggagcagacccacgagagcatccggcggaacatgctggaggaggcctatgaggcggtggaagccatcgacgagaaggaccccggacacctcaaggaggagctgggggatgtgttgctccaggtggttttccacgccagaatggcggaggaggaggggctcttcaccctggacgatgtggtggacggcatctgcaaaaagctggtgttccgacacccccatgtctttggcacagtggacgcccgggactccggccaggcgctgaacacctgggacgcccagaagcgggaggagaaggggcagcgcaccgctgccgacaccctggacagcgtggccagatccctgcctgccctgatgcgggcggagaaaatccaggacaaggccagaaaggcgggctttgactgggcggagatgggtccggcgctggacaaggcggaggaggagctgggtgagctgcgccaggccgtggaacagggggccaatgtggaggaggagctgggcgacctgctcttcgccgccgtcaaggtgggccgctttgcagggctggacagtgagcaggccctgcacggcacctgtgaaaagtttatccgccgcttccggcgggtggaggagctggccggaggacggccgctggacagcctgggactgcaccggctggaggagctgtggcagcaggccaagcaggatgaggcttaaaggctgaaaagctttaagtaatattattcaaaagactggcgcacaggcgccgaaacatgctttaggaggaaatcacaatgaataagaccgaactgatcaatgccgtggctgagaaggctgagctgtccaagaaggacgcggaggccgccgtgaccgccatgatcgacgccattaccggcgctctggtggaaggcgagaaggtccagctggtcggctttggcgcctttgaggtgaaggcccgtgccgagcgtgtcggccgcaacccccagaccaaggagaccatcaccatccccgcctccaagactcccgtgttcaaggctggcaaggccctgaaggacgccgtctccaagtaagcaggattatagaaaaagggggtgccttcggcacccccttttctccatggaggaatacgatgcgattggataaatggctgaaggtatcccgcctgatcaagcggaggaccgtggcaaatgaggcctgtgacaacgcccgggtcatggcaaacggacggccggtgaaggccagctatgacgtaaaggagggggatgtgctggagctgcggttcggagagagaacggtcaaggtggaggtgctggtagtggcagagcacatgggcaagaccgaagcggccgctatgtaccgggagatcctttagagaaataagaaagcgcgctaccccccaaaacaggggcggcgcgcttttgtcattcagctgtgttcccggatgctggacatctcctgggcgatgttcaggacatggtcgccaatgcgttcgaagtcggtgagcagctcagagtaaaggatacaggcctcatcagaacagatcccggccttcatccgctccagctgatccttgcggaacaggtcggtcatgtcatcgatgcgctgctccagagcagagacgtccgtcagccagagcaggtcgccagcctcccgctgatgcagggcgttcagcgcctccagacagatgtcccgcatctggcagatctcctcctgagcctgggcggagaactggatgtgccgttcctccagcagcttggagtagccgcagatgttgatggcgtggtcgccgatgcgctcgatattgccggtgatggtaaaatagctgctgacgatgctggaaccctgctcgttggtctcataggtgatgagacgggagatatacttggagatctccttattgaggaaatccaagtagctctccatcttctcggccttggtcagaagactgctgttccgactgagcaccgcgtcaaagctggtctcgatgttgtcctgggccatatccagcatccgatccagttcctgctgcagctggccgatgtggatagcggaggcgcccaggttgccgtccttgctgctgacctggacgggggtcaggtattccaagtgcatctcgtcccggttctcctccggctgctcgggcaggatacgcaccgccaggctggccagttgattgcccagaggaagtagcagaagggtagtgacaatattgaaaatagtgtgcatgttggcaatctgggcagccggcgcatcaggggtaaaggaggccaccagatcggccaagggaaacaggatgcagaggatggtaaagagcaccgtgccgatgatgttgaacatcaggtggatgatagtagcacgtttggcgctgcggctggtgccgatggaggccaggaccgcagtgatacaggtaccgatattctggccaaagaggatgaacacagaactggaaaagctgatggcaccgctggtggccagagcctgaaggatgcccactgaggccgaagaggactggatcagggcggtaaacagggcgcccacggcgatgcccagcagggggttggagaatctggtcatcaggtccacaaaggcctgggagtcacgcagaggcatcatggaggagctcatcatctccatgccgataaacagcacgccgagaccggccatgatctggccgatgtggtgggccctgggcatcttgacaaagaccaccatggccacgccgatgaaagcgaagagaggggcaagggcgcccacgtccagagcaatcagctgtccggtgatagtggtgccgatattggcgcccatgatgatccagaccgcctggttcagggtcatcatcccggaattgacgaagcccaccaccatgactgtggtggcggaggaggactggatcacggcggtgatgcccgcgcccaccaggacgcccagaaaacggttggcagtcagccgctccaggatcagcttcatcttgctgccggcagcggcctccaggccggagctcatcatctgcatgccgtacaggaacagcgcgagaccgcccaaaagactcagaaggcctgaaacagacatagggattcctccttcaatcaacacagcttccgccgagaggagcgaaacaaagggcatggaaaaagcataacccacatcataagatgatcggcgcgggctatgcttgaaaactgtaccaacagggttccacatcaagaccatgttcaataccggaatattctgcaatgatattataagggggaaggtttcccagtgtcaataccattcttggacaaaatttgacagacggaccataggactgttttgcgagatgcgcacactggggtagaaaagcgaaatgtctaccaaaagtctaccaaaaaagggcggcggtggcctggagtttcagggccttgctgccccttctgttttcatgtgtctaccaaatgtctaccagggaaactttttaggcgtaatctcggggatttttcccttgatttccccctttttataaccaattcctcctgtgtcagaagtgttgtacaggcatagtgggccgaaatgttctggaaaaggcccgatttgtcagaaaacagcgacttttgtcaatataaaaaggaggaatatccaatgagaaacctgaagcgtgctctcagcctggctctggcttccgttatgctcctgggcacgatggtcgtgggttccagcgctaagggccttgacgacttcagcgacaacgctgagatcgtcaacaaggacgccgtggcggtcacctctgccatcggcctctttgacggctacgaggacgggtccttcggccccgagaacgtagtcacccgcgccgagatggccgttatcatcagcaccatgctgtacggcgccggtgtgaacgtcaaccagttcgcggagaccaatgtgttcaccgacgtccccgcctgggcgcagggctatgtgaacctgtgctccagcctgggcatcgtggccggcgtgggcgacggcaagttcgaccccaacgccactgtgaccaccgcgcaggccgttctgatgctgtgccgcgccctgggctacttccagagcgccgctgacttcggcgacaactggatgctggccgccaccgccaagggcaccgctctgggcctgtacggcgacctgaagctcaccgccaacgagggcctgacccgtgacaacgtggccgagctggtgttcaacgccctgaccaaggctgtgcccgtccagtacaacgagctgctgggtgtgtactacaacgagaaccagggaatcatctactccctggagttcaactacctgcagaccctgggctacaagaacttcgacctggtgtaccgcaccgacaccgagaccatctacggccgtcccgccaccacctggggcactggcacctacaacgtgcccaccaacgccggcaccactcagaaggataagtatctgaccggcgagggcggtctgatcgctgatcaggtccggatgctggacaaggacgagatcatcaccgtccccaacacccccgactacgtctacaccgctaacactgatgagcaggacgtctacaaggatctgggcgccaccgtctgcaacaacgcccggaaccaggatgaggagtacacctggactgtctttgtcaacggcgaggaagtgttctctggcgtgaccaacgaggctaaggagggcgagatccccggcctgaatgatgacgccacctacggcgccgatgatgaaaagaacctcatccctgaaaatgagaagaccaagtatcagttcactgacaagggcactgtcaccgagatctacatcgatgactacaccctggacgtgactgtggtagagatcaactactacctgggcgaggtcaccactgtcaagaacgacgatgacggcacctatgtgagcgtgcgcgccctgtctgacgagcccaagagtctggacgaccgcactttctacacctccgacttcgaggaggatgactatgttgtcttcaccgtggacttcgacgaggacgaggacttctacatctgcgagctgatggctcccgagaccgtcaccggtgaggtcacccgcgtagacaagaacaccggcgaaagcgatgaggacaatgacaacacctatgtccgcatcgacggcaacaagtacacctatgccagcaagaaccacaacgtctatgacctggatgaaggcaagcggcagcaccccactctgaacgaggactacaccctgtacatgactcccgagggatatatcctgggctacgctctggctgaccagtcccccgaccagtatctgtacgtggaggactccgatgaggagatgggcgactggcaggccaaggtcgttctggaggacggcacctccgccaaggtagagctgaagaacgactacgtcaaggtcaagaacggtaccaactattccatcgagtgggtgaaggagaacggccagcccttcggcgaggatgagcagatccggaaggtccgcaccagcatcgacggccatgtcttctcttacaccgtcaacgatgacggtgtctacactctgaccatggccgatcacctctgctggaacaccatcgacgctgaccaggcgaaggtgaccgacgtccagatccacaacggcaaggcctatattgaggccggtgtcaatgagatcatcgtggaccgggataccatctttgtggacgtggacaacaacgtggcctacaccggctatgatgaggtccccaacgtggacaatgccgacatcgcctatgccaaggacggccgcaccgctgaggtggtcttcatcgtcaacggcgagatctacgacgagaacagcacctacttcatgctggccaagaaggaccgcgagtccctgaacaaggacgatgacttctgggagtacacccaggcctatgtggacggccagaagcagaacgtgatcgtggcctatgacgcccttcagaagtgggatgacgccaagggcgagtgggtcaaggacgaggacaatgagggcaagtccctgaaggtcggcgtgctttacaaggccgttaagagcgactcggacggctacttcaccgccatccgccctgtggagctggctgatgagtatgtgaccgaggttgccaatgacgccttctgggtcaccgacaaccacagctacgcggagaaggactggatcaagtacgacaccgacggcgagaccatctttgtcgtggtggagcagacctacgacaagaagggcaacaaggataagctggtcatcgacgatggcaacatcgacgacatgtttgtcagcgtgaaagcgaatggcgatatcgttcctgacgaggacggttactactcctatgtctccgtcatcgaggaggatgaggagtacgccgagctggtctacatctggctgaccaaggatgagctcacctatagtgatgaggatgccgccgtggctgacctggagaaggtgaccggcctggatggcaagaccgctgagcagctggctggcctgctgaccgacatccaggacaacctggacaagaaggtctcccccgagaccctgaaagacctcaaggccgccgtggatgggatcaaggccgctcagaaggccctgactgatgctcagaatgatgctaaggccgctctgaatgactatgcggataatatcctggacacttacgagggcaagctgaccgccaagcaggcccgcgatatcgccgccgccgttgatgcgggcgaggaggctatcgacgccgctgccaagactggcgtgaatggcgctctggatggtgccaaggcggccatcgacaaggtggccaaggatgctgtcgacgagactgccgacgaggagctggtagatgatgctgtgggtgcacttcccgctgaagtgaccgttaaggagcgcgcttctaccggtgacaagcccactggcgagcagctgaatcagtacaccctgaaggactacaagatcgatggtgtgatctacactgtctccgatcccgctgattggaaccccctgactgctggtacggatgatacctatgtggggaccgctaccgtgactatgaccgccggtaaggcgactgcgaccaaggagatcaaggtctccttcgtggccaccgactataagaacgtcaagaccgccgcagaggcgatcggcacagaggtgcgcgttgaggtcaaggagagcgagatttcctccggagtcaacaccgctatcaagactgctctggaggccaagtgtgagggcgtcgagattaccgctgtcgtgaatggtactgcgagcggtagtgagggcgacattctctataagaccgctgagatcaccattgctgataagactgtgtccgccactagctgcgaagttacgatcgatgtgactattgatgtaactgcgggctaattctggttgaatacgtctcgatcatgtactgccgccccccggatttcggggggcggcgcttttcctatttgaccgcgtaaaacgcgaatgcgctcccgctgctgatggtcccccctcgctgtgcagccgcaggtgggtgagcgcagcggcggtcagactgttcagggtgtaaaagctgttcagcccggaggaatctgtgcccttttcattcagcgaggccccgttgatataacagcccagccggccgctggcgccgcaccgccgcaggacgatcaccccggtcccgcaggtcccccgctgatatttcagcccgatggccgttccggtggaccccaaggcggacacataataagcctcaccatcgttgaaggacagtttgatctccccgcttccccgcaggtcgtaatgcagctggagctcccagtaccctgtccagtccgggaccggaagatcaaagctggaggccgctgtgttcaaggcagtccgtcccagaaagaccatccgattctcctcccgcagttgtgagactgccccatcaagagctacctgctccgccttgcctctctccagagcggagacacgcttctccgccgctgtcagggcggtctcgtccgccttctggctcactacggaggacaggttggtcaccgtagatttgtcggcttttcgccccgcctgctccgccagggcgcggagcgctccgtcgatcttggcgttgtcggagttgaagtccacccgctccaccttgtccacggcctcccactgggagagcccataatactgcgtctgtccgcttgccataaaaaatccctcctgtcctgactgggcccggcagatccggacccgctcaaaaccggagggaaaagctgttttgtgagacgtttcaatacaaattatggaagtaaagcaaaactgtgctcattttgccccgcctgtgcagggctcacgggcattttttgaggggagtgctgggatacggcccgatgaggacatcggaccccgcaaaaagggaggcatctgtggacgcagatacctcccttcttgatgagacagtcggggaataccgcccgcaggccggccccgcccactgcgagcccgacgaagcgggatgcagtgggaaagaaaggacagcaaaacgagcgtaccctgacttataaaataagtcggagcaagcgatacaaaacttgctccgacgtggaagggacggttaaaatctgggctatagagatgtcagaccggtcttctgaccggcggcgctgatgcgccgtaaattcgcaggtccgcaggactaaacaattgcgcagggagggctttgaacgacagagcatcgaaatgccaaagggagcggcacccaaaaagaaagacacgacaaaagtcgtgtctttctttttggtgcgcgaggcgggacttgaacccgcacgtgcgtaatgcacactagaacctgaatctagcgagtctgccaattccaccactcgcgcatattggcggcacacagaaaacgctcagtgcaggtgatatattagcataacttggtcctgctgtcaacactttttgcggaaaaacgtcagccgaaatgaaaaaagatgggtgcataaagagaggagcagtacaataaaaatgattgacagagcgtggtcccgcgtggtaagctagataaacatataagggagtagtcggcgcgccgcgcggcagagtcaacaaactggaggaaagtcctcctggctctgcatgaaacgatgagacttatctgtcgtggggacagataggtcttttcttttgcccgttccagggtcggggaggaccggctgcgtgtgaggaggaaccacaatatgagcctgtgggaattgtttgttattgcggtaggactgtctatggacgcctttgcagtggccatatgcaagggactttcggtggggcgggtcaggggaagccacgccgtgacggcaggaatctatttcggcggctttcagatgctgatgcctcttctgggctatctgctgggggtgcgctttcaagagatcatcgcaggagtggaccactggatcgccttcctcctgctggggctgatcggagcgaacatgatccgggagtcccggggcggggaagagcacgtggacagctccttccgcccccggtccatgctgcccctggcggtggccaccagcatcgacgcactggcggtgggagtgaccttcgcctttctgcgggtggagatcgggccggccgtttcctgcatcggtgtcatcaccttcctgctgtcggcggcgggcgtgtatatcggcggagcttttggggaccgcttccagggcaaagcggagcttgccggcggggtgatcctggtcctgatggggagcaagattctgctggagcatctggggttccttggctgaggggagagaaagacaggctccattcttgtacagggaagcataatgtggtatagtggtcctgacagcggcgctccgcgtgctgtgtgaaggcggggcggcttctgaactgggaaatggagtgtggagagtatgaaaaaaatactgagcagtcttcccgtccgtctgatcatcggcgtggtgatcggcatcatcatcggtctgggctctgcggacctgtggatcggaggcaccgacgtgggcggcacgatcatgcaggtggtactgacgctgaaaaacctgctgggctcactgatcaatttctgtgtcccgctgatcatcatcggctttattgccccgtctatcacccgtctgcggagcaatgcctcccggatgctggtcctggcgctggcactggcctatacctcctcagtatgcgccgcactgatgtcaatgggggccggctacgccatcatccccggcctgtccatccagtcggcggcggaggggctgaggaaggcgccggagctgctgttcaacctggacatcgcgcccgtcatgtcggtgatgtccgcgctggtcttttctgtgctggtgggcctggcggccacctggacccgggccaaggtcatcacccaggtgctggaggagttccagcgggtggtgctggcggtggtctctcgggtggtgatccccatcctgcccttctttatcgcgggcaccttctgcgggctggcctatgagggcagcatcacccgccagctgcccgtcttcctcatcgtgatcctgatcgtgatggtgggacactacctctggctggcagttctgtatctgctggcggggctctactccggggagaagccctgggaggtcctgcgccactacgggcccgcctacctcaccgcggtgggcactatgtcctccgcggccaccctggccgtggccctggagggagcacggaagtccaaggtgctgcgccgggacatggtggacttcggcatccccctgtttgccaacatccacctgtgcggctcagtgctcaccgaggtgttcttcgtgatgacagtgtccaaggtgctctacggtgagctgccctccctgcccacaatgatcctcttctgcttcctgctgggtgtctttgcggtgggggcgcccggcgtgcccggcggcacggtgatggcctccctgggcctgatcatcagcgtagtgggcttcgacaatgacggcaccggcctgatgatgaccatctttgcgcttcaggacagctttggcaccgcctgcaacatcaccggagacggggcgctgaccctgatgctcactggatatgccaagaagcacaacattcaggaggcacctggaaatccgttggcctgacacaaaaaacagcgcgcgccggggggagtttccccggcgcgcgctgttttgttccggaaatgggctggaaccacaacgcccggcctgtgtaaacaggccgggcgttgtggagaagagaataagaagacaggaagcgaaagtaacaggggtccccttacttgaccgtctggagcaggtcgctggagcagcctgcccgcaggaggtagctgtcagtggtgtggcccagaatggtctgcacctttctggagatggccatcaccttgcgtacgtcgatgccggtggtgataccggactcgtcgcacatgtggatcacatcttcagaggagatgttgccggcagcaccggggacaaagggacagccgccaagaccgccaaaggaggtgtcaaaacgggtcatgccggcctccatggcggccatgatattggccatggcaacgccgcgggtgttgtggaagtggagccaccaagagacagtggggaatttggtgtggacatgggaacacatctcatagacctggttggggacgcccatgccagaggtatcggacagggagatctcggtgatgcccacgtccagatatgcatcgatgatggagtcgatctcggactgagggatgcggccgtcccagggggagccgaagggcatggaaatggagccggagacctcgatcccgtgctccgcggcggccttgacacagtcggcaaaaccggctacactctcctcaggagtcatattcagattcttcaggttgtgctcacggctggcggagacattcagcttcacctttttgcagccgcagtccgcggcgcgctggacgccccgcagattggggatcagagcgcggaactccacgccggggaattcattgaccagagccttgaacaggtcatccgtatctgccatctggggcacctttttggggtgcatgaaggagccgacctcgatcacggggaagccggcgtccaccaagtcccgcagaagggagagcttatcctcggtggagacgatggtcttttcgttctggaggccgtcgcgcaggcccacctcacagatggtgatttcagagggtagattcatcatagctggggaaacctccttgataatgccggcacggcggcgaggttttgtggaaaatgtgcgaaacgcctgccggatgccggaacattcattagcatcttatacgattatcatactgtattggtctccattattccaatataagttttacattaaactatggaaaatttcgatggttgaggcgcggcggcggaccgtcaaagagctccgcgccccttgccctggggttgccggcggcctggaagcgggaccaggaggggcttggagagccccaaaggggggaaatcgtcagacatcatggagaaataggggagcttaaataaagttgagcgatttgcacaatcgaaaaatttgcatgtccaaatccttaaaaaaaccaaggttcctgtatgggtgcacaattttgatagggtaaaactatacaaatgaaacaataaattgggatgagaagcgggtaaagcatgcgaagtattgatgaaattatgaagagttcgcagtagacgaatttgtagttttgaaataaaatgggagacaacgaaaagagggaattggtgatagtgccacaagggtgatatttccagtgccctctcctcatgtttgccgccgggattgtttatttttatggcagccatcggcgtgccggcccgggcgggcaggggggacggatgttcccgccgcctccagctcaaaggccgggaaacggcccctgcgggaccgaatacaatatgatattagaattcggaggaatgcagtatgtccagaaagttttcgttggcctatttgaccatccccggtaccgcccctgtggaccagatccgcatcgccaaggaggcggggtatgacttcgtcagcctgcgcaccatcccgatgcacctgcccggagagccggagttcctgctccacaaggacgccaagctgttcgaggagacccgccaggctctgaaggagtacgacatgcccgtgatggacatcgagctggcccgcgtccgccccgacctggacatcaacgagtatgaccccgcgtttgagaaggcagccgagctgggcgccaccgacgtgctgggcagcatctggacccgggacaaggcctactacatcgatcaggtggccaagatcgccgagatggccaagaagtacggcctgaagtataacgtggagttcctgccctgggccggtgtccgcaacctccaggaggccatcacgctggtggacactgtgaaggcggacaacctgtacatcatggtggacaccctccatgccggccgcgccggtgtcaccggtgccgagctggcccgcaccgatcccaaatacttcaacttcatccacctgtgcgacggccccgccgggcccgacggagaccccgtcctggacaacatcaaggacgagctgatgctcttcaccgcacgtgagggccgcctgtaccccggagagggtgccatggacatcgccggcatggtgaagggaatgcccgagatccccctgtccatcgagctgcccaacctgaagcggatcgaggagctgggtgtggccggccatgccaagcgctgcctggatactgccaaggcttactttaaggagcacggcatcgactgagtcctgccgtctgatatcaccgcaataaaacttttttgaagagaatgagagagggatcgttatgaagatcgacatcaacaccaaaatgatcaccctgctgggcaaacctctgggccagtctttcgccgcccggatgcagaacgccggttatgaggccgccggtctgaacatgctttacttctacaccgaggtggacaaggaccacttgggcgatgtggtcaacggcctgcgctacatgaactttgccggcttcgccgtgaccaagcccaacaaggtccgcgtgctgcgctacctggacgagctggaccccctgtgcaagaagatgggcgccagcaacaccgtggtcaagacccccgagggcaagctgatcggctacaataccgacggcgttggcttctacacctccctggtggaagagggcaagatcaacgtggaggagtccaccttcttctgcttcggtgccggcggcgccggccgtgctatgtgcagcgtgctggcctatcacggagccaagaagatctacatcaccgacttctatgagccctgcgctgagtccctggtcatggacatcaacgagaactttgcccctgtggctgagctggtccaccacggcgactacgccaagatcgctgagtgcaacgtggttatgaacgccagcggcatcggcatgggctccaccatcggccagactcccatgcccgtggagcacatccagcccggtcagttctattttgacgcctgctacaaccccgacaagacccagttcctgctcaacgcggaggagaagggctgccaggtgctcaacggtctgggcatgtccctgtatcagggcgccgcacagatcgaactgtggactggcgagaaagcccctgtggaagccatgcgcaaggagctcatggacatcctggcggagagcaagtaaggaccccccatctgcgctgtgcgctgttttgaatgagaagacaagaagagagagaggaggaaaccacgcattggggtatttccgcattccggggggagaagagatcgggatgcggagcagtccggccccccgccggacatgtctgccgccggaaacagcccggtgaaagacgttgtaagtagtaaagaggaggtaaaacatgaaagtcatcaaatggctggatgagcactttgaagagaccttcctggtctttttcctggtcctcatctcctgcatcaccatgctgcagatcatcgccagaaccttcttcgccgcgctttcctggccggaggagttctgccgctactgctggatctggagcgtgttcatttccctgccctacaccatgcgcaagggcaacatgctgcgcgtgaacgtgctggtggacctgctgcccaccaaggcccgcaacgcgatcaacatcgtgatcgatctcatcaacactgtggtgatggcgctgttcttctatggatccatcaccgtgatccaaaacgccctgaacagcggccgtacctctcccgccatggagctgcccatggccgctgtgtacatctgcctgctgatcggcttcggcctgggcttcatccgcggcatccagcaggtcgtgcttcatatcatgaacttcaataagaaggaactgaccactctggagcaggctatggcggacgccgccgaggaggccgccgcggccaagggtgatctggaaggaggcgcgaactaatggcagcattaatggtatttatcgtatttctgatcgcaatcgccgtgtccgtgcccattggcgtggccatgtgcctgggcaccctgttcccccagtattttatgaacgccggagcaccggtggaccagctgatcaacttcacgctgtccggcgctgactccactcccatcctggcggtgcctctgttcatcctgggcggcgtcatcatggcagagggcggcatctcccgccggctgttcaacttcttctcctacttcgtaggaaacatccccggcggtgtgccctgcgcggccatcctgacctgcctgttctacggcgccatctccggttccggcccggccaccaccgccgccgtcggctccatgtgcatccccttcatggtggaaatgggctatgagaagcgctggagcgccggcctgatcgccgtggccggcggcctgggcgtcatcattccgccctccatccccttcgtgctctactccctggccaccggcgtttccaccggcgacctgttcctggccggcgtcatccccggcatcctgatcggcctgttcatgatggcctatgcggtgattttctgcatcaccaagggcgaggacaagcagcgcatccgcgccaagatgtccgagctgcggggcaacggcttcctgaagctgtttgctgacagcttcttcgccctgctgtgccccatcatcgtgctgggcggcatctactccggcatcgtcacccccactgaggcggcctgcgtgtccgtgttctacgctctgttcgtctccctggtggtgtaccgctccatctctttgaaggacctgatccccttcctggccagctctgtcaagacttacggcggcctggctttcgtgctggcttttgccaccgctttcggccgcgtgctgtccctgacccgcgccaccaaggtgatcgaggacttcatcgtgggcaacttcaccacttcctggagcgtcctgtctgtcctggtcatcctgttcctgatcctgggcatggtcatggataccggccccgccatcgtcatcctggcccccatcctgctgcccgctgtgcaggccctgggcgtggactccgtccacttcggcgtcatcctggtgtgctgtctgtccatcggcctggccacgcctcccttcggcctggacctgttcgtggccggaaacctggcggaggagccgcccatggctgtggccaagcgggcggtccccttcatcatctccttcctactggccctggctctcatcacttatgtggagccggtcagcctggcgctgttgggccgctgaccactgacttcggttcacccttgacccggtcggcccttggccggtcgggcaagtgaacaaataaaacataccatttaagaggaggaaacaaacatgaagaaatttgcagctcttgtcctggctggcgccatgactctgggcctggccgcctgcggcggcggcaacaccagcacccccgatgccagcacccctgctaccagcacccccgctgctagcaccggttctgactacgccagcctggaccccgtggtcctgcgcggcgctgactccgccggcgtgggcgccgctgcccagcagctgggtgagctggttgccgagaaggtggacgccatcactggcggccagctgaccgttgagtactatcccaacagcgagatgggcggcgacatggatatccagcagcagatgctggacggcaccctggactatgtggtgctgcagaccgctcccaccgtctccttcgtgcccgccgtggccgtgttcgatctgcccatggtcttcgctcagtatgacggcgacaccatcgaccaggtgctgaacggcgatgacagcgagttcctgaaggccattgcccccaagtatgaagagaagaacatgaagatcctgggctacctgcagaacgccacttaccgtctgaccacttccaatgtgaagctggacactctggatgcgttcaagggcctgcagattcgcaccatggagaaccagaaccacatggctttctggtctgctctgggcgctgcccccactcctctggcctggcctgaggtgtacatctccctgcagaacggcaccatcgacgctcaggagaacgccgctgatacctgcatgacctccaacttccaggaggtccagaagtatctgaacttcaccaaccacatcctgtacctgaaccagatcatcatcaacaatgacaagttcaacagcctggaccccctgtatcaggatgccctgactcaggccgtggaggaagccattgctgagctgcgtcccgctctgaccgagctggataagagcagcaaggacactctggctgccggcggcatggagatggtggagtacgctcccgagttctatgacgagatcctgaacctgcagggcgtgcaggatctgtacaccaagatcgacggcgaggtcgacggtctgggtaccatcctgcaggacgagctggccgctgttgccggggcctgatccccagctgcggacaagcgcgtacccatgaatttcaaacgggccggcgccccagcggcgccggtccgtttcttcctttgggttgccccgtgggtctgctcccggcagagaaatattccggaggcggtcccatgcgtccagccagatctgatccgctgaaagactgctgtgttttggagaggagcgtttctatggagctgctgaagaaaagctgggcatttctgcttctgtttgtcaccttcttcttctgggggagcgtgtacgtgggggggaagctgatctctgacgatgtgcccgcccccctgctgggctgcctgcggtgttttgtggcctcatttcccctgatgctcatggcccggaagcacttcggcgtgaagatcgaccgggcggactggaaatactttgccggggtgggggtcatgggctatttcctcaccatcttcctcatccagctggggatctccctcaccggggcctccatggcctccctggtcaactcggtgacaccagtgggggtcaccatcttcgctgccctccacctgaaggaaaagatcacccccaccaaggtgctgtgtctggtgctggcactggtgggcaccttcgtcatcaccaccggcgccaccggccagggggagatggcgggcatcctggtggtgctggcggcagtggtcacctggagcgtggcctctgtcttcatgcgccagctcaccgccaagtatccccccattctggtcacagcctacggcatggtcatcagtctgattttccacatccccacgggggtggcggccgcggtgcaggcagggggcaccggcctgagctccgccaacatcctggtggtgctctatctggggctggtgggctccgggctggcccagtacacctggacggccagtctggccgagctgcctgccagcacctgctccctcttttatcctctccagcccatgttctctgccctgctgggcatgctgctgctgaacgagactttcaccccctccttcctggtgggattggtgctcatctccgctgatgtcatcctcagcaccctggagacccgcaagctggcaaagcaggcgcaggccgggtcagaccgataagatatgctttttctgtcccgaactgaaaaatatatttgattttttcatcgaattatggcataattgaatcaatatattaagatccgggacagaaagggggagcgccgtatgaatttacggcagctgcaatatttcaagaccatcgccgagctggagcactacacccgggcggcggaaaagctgtatgtcagtcagtccaacctgagccactccattcaggagctggaggacgagctgaatgtggaattttttgttcgaaagggacgcaacatcaaactgaccaaatatggggagctgttcctcccctatgtctcccaggccctgaacctgctggacaccggagtggcccgcctccaggactatatcaaccccaacaccggcacggtggttatggcctgtttcccctccctggcggagttcgcgcccgagctgatcgtgcgctatttatccgagaccaaccgggtgggggtgcgcctccagttcaaccaggaggccaccttcatgcagctgcgggacaagctgctggccggggagatcgacttggtcttctgcaccaaaatcgacgacccccgggtagaaggggccctcatcggcgaacaccagatcgtcctgttggtcccggagagccaccggctggctcagcgggagtcggtggacctgcgggagctggacggggagcccttcatctctttcgacaacaactgccagttgcgctctgtcaccgacgagctgttccagagcctgggcatccagcccaagatcaccatggagacagcccaagacgttatcatgtacggaatggtagccgccaatcacggcgtcgctatcgttcccaggcccctgggcgggaccccctacaatgtgaaggtgctgcccatcgaaaacgagatccctacgcggaagctgtatatccagtggaacaaggagcagtatatgccccccgccgccgaatatttccgggattttattatccgcagcggcctgatcttcaaccacttcttggagcggcacaatctgaaagagggctcctgaagcgaaatgaccggacaaaagacttggccggcctgtcccacctcgggcaggccggccttttttggcacatcccatgcaggaatttgaacaatgaatgaaaactagctatttgacaaataagagggaatatactattctttgtatggtagtagtagacagaaaaaagagagatgccctgcggctgttgctgaaaaatagccaaagtggaaggattaaaaatttcccttgatctatgaattgattccataggaaatgagggagaggccgccgggcaggaacactgtttgggagaagcgggcgaaagcctgataagagattgctgatccaaaaaaatgatatggaggatttcacacaatgagcaagaaactggtatctgacctgctggtagactacctggagcgccggggcgtcaccaagctgttcggactgtgcggccacaccgtcatcggcatgctggacgccctttcccgcagcaagaagatcgagtacatcggcacccggcatgaggccgtggcttccaccgcggctgacggctacgcccgcatcacccataaggcctccgtggtcatgtgccacctgggccccggcctgaccaacgtgctcaccggcgtggccaacgcctccctggactccatccccatggtggtcatcgcgggcgatgtgcccagctactacttcggccgtcatccccatcaggagatccagatgcatgaggacggcgaccagtacagcatgctcaagcccgtgtgcaagcgcagctggcgcgtggacgacgtggaggccctgccctacatcctggacaaggcattccgtctggctgaggccggccgtcccggccccgtcctggtggacgtgcccatggacatgttctcccgtgagatggaggaggagctgtgggcccgcacctacaaggacagccatgtgaccatgaagcccgccctggaccccgctgccgccaaggccatcgccaagaagctggtggaggccaagaaccccgtcctccacgccggcggcggcatcctgctggctcaggcctccgaggagctggccgctctggccgagttcctggatctccctgtgtcccgcactctggccggccagggctgcctgtccgaccagcaccccctgatgatcggccagaccggcttctggggcctggagttcacccactccctgaccaccaatgccgacgtgatcctgggcctgggcacccgcttcggcgaggccgacagctccagctggtatcagggcgtcaccttcgatcccgataagaccaccttcctgcagatcgacatcgaccccaacgagatcggccgcaactacgctgtggagatcggcgccatcggcgacctgaagatcggcctggcccagatcctggaggaagtgaagaagatctgccccgagggcaagagcaaccccgagctgcgtgagcagatcgctgccgccaaggccgcgttcaaggccagcaacgaggccatctccaacgacggccgcttccccatgactccccagcgcatcctgaaggacgtgaaggaggtcatccccgaggacgccatcattttcaccgatgtgggctggaacaagaacggcgtggcccaggagttcgatatcaccgttcctggcaccatccaccactcctccggtctggctaccatgggcttcggcgcttccgccgtcctgggcggcaagctggctgcccccgataagatcgtgctgaccctcaccggcgacggcggcttcggcgtcaaccccacctgcatggctactgccgtggagaagggcatcgcctgcacctgggtggtcatgaacaactccgctttcggcaccatcgccggcctggagaacgccaactacaagaccaagttcggcactgtgttccacactcccgatggggagtcctacagcccctgctgggccgacgtggccaaggcctacggcgtggactccatccgctgctctaccgccgacgagttcaagcccgccctggagaaggccatcgaggccaacaaggccggcaagcccttcctggtggaggcccccatggagaacatcgtggtgcccacccccggctgctggaacatcaatgacatttacagccccaacgagttggtcaaggagggcaagctggtcaagaaggagaacggccagtacgtcgcccccagccactccaagtcccacaacgcctaagtttgccccgcacttccttcttgtgtgtgttttttcagagaaatgccgccccacttggggcggcatttctcgtctttctagaaaagggcgcagagaatgtaaaaaattgagaccacagattggacggccggaagttgcggctaatttccttgacaccccatctccgtgggggtacaatatctcacaacaggacatatgaaggcagctttgcaggccggaccggggaaggggccggcctgcggaagtggaggaagttcagatatggcaaaacatgtaaagcggtcggtggtccccatctatctggtgggtgcggtctggctggcctatgcgctgctgttcccactgtaccagccggtccattacctgctgtgcggggcgctgtcggcggcggccttcatcgtggggaagggactcttccccaataaggtgtatgaggtgcccggagagccggaggagaacaaacaggaggagcccgagaagaaggaacctcctaaaagtaccggcgatccggagatcgacgccctcatcaaagagcgggaccgggcggtgggtgagatgcgccgcctcaacgacagcatcgaggacgaggggatatccgcccagatcgatcatctggaggaggtcacccggaagatcatcgacctggtggtgaagcagcctaaaaagctgccccagatccgccggtttctggattactatctgcccaccaccctgaagatcctgaatgcctatgaccgtatggatgcggccggcatctcgggggaaaatatcgacgccaccaagaagaaggtggagcagatgatggctaccatctcccaggcttttgacaggcagctggacgccctgttcggggatgaggcactggacatctctaccgatatcaccgtcatggagcagatgctccagcgggaggggctgggcggccagaagaaggacggagacggaggcgtgaccctggagctgtgagccgagaagagtgggggaggccgtggaacaggtggagaaactgatcatggggcgatggagatggccgtgctgacgggatatgacttctggaaagcggggaccgaggtcccgtgatatctaggacaatgagatcagaaacgtgacgatacaggaggaaacgacaatgagcgacaatctggatatgacccctcagctgactctgacgccggaggcggacaccgctgcggccgcggcaccggccgccccggaggcccccaccttgaccctcgagcctgcagcggcggacccggctgacgaggccgcagcccagaaggagcgggacgctcacgccgtcaagctggatgagagccagctcacggaggcggaacggaagatggtggatgagttctcccagaagatcgacatcaccgactccagcgtggtgctccagtacggcgccgccgcccagaagaacatcgccggcttctcggaaaacgcactgaacaacgtgcggaccaaggatctaggcgaggtaggggaggccctgtcctctctagtggtggaactgaagggcttcggcaaggaggaagacgagggcggcttcctgggcttcttcaaaaagaagcgggataaactggaggccatgaagacgagctacgccaaggccgaggtcaacgtggacaagatcgtgcgggtgctggagaaccaccaggtggtgctgatgaaggacatcgccatgttggaccagatgtatgacctcaacaccaaatactacaaagagctgactatgtatatcatcgcggggaaaaagcggctggagcatgtccgggcccacgacttggaggagctgaagaagaaggccgccgagaccggggcccaggaggacgcacagaaatacaacgactatgccaacctgtgtaaccgctttgagaagaagctccacgatttggagctcacccggatgatctccatccagatgggccctcagactcggctgatccagaacaacgacaccctgatgctggagaagatccagtcctccctggtcaacaccatccccctgtggaagagccagatggtgctggccctggggctggagcacagccgccaggccacggccgcccagtccgcagttaccgacatgaccaaccagctgctccagaagaacgcggacctgttgaagatgggcactatcgagaccgcccgggaatctgagcgctccgtggtggatatccagaccctccagcacaccaaccagcagctgatttccaccctggacgaggtgatgaagatccagcaggagggcagccagaagcggaaggaggccgagctggagctgggccgcattgagggcgagctgaagcagaagctgctggagctgagaggctgaggccggcggtcctgtcccgctgcgtgaggtgaaacgatgaactttttgaaaaagacttgggtggccatagcgctgactgtgatcatggtcgtggcggctatcggcgtgggtcagctgcgggctcccgtccccggactgcccacagacacatccaacagtgcctccggcgcgctggacacctccctgtccacgtcggagtatgacacctggatctcagatcaggccggggtgctgtcctcctccgcagaggagcagatcagcctctataacgccaactgggactatcggtacaacagtctgatcgccgtactgatggtggacagcctggatgggcaggacatcgaaagctatgcttacgaccaggggacccagatcggcctgggccagggcgacgccctgctggtggctgcggtggatgacgagctctattacgtggctacaggcaacgacttctccaccatcctgaccagcagtgtgacttcccggctggatgggatgctttccagcaacttcggtgcccagcgctttgaagagggtgtgctgtccttctttgcggagatgaaccaggtatatatagacaacttcggactgggcaacgccggagggggagggagctaccaggtcaatgagcggaccatgggggtgatctccctgctggtccttctggtggcggccctgatggtgctctccgccatcgaccgggcgcgctacaacagctaccgggcacgtttttatggggtggcctccccaccctatgtgttccggcctatcctcttctggcatggtccgggatacggctggtaccggcgccattggcaccgtcctccgccgccaccgcccggaggtccgagagggcccagaggaccaggtgaccccggtggatttggcgggatcggcggcggcagccgtccgcggagcggaggatcacgtggcggcggatttggcggcagcggtggtttcggaggctccttcggcggcagccgcggcggaggcttcggcggttcccgcggcggaggctttggtgggagcttcggcggtcgtggcggaagcttcggtggccgcggcggaggattcggaggtggctttggcggcggcggtggccgcggcggcggatttggcggccggtgagtgctgaacagcagaatgacccgtcccgccgtcaccggtccgcgtctggctggtccccagcatgggcggggcttcctcccaagagggccggagacccggccagggcccagaggacctgaaagaaatgcaagcagacagccccttaaggggccctgaaaagtttgggatctctccccttttcgggcctcttaaggggcgctttttatgcctgcggcctgtaaggagacaaaaagcagaaaatgaatgttgcgattatgttgctattatataaaaattagtgaaaatattgtgaactaaatcaattgaattttggagcccgactttctataatgagatcataccactccggcaaaaaataaaagctgaggagagatgaacatgggcgaagaaaaaagtaatgttgtcattacagaggaaggagcactcagcgtgaagaagctgaccttctgggaagcagctatgatcatcgtgggtgcaaatatcggagccggtattttaggactggcttattcctcccggaaggccggatggcctatcctgctgatgtggcttattatcgcgggggtatttacgacggtctccatgctgtatgtggctgagactaccctccgcacgaaaaagcccatgcagctgccggggctggcagaacgatatgtgggaaaattgggggcggtactggtctttatttctgtgtgcgccaactccattggttgcatgatctcctataccagcggcagcggagaaattttggctgagctgctggggatctcccccacacttggaagcctgatctttactgtgccggccgtagtagtagtgtggctgggactgaaagcaaccggcctggcagaaaaatttatcagtaccggcatgatcgttttgctggccgttattatcggggtctccttcttatctgggaaagcggatatcagccaggcgatctacaccaactggacctatgcggtgcctgtgttcaacgtggcgatcttctgctatatcgcccagtatgcagtccctgaactggcccgcggcctgcggcataatgctcgcgcactgcccaaagcggtcaccatcggcatgctgatcaccgggatactgctggcgctggtccctctggctgtcatttcccttactggaccggacaatgtcacggaggtagcgacgctcgcctggggccaggcgctgggcagctgggcaatgtttgtagccaacatttttgccctgtgcgccatgatgacctcttactgggcagtgggcggctctatgctgacgaacattgtggacatgttcaagttcaagagcgagaatcatgtgccgacccgcctgatctcgctggcatgtgtggctctgcctccattcattttagcttacagcggcttggtcagctttgtagacgccatttacctggctgggaccttcggtggtgtcattatgtccattctgcctgcgctgatggtaaacagtgcccggaaaaacggcgacatggagccgccctggaagtgcggctggtactctgcgcggtgggtccaggtgctcatcatcacgctcttctgtgcggcagccctctatgcggttttggatctggtggggatcctgccctcaggctggtaaaagagggaggaaaatgcaatgcgtgtcattcccaaagacaaagtgatcttcagcttcaatgcggagcatccctgtcaatatagcgtcgaggatggggagaccttctgggtggagacagatgactgttacagcggccagatcacagacgcctcggtaaagcgtccggatatcgatatcacgatcatggactgctctgttgggccgatcgaggtgcggggtgccaagccgggagataccctgtgtgtggagatcctggccattgagctcggcagacagggggttatggtgacctcaaagggattgggcgtactgggggaccggatcacagaggctgacactaaggtgattcccattgaggatggatttgcctgcttttctgacaagatccgtctcccattgaccccaatggtgggcgtgtgcggggtagcccccagacctgggctggatatccactgtgcagtgccgggggatcacggctctaatatggatacgaagatggtgaaggcgggggcccgtgtctatcttcctgtgtcggtcccaggagccggcctggcagtgggggacctgcacgcctgtatgggtgacggggaattaagcgggaccgggatcgagacacccggccggatctgtctcaaaaccacgctttacaaggaccggccggtgagcagaccggtcatcgagacagtggaagccctctattttacagcatccgctgtgactttggacgatgctattcgattggcggtatctgatacagttgcctttctggagaaaaaactgaaactggattttccggatgcataccgtttgctaagtgcgacttgtgacattcagatcagtcaggtagtcaatgatttgaagacagtccgggtccgctgccccaaatttgatacagggatccccacgctgtgaggcgcggccaatgtccagacagcccctgatcgggggctgtctggcatttttgcacttatacgtccggcttgaacgcttcagcgttccatgatatactgactttgacccggttagaaaggggggaggtgggcctgtgctcggtaagataaggcggatgtgtcccctctgctggcaggacagcgtgattttagtggtgaccatggcggtggtattggacctgggtctgctgctccagcccgtaggggcggatgactgccatgcagccttgctttttgtgacaggtgtcttggtggtggcccgttctaccaatggatatttttatgggatgacggcgagcctgatcgccgcagtggtcgtgaattatgcctttatggaaccctattaccggtttgagctgcggggggctggttacccattcacatttgtcacactgtttagtgtctctatcgtgaccagcgcgcttactacccatatcaaagagcaggaggaggcccagatcgaggcggagcgggagcgactgcgcgccaatctgctccgggcagtggggcatgacctgcggactccgctgacttccatcatcggatcagcagaggcgatcctcagtccgggaaattgtctgagcgatgaggagaacaggaccctgctccgcaatgtgtgcagtgaagcagagtggatgatccgtatggtagaaaatttattgtctatcacccgtgtaggcggggcgtcttaccacttgaaaaagagtccggagatgccagaggaagtagtgggtgaggtaatggaaaaattccaaaagcacttccccaataccacagtggaagtagaggtgcctgacgtcctgctggaagtgcctatggatgcgatgctgatcgagcaggtgctatacaacctgatggaaaatgcggtgatccatgggatggcggagaagatccggattcgggtagatgcgggaaagcactgggtccgtttttctgtcagtgacgacggggcggggatcccgcaggaaaagttggagcatctatgcggggactatatggaattggcagataccagttctggagataaaaaacacaatatgggcattgggctgatcgtctgccgcgatattatcaaggtgcacggaggaaattttgaaggcagaaatcagctggagggaggcacggagttttggttcacgcttcccttaaaggaggaacggcagtatggcggtcataaaggataaaattttagtgatcgaagatgaaaaaagtatcaactatctgatcggaacggtcctgacagccaatggatatgatgtcatcaaggcctataccggaacagaggcgtgtcagatgcttgacgcctactgccctgacttgattattctggatctggggctcccagatatggatggagtggatatcatccgacgtattcgagggtggagcgttgttccaattatagtggtatctgccaggaccagagaacgagacaagatcgaagcattggatcttggcgcggacgactatctgaccaaacctttcggcggaggagaactgctggcgcgtatccgcaccgctctgcgccataccaggacgcaagccgccgatcctggattggcgcgtacagggatctaccggtgtggccggctgcgagtcgattttgacagccatctggtatggctgggagaagagaacgtgcatctgactcagagtgagtataggatcgttgctctgttgacccaatatgccggaaaagttttgacatatgattttatcattcgagagatctgggggccgaatgctgtaggagatactcaaaatctgcgggccaatatggcaaagatccgtcgcaaactagaaaagaacccggcgaaaccccagtatatttttactgaggtaggtgtgggttaccacatggcagaaggagattgaggtcccttgcaaatgaaaaacagcatattataattgtaagagctccaatcatattcttgacaaaaagcgcgatgtctaccaaaagtctaccaaaaaagggcggcgggagcctggagtttcagggcctcgccgcccctcctgttttcatgtgtctaccaaatgtctaccagggaaactttttgggtagaatctcatggatttttccattaatcttcccctttttataaccaattcctcctgtgtcagaagtgttgtacaggcatagtgggccgaaatgttctggaaaaggcccggtttgtcagaaaacagcgacttttgccaatataaaaaggaggaatatccaatgagaaacctgaagcgtgctctcagcctggctctggcttccgttatgctcctgggcatgatggtcgtgggctccagcgctaagggtatcgacgatttcaccgacaaggccgagatcgtcaatcaggatgccgtggcggtcacctctgccatcggcatgttcgagggctacgaggacgggtccttcggccccgagaacgtagtcacccgcgccgagatggcggtcatcatctgcaccatgctgtatggcgccggtgtgaacgtcaaccagttcgcggagaccaatgtgttcaccgacgtccccgcctgggcggagggctatgtgaacctgtgctccagcctgggcatcgtggccggcgtgggcgacggcaagttcgaccccaacgccaccgtgaccaccgcgcaggccgtgctgatgctgtgccgcgccctgggctacttccagaacgccgctgacttcggcgacaactggatgctggccgccaccgccaagggcaccgctctgggcctgtacggcgacctgaagctggccgccaacgagggtctgacccgcgacaacgtggctgagctggtgttcaacgccctgaccaaggccgtgcctgttcagtacaatgagctgctgggcgtgtactacaacgagaacaagggtatcctgtactccctgacctactactacaccgataccctgggctacaagaacttcgacctggtctacaagaccaacgagaacaccgattacggccgtcccggcaccacctggggcatcggctcctatcggatggacggcaacccctccggcgagggcaacaaggaaggcgttctgaatgaggacggctccctgatccccgagcgggtgaagatgacctccgatgatgagatcatcactgtggccgacacccccgacttcacctacaccgccaataccaaggagaacgtgatctacaaggccgttggcaagagcgtggtggacgattacacctggaatgtctatgtggacggcgatgagcaggctgatcctgcgatccctgacaacgacaaggacaccgactacgcctacactgccaagggcgctaccaccgagatctatgtggacgacgtgaacgacaccgtcaccgtggtcatgatcaaccactacatggccgaggtcaccaaggtcaaggacggcgaaaacaccgtccgcgtgctcagcaacaagaccatgaccaaccccatcgacgagcgcaccatcatcgctgacggctttgccaagggcgactatgtggtggtcaccgtggacgtgaacgacgatgatgactccttcatcgcctccatcgctgatcccgaggctgtcgagggcaccgtgacccgcgtcagcaaggactccgaccccgagggcaaccagggcagctatgtgaagatggacgatggcagcaagcacacctattccaagtacaccgcgtccgacctggacgacatcaatgaggagcatcccactctggacatctcctaccgtctgtatctggaccccaacggctatgtgatcggctttaaggctctggagggttactacgacaactacctgtatgtgcaggatgctgacgtgtccctgagcaccatcaccgccaaggtggtcttcaccgacggcaccgccaagaccgtggagatcgacgacgagtatgtcgctctgagctccagcaacaccaagttcgacaccaataacgacggcaagatccagggtgccgagatcaccgccgctgtcaccctgctggccggcaacgtctttgcctacactgaggacaacggcgtctacaccctgcgtcagatcgtgaatatgaacgctacccgtcccagcaccaaccgctacaaggacacccaggacaaggctgaggatactggcgccgggactgtgaccatcaacaacgacgccgcctacatcaaggcgaacggcacctcctacatcgtggacgagcagactgcctttgtggatgtggacgagaagactctctacactggcttcgagaacgtgcctgactaccgcaacggcaccggcaccgactatgtgaagttctgggccatcgacagcaccgatgacggcgttctggacgctgtgttcatctatggcggcgtggcctccaacagcaacaagacttacttctatgtgaaggatgccggcgacttcgagacctacgacaagaacaagacctacaaggagcacaacgtctacgtggacggcgagcccactgccatggtcttcacccagagcgcccacaacagcgtcaacgccaagggtgtctactgcgttgagaccaccaacggcgacggcatcgtcacctccgtgacctacatcggcaccaacaccaatggcgtccagcaggcttacaccaacgatggtgtcaacaatgacttctacaccgtgaaggccgttggctcccgcagcttctccctgaacgacgccaaccaggagcagctgactgtgaacaacgagaccgtctatgttctggccacctatgacctgaaggacaacaagagcacctataaggctccctctgtgggcgacggttctctggatgacctgaaggaggatgtgaagaacgacggcgactacttcacctatgtctatgttgccaagacttccaacgatggcaagaccgctgacctgatcttcatcgagcagtgggagaagaagcccaccgtttactccactgtgaactacagcgccgtgcccggcactaccctgactgtgaccgctaacggccagcccgttgccagcggtgacaaggtcgccaacggcactgctctgaccatcactgccactgctaccgatgccgccaactacgatgtcactgtgaaggatcaggccgggaacactgtgaccagcccctacactgtgaacgggaatgtcaccctgaccaccgtcctgactgagaaggataagtccgtgaaggtggatctggtgttcaaccaggatgccatcgtgaccatcgacggcaaggagtacctggccgatcaggagatcagcctgctccccggcacctatgacttcgaggctgtgtatgcgggcggcgttcctgcctatgctcaggccgtcgtgggcgacacgaatgtcagtgtgaagacttacggttccgctgaaaagctgatcgttaccgccgccggcactctgaccgttggcaaggagactgttgcgctgaccctgcctgccaacgtggaagccacctttgacggaaataccgttaacgatggtgcctccgctggcggtaccttccaggtcctgaagaatgccgttgttactctgggcgggaccgctctgggcgagttctacactctggacaatggcgccaactacaaggctaagggtgatacctttaccgctgacggagacctgactgttgacgctggttactacagtgtgactaaggccgcgaacgccaccaacgccggtaccaacggcggtgtgttctccatgagtgtggataaggagttcgcgaaggatactgacactgtcaaagtgactgttaccgtggtcactgcgtccactgacaacagtggaaacagtggtaccgatggtgctaccgtgaccctgggtggcggtacgatcacccccactactctggacttcggtggtgctgatgccgccggtacggagaagacggcgacgctgaccatgggcaccagcaatgtcactctgaccatgtctgcggctgataaggtctaatttcccaaacactgttcgggatcaaggatctgaacacagacccccgggccaatcggcccgggggtctcagcttgtggaaagagccctcctgcaaaagattccatcatccgcgggcgacggagtaaagtttgatcctgcttgaaaaagtggctccgccactttttggcggattcaatttccgcggactaacgtcccagaaatatagagaaaaattagaggtcatcttttcaacccatacagggcgaattccgagcctggagcgcagagagtgccgtcctttgggacaaactggacgctggagaggctctcccagtcggcccccaccagagccgcactgtctgaaccattcatgaccgccttggaacagtaccaaacatggcagggcagacggtccgcggcaccggggataaaaaaccactccgcgaatcccacggcaaaaagagagttggtaaaggagagatacaggccgtctgtcctgttgatcccccctgtgtcatactggcccgaactgacctggttcatccgcaggataacattacccagagctgagacgccgcagatgtggaaatggagccgcagctggcggaaacggcttttgtcgatctccgggaagctcaaactgatcagactgctttcctctgtcacagaccattcccccagcctgacccagcagttttcgctccgcagggccgccgtgtctgcctcgtgggactggctcagggccctgatctgggcggccagctccgtcttgtcggcctttccgctctccagggcggagatgcgcccctccgccgccgagagggcggtcttgtcagccttctgctccaccacggtggacaggctgtccactgcagatctgtcggccttctggcccgcctgctccgccagggcgcggagcgccccgtccaccctggcgttgtcggagttgaagtccacccgctccaccttgtccgcggcctcccactgggagagcccataatactgcgtctgtccgcttgccataaaaaatccctcctgtcctgactgggcccggcagatccggacccgctcaaaaccggagggaaaagctgttttgtgagacgtttcaatacaaattatggaagtgaagcggaactgtgctcatttcacccgtgcagggcggactcctgttccatggcggtgaagaaggggacgccgagatggctgtaaaaggccagatagatgatgatatccctgggtgcgtggatgtcgccgatctcagcgccgatgtacttgcccaccaatcccctggcgaccaggatgtcccagcactggttggacagacgctcaatgcttttcgagatggtttttaccgactgcggctccccgtttttgccacagagcagcacagccaccggagaataaatgtcccgtgtgaagtggagctcatcgatggtctgtctgtgggtgaacagcagctctgcggcaatgtccacagcacgggccaaggggcgggtgtcgatcccggcagccccgaaaatagagcggataacagtttctgttttcgtcataaagacccatccttttcctgaaatatgcttttatcataaagtaaatcccgggaaacagatggtaagagacataaaacgacaaaaatcctcgcaatttcgcctccccaaaagacactttcggaagagagttggggctatggaggagcgcgggatatggagagcgacccggcagaaaaataccccgtcgtttgtcacgccgtactggggcgccgcgccctgcctgcggcgggggggggccacatgacgaaagggtcccctgaacttttccatagaagccgccttttggaacagatagggccgacggcctcactgtttggacggaacaaaaaagcccggtgacggagcgctcccgcgcctccgtcaccaggccctgtcaaaacagttacttttcgtcgcacacctggaagatataaaatttcagataataggagtcgtctgccgcccacaggatgggatggtcgggcgactgagtgcggtattccacctgccgcaggcgcttgtggacgttccgcgccgcctgaccgatggtctgggtgaacagctcatagtccatgaagtgggagcaggagcaggtggccagaaagcccccgtcccggaccagcttcatggcccgcaggttgatctcccggtatcccttgaccgcctttttcaccgagctgcgggactttgtgaacgcaggcgggtccaggatcaccacatcgaattgctccccctgctgctccagctgggggagcaggtcgaacacatccgcgcagaggaactccacccggtcctccagcccgttgagggccgcgttctccctggcctgggccaccccaagctcggaggcgtccaccccaatgacgtgctccgccccgcagataccggcgttgagggcgaaggagcccgtatgggtgaagcagtccagcacccgggcgccccggcagagccgccccaccgcctggcggttatacttctggtccaggaagaagccggtcttctggccgtccttcacatccacgaagtagcggaccccgttctccacgatctccaccttggtgtcaaagggagcccccaggaagcccttgtaccgttccatcccctcctggaggcggaccttggcgtcgctgcgctcatagacgccccggatggcgatgccgtcctgggccagcagctccttcagcagctccacgatggtgaccttgaagcggtcgatgcccagagctagggactctaccaccagcacgtcggagaacttgtccaccaccagccccggcaggaagtccgcctccccgaaaaccaggcggcagctgctggtgtccaccacctttttccggtactcccaggcgtttttcagccgcatgaggaagaaatcctcgttgatctccgcgtccgggtcccgggtgagcatccgaacggtaagcttggagcgccggttcagaaagccctggcccagcggccagccgttctcgccgcagacccggaccaggccgccgtcctccgcccccggcgagatatccgcgatctcattgtcatagatccaggggccgcctttctgcaggtaccgtccctctccctttttcagtgtcacaacagcgtctgtcataaaagttcctcctgcccagagggggcattttctgttttaaggcattgcttccgaggcgcgccggtgtccgtcatttcattttcccgcgcaaaaggtctttgccttttaccactcaaaatagtcgctcacttgtgttaaatgaaatacaaatacccggcgtagcataccattttcatctggctgtacattttggtgcatctctgttaggcggtactctcccacaaaatacattgctttatctttcttttcaaaaacaagaagatgctttttgttggttctatgggacaaaacctcgatatttagatggtacatatgtttattttcgtcaggactatcctgatgtcctctccgacctatcccggtgtacatacagtgggaataagaaccggtgggataaaaataatctgtatagatctcgccatcgttcataaatagaagaatagtatctgtttgagcagatactgcgatccccttttgagtatcaccgcccaaaaggacgctgatttcctgacgagtgttgaacttctgtttaaaagagagcttcatgcttgtcctccctacaagtgttagcgattccttcgttccatccgcagcaccgtctctactgttgtttcagtttccaagggaagttctttcacttcctcgccatcaacaggcacagggaagttgaatacaatcttctttatccagcttccgtcttttctcttttccgggaacatctcaattcgctcaataaaggctttcataaactctttctgttctgcttccgttgcggaatggtagacttcatcaaatgccagtaagagccgataaatgttatcgccggagattttctcctgctggatgctgcgtatctgactttgcaattcgccaatctgaacttcgatttcctctatcgtatcatactgttcatcatatcggcgctgcaaatccaaaatttttctgtcatagtgggcatcgttgatgtccaaagtatccatctgacgctccaagcggcttttcgttccaaaggcttgctttagctgtccttgcagaacggcgatctgcttttccatatcctctgtatcaaccgccgttccaattttcgcttgaattgcttctataaatcggggattgctgaccatagcggagatgaccttcgccacaaatttgttgatttccgtctgctcgatattcagccggaagctgcactcatgtcccgtcggcgtaaccgtatttttgcagtagtaataataccgtgttttcttgtccttgctatgagccttggcaatattgccgtacatactctttccgcaacacgggcatttcaaaataccggataggatgtgtgcgtggtctggattgttgaccttttcccgcttaaaggaattgatcttgcgcttttcctgtgccagataccaatcttcttcggaaatgatggcttcatgctgaccatcgtaaacagggaactccgactgctcgaccacgtgcatctcatttcttgtaccttgcctcttttcggttctccgtctgccataagcaattttacccatataaacgggattatccagtacgtcctgcacgaagttccttgaaaatccggggatggtgttattttgccgcagcttcttcacaaacccgttgcggttgagatatttagcaactccggcaacgccctcattggtatggatgtagcggtcataaataacacggattacttccacttcatcctccgcaatgacaaggtttccgctttccaatttgtatccatagggagcgaaaccgccgttccatttgccctcacgagccttttgctcccgtcctgccattgtctgtgtgcggatattctctcgctcgatttccgccaccgcagacagcacggaaatcataagctttccggcatccttggagctgtcaatgccatcctccacgcaaatcaggttgacaccaaaatcctgcataagctgcaaagagttcagaacatcggctgcatttctgccaaatctggagagcttaaagacaagcacataggaaacgccgtctttgcagtcctggatgtcgttcagcatccgttgaaactcctgcctcccttggatgttcttgccggaaaatccttcgtcagaatactccccggcaacgaccatatcctcgtatgccgcatacttccgcaacttgtcccgctgggcatccaagctgtatccgtctacctgcatggaggtggacactctcgtatatagataacatttaagttgcttctttttcagaatcgccacctccttcgctcatttcttttaccatcaatccctcgttgcggatataatactccaaaagtctaagcacataatccggtgcatggcggttgtccaattcccactcggtcatagtccggtaaggaatatggacgagcttgcaaaaatctttccggttcagtcctgtgctttcacgcaacttaataattctgtttttacaatccattcgtcttttctcccaaaaagcaaaaatacacgttgcgtacatattatagcatagccgcaacaagtacgcaacgtgtaaattgtaaatttttacgcagccttatccgtcaaaggctgcgcttgcttatcatccttggaacactccaccgtttgcggtgtatcctgctctaatttatccaaaacctgatgcccgtacttctggagcatctggctcataacatccacacagcggtcaaatgccgcattatatttcgcttcctcataatatttcttcaataggcgattcctccatcaaagttccatatcctgtccacgcttccggtcagggtgtttgtgttcctgcgtttcctttcctctgatgaggatagaattgataaaagcccgaaccctttcggatgcaatttccagtgcatccagaaaaggctgggctttctgtttcagttccatatatttttcgtttactgcttcataccgctgtttccagatggaaaccgtcttttcagcggaagccagtttctccttcaagcgcttgttgtcagcattggcgataatgccgttgaccgcatagcgtttgagcgtgtcgcactcatccggtgtcagcgtgatattatttccgaatgtggctttctttcccatcgtttcaatctcctgcaccgtcagagcaacggtctttgctgttttggtttccttttgcagagcttccagtttctttttctgtttctccgtggcatctttggcattctccaacccccgctccgcctgtgccacctgtccggtcatagcttccaaacgctgctgttcagcctgaaccttgaactgtgtcactgtcagatgttcctcggtgctgccacgctctccacgctccacatcggtatatccggcatttcgcatgaaatgaaaaaagtcatcctgcaacacactgtaggacgacttcaaaatcttttttccttttgcgttcaacattggattaccatccttgtcaagcaccggcttggactcccattttttactgcggctgacctgcgtgatcgtttcctttaccgttccccggagggattcatccttacatcgcttcgaccacagaatttgcttctctaccaccgggatataaaccacatgaaggtggtagtggtacacatcttcgcccagagcttcggacattgcccggttgcgctcgtcggcgtgcatcacagcggataggatatactgctcaccgcctacgatctccacggcggctttataggcatcggcataaaactgttttgcaaattcatagccgccgtgattgtagaagtaagcagagttcacatcaaagatcaactcaccgtatttgacggcatccggtttcagacctcttgtggagattacaccgtcctgttccatctgctcaaacatttttacataatcgtccgcgggtgctttgaaatgaatgttcagagaagtgcgttccggtacgatgtcctgattgctgtagctgtccttttcacgctcattgtgttcctgtacctttgccacatcagccggtgtttccaagtcctgattccgggctacggtgcggtggattccatcatttcttgccattggatttttcctttctttgaaatttgcagacagcggagagctggagaacggcactttttcaaagtgtaataacccactatgacactttcatccatactggctgcaaagtgccgtgggctctcccgagaggggatgcggtcactgcggcgacctctgctgaccaaagcgaaaatgtctgcgccttttcccatggtcagcccgtctgcatggagccgttctgtgtcaacttcctcttgcagccggtgtccacagacactttttcaaaaacctgtggacatagaaacaacccgaacgagaggatgcgtgctgtttctataacgagcgttttacgctcttttgctgcgtacatacgtaccagtaatgggatttactcgacctgccgccattcctccggtacgtacgtacacggcgaatctccgtaaaacccatttatatgaggtcgtacaatggcttccactcccatgaatccccaaacccgccgtccggcagagttggtgatgttgttgcaatgctccagattgaatctcccggcattggcaatcatggcgtcgctgaagctgcgggctttcagcggagcaagggaattttcctcgcaccacatccggtagatttcatagaaatccttggagctaatggacgcatccgctttacgccggatgtatccctccgattccatgaaatcaaagatattgttgttgtcacgcttgaccgcttccctgttttcccggatacggtcactctccgtaaactgaaagttgttggcaacaagccgctgtaaaccctccaatgcccacaggaagatgccctcggcttcggttttcatcttctctgcaaggtcaggatcgtcagctctgtcagtaggcttttctttggtagtcagcacaagctgtctgcggtaaaatccgtcactgcggtcatacaaggcttgcagatcaccgttgctgaacgcaagcaaccgggcaaacatccagccctgataactctgcttgcctttgcgttccaaatccatcttgccttgtgcggtcacgatggattttacatagttggtctggcgcagggcttccatccgcatatcatcatccacgcacagcagaatgtgttccagatcggcacgggcgaagcggttttcggaaatcttgccgatgctgccgtctttcatattcgtgccaaagatagcagaaagcacagctccgatttgggatttgccctcgccgccgttgcctttaatcaccatcatgcgctgccccttgttggagggaatcaggcaatagccgataaactcctgcaaagttggaatgtcctcgacgtaaagcaacccatccagaaagttcagccagatcaccggcgcagtagcatcgggattgtaagcaaccggcaaacggctccgcacgatagccggtctgccctcggtaaatgtgccgttcaatagcagcgtaccgttggacaaatgaatccgatcctgctccggtggaaagtccggcacttgcgcttccagtttcagcacttccagaatgttggtgatcttccgggggatattgtttacggcacagaatttcagcttgtcgtaaatctccccacgcagaggaagatcgtccgtcactcgaccatcgggcgtgaaaaaagctccgtttgcgaagatgatcctgcgctcttgcagaaattcttcacaaaacagagcttcgttgatgttctgcccgtcaaaccacatgggcaagttcatatcaggcgttttccggttcttcgccatggtgcgccacctcctttttctttcgtgcggtatactcttgcagaaaagcaattttgccgtcctgcatcagcttgtccaccaatgccacccgttcttccagatcacccaccgtcagcacatctgccatatattcgatatggcagtgcatctggcaggcttccacaaaacggtcatccagagcatcttccggtgtcttgggagcatagcgcactttccaatcttccaacagatgcaaataatccgtcagcacccggaagcacagcatttcatcctcccggaactgacggatatagggacgcttcggcttgaccatagctgcggcagtgggcggtttcgggtcaagcccgaagtccaaagccagcttttgcgctgcttcataactgctcagattgaacagccttgccacaaggtcgatcacatcccctttggctccgcagccgaagcagaaaaaatagtcctcattcagcttcaagctcggatgcctgtcgttgtggaacgggcagcaagccatgccgttgtggctcactttcagcccgtagtgttcggcggcttgcttgacgctgattgccgccttgatggtttcatagattgtcatagaaaaccctccgttcataatattctggaaagcacgaagcacccgccgtgattggcaggtgcttcgctccttctattatggttatgacggatttttcaaaaaacaggctaatgacaggacaatcctgtttcaaaaaacaggacaacttatctgaggacgtagatttcttcacatttacatgatataattagaaaaatgaaaaaacaggacaggagggcaagcatgaatcaagaattgatgacattggatttctggcaggatacggtcatatatgagagcaaaacatttcctgtcggtacgcttgcctgtgatgcactgaatgttcctgtgaataccattgcaaaaataaacgagcaatgcgagaaaatcaatctgctgcttggaatattaaacgccggacaggatgcttctgcactctgtcctattgcaaaggaagctgctctgacgatgctcgatattctcagtcaaacaccgccgttctcctatatgaatatctcaaagcacagagaacggattgaaaaagcctttactgtggacaatgcgctgaaatatgtggagtttgccataaaagccgcaaccaattctttgcaatttgaagaaatccagaactttaccgatgcgatgatgctccaacgctataccgcagttttcgggcatctggcatactcccttggggaataccaaacggccatgcttgattttgcagaaaaaacagacggcaacgaagcagaccgcaccgcagagggttttgcaaaaatgttcggcagctatttcccgccggagttttccatcacggaaggcaatgcctggatgtctaccctgaacaattccgttcagtatgtatccgtcatccgtcccggcgaaaaagttgcgaagctggtcaagcggatgcactatgtatcctttgtagggatgttccggtctgatctctttgagggcctgtgtgttggtcatgcaccgaagaaatgcaaaatctgcggcaagtggtttctgaccaccaacgcacggcacaccaaatactgtggcggctatgcaccgggggacaagctgcaccgcacctgtcggcagatcggcaacctgaaaggcagagaacaacgggagcttgcggacgatcatccggtgaaacagatttatgagaaacggctgaacaccataaaccgctatgtgaagcgtggtactctggacgctgatcttgcagaggttatgaaaaagctggcaaaagataagatgctccgggcattgagcaatgtagcctatgccaagggagcttatgaaaaagaaatggaccaggcggctttgaaaaaggaagcaagtgcaaaaatatacaaagaaagggacaaacatgaatagaaaagaacttagtcagaatcattggaaatactacttaatgctcgaaaagcgttttgttgaatcaatagagtttgtagaactacatgaggacaattttgatgcattttctaacggatatgccctcttaattcaagccataggggcagagttggatactgtattcaaagagttttgcggtttcaatacaacggatcgaaaaacggttgcagactatgcacagtatattttgaccaacacaccggatataaaaaatcaaaaaatcagtgtacaggaatacgatatcgaaatacaaccgtttatgaattgggatattacccagcccgcacagtcgttgcaatggtggggagcatttacagatgtcaagcacaaccgctatgagcagttgaagcaagcaaagcaggagaatgtactaaatatcttgggagctttgtatttgatagaaatgttgtacttgaagaaaatcactgatgggacagacgaatttgatgtgtttgatgaatcttccaacttgtttagtttgaaaaactggacttctaaggctgtgccgctgagccaagcttttgccgtgctaagtgatatgatggacgacgaaaataatactactaacaaaaagttcgatgcataattactgtcgatattgatagagaaagaaccgaaaggaggtgcgctatgctgagtgatttttcatgggacatgaccggatacataccaaaacacgctgtcaatccgcacggtgacggcatcattccttatgcggcagagcgcatcttccaactggaaccggagcctccagcggtgggcaatctgaacgaatatatcctgtctgccttgcaggaaaagaatttgatatatttctcattcttcctacaccactacgagccgcaacttaacaagcgcatcaaagactttctcggtgtggatggcggcgatctgtatgacacagaccgatttatagatataaagctctcctgccgggagcaaatgctccaaaagctgatggactatgaccttgccaagggtgcagagtatgctacatacattttcccgttcatccgggatgctatgctccgttttcgcatgggcgaagaaaaatggtcggtgtcctctctgaccaattacaaaatggtgcggtcaatggcttggctgtaccacaataccaaggatgcggtcaacgaattttccaagaaatacaactgcgatcttgcccttgcggaagaatatctgaaagttgtccgtggaatccgcaatcagcagccattctatgtgacagacgagaacggcgaggaaacaggcgaggatgtagcccttgacgatagctggaactataccgatatcctctggaacggcatacaggcagaaaaggtgcagcgggcatttgagaaactgaattaccgggagcaaaccttgcttgaaaagcggctggcgatctgtatgacctgtgggcgtgtcgactcatggaagaaccgccccacctttgaagaactggcggttatgtttgagggcagtacagccagcggtgcagaacgagcctaccgaaaagcagtggacaagttgacggaattgttggttgccgagggcgcaatccatgcagtccggctaaaacagaaatccaagatcaagcgaaaaaagaaaatcgccgccgcaatctacgaataccaagcagactgcgacggcgaatggggtaagatttcatttgattttgaaagcagcacagcagagatcatccatcttgccgattgggatacgataaaaaccaaccgctttgcgaacaaggccgtagcctatcttctgaactgtgaaaatgagaaactaccaaaggaaacaatggtggcatttgaaccataaaaagaaaaaccgctacaacatccatcccactttggaatgagaattgcagcggtttatttgctgggaactaattattcgatatttgtgatttcccaatcatcatttaccagatgggtaaatcctttgttttcttcttcatctggaattgatgctgtccagatgatttctccgttttcacccagggcagttattgttaatcctcgcagatcagtgtagccatcgagattttcgagccagatgcgttcgcctttcttgagcagagaaccatctgcattttcaaagccgccactggaatttggcattgaaagcttgatgctcttaacgccttcagagccaatggtcagataaaacttagaaatttcatcctctatggacgggaactggattttctgtcgtgcttcttcggtagcgaagatccaccacttgccattcataaagagttcaatggttccctcagttgccccgtattgataaccatatcctgtaccaaaattggattgattgtcaacgctgggctgtttatttccatcaacctgggatgtgatttctccatccataacaccacatcttgcttctattttgctttcatggccagtatcaagatacagtgtcccgttcaccataaccatagggattaagtcccatgtttcggtttgctttataaccttgattccataaacatccgcaattcgtgcaggataagtttcaaggatttcaccggagtattcaatttcaatcacatctccgatttcaggttctggtgatggatgagcatttctgataggtacttcaattcggtctgcactattcagttcccagctaccttcaacaggcttcacaagataataaccattatgatcttccagaatttcagcttggaaaacctgatgcgcttcgttggaaaaaccttcaatctgaatacaattattcttgaaaaccaatcgaccagtttctaccagttcatcagtattatatttctttttatctacatagaggtatccgtcagcttcattaaatctgagggtaaaatcgaaatatcctcgatcagacagttcatagcttgctccgtttgcatagtcatagatggtgacacggttatcaatcatgccagatccccaactgattgtagaacacaactcaggcaagccgtcgccggtgaggtcgcagaaataggcgttccagatgggcatcccggtatacaacgaagtgatttcgttacccgtaacagccatcatttctccataagtccaacggaaagtcacatccgggaactctggaagattaatctcatggcgaccaccccactgcatctcatctggtgtttcaagatagtcaaaccattttgtaacagacggtacaggttcagcaactgcgacatctcctcccacacagattctactcaaataatcttggaactctccgtcggatacaacataccgttctccgttccactcgatatctaccatatcattgtcggagagagaataaccgtttatccggatatatgtgccatcctccaggagtgcgctgatttgatatcccggtgtgaatccaccatattcatcgctcttcttcgtgttcttgaccccggccagccgagaactcaactcactaatctgtgcgggattcatttcaatagccaccgcgtcatccgcatttcgcatatcaaaatgatttgcagaaacgatggtgtgtgttgcttcatcgaattggaatcccatcgggttggtcaaaaagcagaccgcaacgatcacacaggcaatgactgccagaataataatccagaacgcaggtttcttataattcatcacagacttcacacgatctttaacaccaacttcaccaaaggcaagtgggcaggccgcaatcatgcgacggttgacgctgcagaccacaagagcctgtgtatagtcggctctctgttcgttgccaagttccttgatgaccttttcatcacaggcaaactcaatgtcacggcaaagaagtacataagccaaccacatcaaaggattgaaccaatgaatcgtcagcaggagaaaaccaagaggcttccaccaatggtctttgcggcgaatgtgcgcctgttcgtgggcaacaacgtgctccagatcctgaccattcatgttgaacgggagatagattctcggtttgataatgcccaggacaaacggagaacttacattctcactctggaaaatgttgcccttgtagcgaacagcggtatccactttacgacataggcgccaataactaactgcggtatacaagagaagggcgccgacaccaatcaaccagataatattcaaaatcggaatccaaatctgaagcgggtttgcactcgtcaatacatgctgtggtggggcaaatgaggatagaacaggattgaccacactattgatcgccggaacaccgctgtctattgtgggtttggccgccatttcaatatccaacggaattgtttctgaacttgggataaggcttaatgcgctctcaaaagagagcgggcaaatcaatctgacagccacgataccccaaagcagaacattgacccacttgggagctttcttcaaaacaagcctgagtatcagcacagccaggataagccagcttgcagatatactcatgttgataattttcaaaaagagttcgttcattgtgaacctcctttcctgatgcggtcgatcatgcgctgtacctcatcaagctcatcttcggacatagcctgatgctttgtaaaagcagcgataaaggcaggcagagaaccctcgaattttttctcaaccagttcatcgatctcacacgcctgggcttcatctttggaaacgagagaagtaacagtgccattgtcgttcttcagcacaccacgctctccaagacgcttgataacggtataagtcgtagtccttttccatccgagttgatcctggcacagctttacaagctcgacagcagtaaccggctcatgctcccacataatcaaacaaaaacgatattcactttcgtgaatcttcggaaaatccatattcacgccctccctgtctacaccattagacttcacacatagtctaccgcattagacagccaaaatcaatagagttcacagaaaagatacaaaaaaattgcccgcagaatttctcccacgggcaaagtattggttagctatcaagcggtttgtattcagttacagttttcaaataggtttcgggattaccgttcagtatcaaatcagcatatccaatcggatcattgtagatcagatagtccagttctgaccgctgatacatattatcggcaacctcattctccacggcgatggtatcaatggcaatcatgctgccatctaaaaatttcagttccacacaagcggtatccatgttaaactcacaagaaatcaatctatccataagaaacctccattttgcgggatgttagatcatcccaaaatatttgaatgcttctcggattgctttctctttttccggcggacacatgggctgtctggaatcctcggacttcggcaaattgtaattcttgccaacttcaatcccacatttcctcttaatctgtgagatataaaggttggatacctttaacccgctatgctccagcacatagtctttgatctgggtgtaggttgccccatcctgaaattcggacatatccatatcttccaaagagaactcaacccgaatctttttcgagtcgacctcacccttggaaagcaagacaaccgtctccacatgggcggtcctgggaaacagatccaccggctgggcctggacggcccggtagcccagctcctccagccgtttcacatcccgggccagggtggccgggtcgcaggagacgtagacgatgcggtccggcgccatggaggccagcaccgccggcacctccggggcgagccctttgcggggcgggtccacgcagatgacctggggacgcacgccctggccggccaggcgggccgccacctcccccgcgtccccgcagaagaattccgcgttggtgacaccgttgcgcagggcgttggccctggcgtcctcgatggcctgggggaccacctccgccccgatgacatgcccggcccggcgggccaggcacagggagatggtgccgatgccgcagtacaggtccagcaccgtctcctccccggtgagcccggcgaattccagcgccagctggtacagccgctccgtctgatcccggttgatctggaagaaggagggaacggacaggcggaaagtgagcccgcacagctcctcctccagccagtcccggccccagagggtgcgggacgcatcgcccaggatcacattggtgtcccggagattcacattgaggaccagcccggccagcttggggacagcggcgcgcagggcaccggacagctctccggcgtggggcagctccctcccgttggccactacgcagcacagggcctcccccgcccggttggtacggatatacaggtgccggatcagcccccggccggtggactcatcataggcggggatctgaaagtcctccatccagcccttgaaggccagacgcagggccgtatccgcctccggctggagcaggcagtcctccgtgtccaccacgtcatggctcctggggcggtaaaagccgatggacagcccgcactttcctcgggagacagggaactgcaccttgttgcggtagcgcaggggggactccgcccccagcaccggaggcagttccagatggacgccgcccacccgctccagggcgtcccgcacccgctggcccttggccgccagctcctcctcataggacatgtggcggtactggcaccccccgcaccgcccgctgtaagggcagtccggctcctgccggacgggggagggggagatcaggcgtgtccctttgccccaggccacccccttgttcaccttgagcagctggacctcccagtcctccccccggatagtcccgggaatgaagaccacccggccgtccagacgggccacccccattccttccgcggtatagccctcgatatggaggggatgcactgtgttttttctgacctcggccatgggattccctcgcttcaaaaccgtttttcttatcatatcatggccggatggagccgtaaagcccattttgcctcaggacggcagagagaacaggagcgccgccctttcgggcggcgctccgcatagggcgcagagggcggcggtcagtcccgaagggcctgatacaccgccagggagacctgggagatggcggcgatgcccgcgctgtcgttctccagatccccggtgaacatggcaatcaggtagcggcggccgtcaggcagctcaaagatgcccacgtcgtgctggatgcccaccaggtcgcctgtcttgttggccaccaggacctgcccttccgggatggcggacttggagccggagtaggaggcaactgccggcagaagggcgggcagcttgttgcggcactgctgagatgccatgatatcgaagatggtctgggagatctccggattgacgaattcgccccgggagatagcagaaagcagacgcccagtctccccggcgcacatgtagttgttctttccctgctggatggcttcaaaatccatcattttccgcatcagggtaatattctgatagcccatctcccggcagaagctgttgaaccgctccattccgatcacatccatgatctcattggtggcgatgttgtcgctgagtacgatcatcagcttggccagatcccgcagggaaggggtgtaatcggtgcccagctcacacaggatgccggtcccgcccacccggttgcgggggtcgatggtgcggggggcgtccaggtccaccagcccctgctgtgcgtcccgcatgagaagggccagcatagggaccttgatgacgctggccgagggaaacacatgctccgggttgatggtgaagatctcgccggactggcagtcctccacatagaggcccaccgtcccggccagtccggagaggatgcgatagatttcattttgagggatacgtttcatgagaatatgcctcctgtcctatttccgaaagctagttacagaatgaacgacgccagcacagcgaggatcactgtgccgggtataatggcaaagtacgagagcttcatcatcggcttgatgttgctggcatgggccagtcccatctgtccgatcatgtccacgccgggataggcaaatgaggtgatctgatgaccgatgaggacaatcatgccccacagctccatggaaatgcccagggtcgggaggaaggagctgaacaggctgtcgatcatcatggcctgggccacggcggcaccgttgatgccgaagatgcccaccagcacagtcagcagggtgaagcccaccttcccggtggggccgatcagaggctccagcagctggagaagggcatcaaaggcaccggactgggtgacaaagttcaggaaggggttaaaaatgaggaacatgaagaacagccacatcatttttccgcagccctccatcatgctgtcaaagatggtgccaacgggcattctggcaaacagacctgtgatgatcgcagccacgatcatcaccaggatcacgaaggacgcgccgccattggtggcgatcccatagatcaccatcagagccatagtgaccgcaaaggcgatggtggcgcggcgggtggccgggtccatctggaagttctccgcagcggcctccccgtcagggccgaagttctccgtcccctgggtctccttctggactttgttggcgatgaggaaggtgcccacccacatgacgatggatacgggcagtcccgcacacagcaaaaggcggggataggagagcccggtgatgctcatcagggtcaccataggcggggagaaggggctgaggaacagtccggtctgaccggcgccctggaagatgacggccagcgcggagggagtgatgcccaccgcagctaccagcgggatcacgatgggggcgatcacggcgttggcacctgccaaagtgcccagcagggtgaccagcaccacggaacagaccatggtggcgatcatagcccgcttctgggtacggacgccgatcttccgcatcagcacattgacgatggcggcggctacgcctgtctttctcagcaccatgcccagtcctgagcccagcatgatgatgaatcccaccagggccaggaaggagcccatggactcgtagatcaccgcgcccaggccgttcaggggctgtttcaccatgattgcgcccacaacagcgcagatggacacgttcaccagaggatgcatcccttttttaaatgccaggacgatgtacagcagcagcggaaacagaccgcagatagggggaaggttgaagatcatggcagcttctcctttcttgattcacacagttgtttttaccggcacaggcagacaagatatgcggggacagggatggggtcatcgctcacattttcatggcaacatttcaacatacacctcccggggcctgcctctgcctggagcgtttcccaggcctatttctaaaaaaacaaagggacccccttggctgccagcaggcaatcaaacaggtccctatttattcggctgttggaggggagacctccaacaccataaataaagaaagattcagttgtacccgcccccctggcactccctcaggcgggcagccacatcccgtaggatgacggtgatagcccggcgggagtcgccgaagtagcggctctggacccgggagatcatctcctccaggtccgtgtggaggctgagaccaatgagcagggacgccagaaaatcgctggtgatctggcagactgtgtcaaactggacatcatacaccaggccgctggaggggtccacgataaaagagccagccagggcgcggtgcacgctgtggatcgggttctggttcgccaccttggccaggccaacgacacagatggcccccgaagggaaatcggacatataccctccagcccccttggcccgctgggaagcggaacggattatatgcctgaattataataaaaaagatcgctcttgtcaacagaaattgtgcaaaaagcaaaatcccgttcccgttctactgtcgttttttaccaatcagacagagcgagagagcgccggccctactttcggagcggcagggaacgggggctgcgagccctcatcttggagtacgcatccttcagacagacaatcagcgcccgctgacccgggccgaaatactgctgctggatggacaggatgatctcgtccagctcctggtaaaagttccgccccaccaggagggatgcgatgtagtcactgttgatgcccaggatgatgttgcactctgcgtccaggatgcgtccgctgtcccggtccaggatcaggaccaggaggagcagctcactttccgccgaattcagcgccgtgttcagcgccctggacatcccggctgccaaaattgtattggggccatagcgggccctgcggatcagatctgtctgttccatctgtgctctccttttcctcctgatcgtcaaaggctggtacacagcaaggcggcataagctgtgcgcctatgccgccttgctccagatacgggtccactgcttttgtgtgggttcttactgctgctcgctgtgatactccttgcaggtgcactttttccacttcaggccgctgccgcaggggcaggggtcgttgcggccgatcttgaccgccttttttaccggctgctttttgaccgtgccgtcgctggcgcctgactcgctggtgatcttggccacccgttcccgtttgatctccggggcgggggcatcaggcgccttgcgctggatgcgcaccaggaacaggcggcgcagggtctcctcctggatggcagcgatcatctgctcgaacatctcgtagccttcctttttgtaggctacaacggggtcagtctgggcgtaggcccgcagtccgatgccctgcttgaggtcattcatggcgtcgatctggtccatccagtactcgtccaccacccgcagcatgatgacccgctccagctcccgcatcaggggcggtgtgaattcctgctccttgcgttgatagacagcctgggccttctccatgaccagatctaccagcccgtccgcagtgtagccttgcagctcctcgtctgtgagccgcagttcgtccggcaaaaggaacatggtgtggaagagagcggtggcctcccggaactcctccgcagtcatatgcttctgctctcccatgtggccgcggatggcgttctcaatggtgctgcgcagcatggactggatggactgctggaggtcctcgccgtccagcacttggcggcgctgcttgtagatgacctcccgctgggtgttcatcacgtcatcgtactggagcacgtttttccgggtctggaaattgcgggactccacctgcttctgtgcgttttcaatggcgttggacagcattttggcgtcgatgggggtgtcctcgtctacccccagcttctccatcatgcccatgactcgctcagagccgaacaggcgcatgatgtcatcctccagtgagaggaagaagcgggtctcaccagggtcgccctgacggccggcgcggccccgcagctggttgtcgatgcggcgggactcgtggcgctcggtgcccaggatgaacaggccgcctacagtgcggaccttgtccgcctccgcccggatctcgtctttatacttggcctccgcctcggtgaacatcttccgggcgttgaggatatcctcgttgtccgtttccgcgaatccggtggcctccgcgataagctcgtcggtcatgcccgctttgcgcaggtcagccttagcgaggaactcggcgttgccgcccagcatgatgtcggtgccgcggccggccatgttggtggccacggtgacggcgccgaacttgcccgcctgggcgacgatctcggcctccttctcgtggttcttggcgttcaggacgctgtgggcgatgcccttgcgccggagcatctcggacaggtgctccgacttctcgatggacaccgtgcccaccaggacgggctggcccttctgatggcactcctcgatctgctgcacaatggcccgcagcttgcccgcctcggtcttgtagactacgtcaggccggtcgatccgggccaggggtttgttggtggggatctctacaatgtccagttcatagatagtgccgaattcctcctgctcggtcatggcggtgcccgtcataccggagagcttgtcatagaggcggaaatagttctggaaggtgatggtagccagggtcttggactcgttggcaacctccacgtgctccttggcctcgatagcctggtggagcccctcgttataccggcggccgaacatgaggcgcccggtgaactcgtccacgatgatgacctgtccgtccttcaccacgtagtcaatgtccctcttcatcacgccgtgggccttgatggcctggttgatgtggtgggagagggtggtgttctccgggtcggccaggttctcgatgttgaaggcctgctcagccttggcgatgccccgggcggtaagggtggcggtgcgggccttctcgtccaccacgtagtcagcgtccaggttgacgtcctcttcctccttgttgtccaccttggcgatgcgctggcacttcaggcgggagacgaactggtccacgatggtgtagagctgggtggacttctccccctggccggagatgataaggggggtgcgggcctcgtcgatgaggatggagtccacctcatccacgatggcaaaggagtggccgcgctggaccagctcgctggagtagatggccatgttgtcccgcaggtagtcgaagccgaactcgttgttggtgccgtaggtgatatccgcctgataggcggccttcttggccgggcccatgaccccgtggatgaccaggcccacggtcaggcccatgaagcggtacaccttgcccatccactcgctgtcgcgctttgccaggtagtcgttgacggtgacgatgtggacgccctttccggccagggcgttgaggtaagcgggcagggtggccaccagggtcttgccttcaccggtcttcatctcagcgatgcggccctggtgaaggatgatgccgccgatgagctggacccggtaggggcgcatgcccagcacccgccaggccgcctcccggcaggcagcaaaggcctcgggcaggatatcgtccaacgtctcaccgttctggagacgctccttaaattcgggggtcttggcctgcagctgctggtctgtcagggccttgtacttctcctccagagattcgatcttatccaccagcggcgtgatggccttgacttcgcgctgggaggaggtcccgaagattttagtaaatagactcattggaaaacacctcggatgttgatgttgatcctcgatcattgtggaaaaagggcgtcctgatggatcgtagcatctcagtatatcatacctttctcccggaaaaaaggccaaactgtaaactttgtctgcgaaaatgcccaatatccgggggagtgccgggggaaaatccgccggatatgtataaatgtacgccagtggttgacatttgaccgcggctgtgttaaggtattgctcgaaaacaaaataggacagacgaagcgcgcaggaaaacagctatggcttgccgaaggagtaacactctcaggtgtccctgccgggacgaggactgcgcgtggatgtgactctggagaagctcgacgatcgggtgccgaaggtgcaagacggaagcggggacgctttcgccaatctctcaggcaaaaggacagagacgatgaactgccttgccgcagtccaggaacggaccgcggcgagggagtttttcctcgccctatgcgacggaccgcggagcctgctccacggtccattttttgtcccaaaggagagagaaaacactatgttggaatccttagaagccacgctctatcccatcgttgtaaacatcaacaactacctgtccagctacatcctggtcttcctgctcattgcggtgggcctgtggtactccatccggacccgcttcgttcaggtgcgctgcttcggcgagggcatgcggaaggtattcggcaacctgaccctgcggggcaaaaagcatgccagcggcatgagctccttccaggccctggccaccgccatcgccgctcaggtgggcaccggcaacatcgtgggctccgccggagccatcctcaccggcggaccgggggccatcttctggatgtggatcatcgccttcttcggcatggccaccatctacgctgaggccactctggccatcaagacccgcagggtagaccaggagggcaatattcacggcggaccggtgtactacatcaccaccgccttccagggcgctttcggcaagttcctggctggtttcttcgccgtggccatcaccctggccctgggcttcatgggctgcatggtccagtccaactccatcggctccacattccagaccgctttcggcgtcccatcctgggtggtgggcatcgtgctggtggtcatctgcgccatcatcttcctgggcggcgtacagcgtctggcctctgtcacggagaagatcgtccctgtcatggcggccatcttcctgctgggcggcctggtggtgcttatcgcccgtatccagtacctccctgccaccatttccatgatcttccagtacgccttccagccacaggccatcatcggcggcggcttcggcgccgccctgaagaccgctatcagccagggcgccaagcggggcctgttctccaacgaggccggcatgggctccaccccccacgcccacgcccaggccaatgtgaccgacccccacgatcagggcgtggtggccatggtcggcgtgttcatcgacaccttcgtggtcctcaccctgaacgcactggtcatcatttccaccctttacaccgccgacggccctctggctggcggctacgtgggcggggtgactgaggttctggacaagaccaacctggcgcagaccgccttcggcactgtgatgggggccgggctgggcgccaagttcgtggccatctgcctgtttttcttcgccttctccaccgtgctggggtggaacctgtttggtaagatcaacgtgatctacctgtttggaaagaagtcccccaagctgtgcaccactatttataccgtggtcgccctcatcttcattttcctgggcaccacgatgtccaacgacctggtgtgggagctgaccgatatgttcaacaacctgatggtcatccccaacgccatcgccctgtttgccctgaccagcgtggtagtcagggtggcccggcgggaggacccggacagcacccccctgcgccggtgagccggcggccgcaagatacaggaactccttcccccggcccagctgatttgtggaaaaagtagaaacggggacccgcctcttgacaggaggcgggtctctgctgtattgtggatgtggatcatatgactgacggaagtggagtgaaaccacagggagtatgatcgtcaccatgccgaccgtctgggcgctgaaggggcccggaggggcggcttttttgcgcccttttttgccccgccatcacagaaaagcaaggaggaaacaggatgacgggatatatccactccatggagagcatggggctggtggacggtccaggggtgcgcgcagtggtctttctccagggctgccccctgcggtgccgctactgtcacaaccccgacacccagtgcgggggcggccggccggtggaggacggcacgctggtccgcaggctgctgcgcttccgcagttactttgaccgctccggcgggggcgtgaccttctccggcggcgagcctctggcccagccggactttctgctggcgtgcctcaggcggctgaaggcggagggtgtccatacctgtctggacacctcgggagccggaaggggaatttatggggagatcctggcccacaccgacctggcgctctatgatgtgaagcaccatgagccggcgggctacaaggcagtcaccggcggggacatggccgccaccctggactttgtagaagcagtgcgccgggcgggcacccccatgtgggtccgccacgtggtggtccccggcctcaccgacagccgggcccacctggagggactgcgggcctatgtggacaccctgccccatgtggagcgtgtagagctgctgcccttccacaagctgggggcccacaagtatgaggctctggaacggaccgaccctctggcaggtacacccccaatggaccgggatctgtgccggcggctggagcgggaattttttgctccctacaccacaactgcggagaaaggaagagcggtatgaagatggaaaatcaggcatggaagggctttcatggcggcgagtggcagcgcagcatcgatgtgcgctcctttattcagaagaactggaccccctacgagggagacggcagctttcttaccggccccacacggcgcacccgggcggtgtgggagcggtgtgaggacctgctgcgccaggagctgcggaagggcgtgctggatgtggagacccacatcgtctccggaatcgacagctttgcccccggctatatcgaccgggagaacgaggtcatcgtgggccttcagaccgacgcgcccctcaagcgcatcgtcaacctgtacggcggaacccggatggcccggtccgccctggagcagtacggctatcgcctggacccggagatcgaggaccacttctcccagtaccgcaagacccacaacgagggggtctttgacgcttacccggagcgcacccggaaggcccgccacgccggcctgctcaccggcctgccggacgcctacggccgggggaggatcatcggggactaccgccgggttgccctgtacggcatcgaccggttggtggaggaaaaaagacgggacctggacgccctggacggccccatggacgaggagcgcatccgcctgcgggaggaggtctcggagcagatccgggccctggaggagatgaaaaagatggccgcacggtatggggtggacctgtcccgcccctccgccactgcccgggaggcggtgcaggcggtctacctggcctatctggcagggatcaaggagaacaacggggccgccacctccctgggccgcacctccaccttcctggacatctacctccagcgggacctggaggcaggggtcatcaccgaggaggaggcccaggagctgatcgaccagttcatcatcaagctgcggctggtccgccacctgcgtacgccggagtacaacgagctcttcggcggggaccccacctgggtcaccgaggccatcggcggcatgtctattgacgggcgcaccctggtgacccgaacctccttccgctatctccacaccctgggcaacctgggcagcgccccggagcccaacctcaccgtgctgtggtcggagcacctccccgcccccttcaaggccttctgtgccaaaatgtccatcctcaccgactccatccaatacgaaaatgacgacgtgatgcgcccggtgtatggggatgactacgccatctcctgctgtgtgtccgccatggcggtgggcaaacagatgcagttcttcggcgcccggtgcaacatcgccaaatgcctgctgtacgccatcaacggcggcgtggacgagcgcaccggtgagacggtggtccccggcatccgtcccatcctggacgaagtgctctcctatgaagcggtccgggccaactatgagcaggtgctctcctatgccgcggagctgtatgcggacacggtgaacatcatccactacatgcacgacaaatacgcctatgaagccagccagatggccctccatgacactcaggtggagcggctcaccgccttcggcattgccggcctctccgtggccgccgactccctttccgccatccgctatgcctccgtccggccggtacggaatgaggccggggtggcggtggaatttgagacggagggggatttcccaaaatacggaaacgacgacgaccgggcggatgacgaggcggtgttcgtggtgcggaccttcatccgggaactgaaaaaacaccccctctaccggggagcgaagcacaccctgtccgccttgaccatcacctccaacgtgatgtacgggaaaaagacaggctccacccccgatgggcgcaagctgggagagcccctggcccccggcgccaaccccatgcacggccgggacgagaacggggccctggccagcctgaactcggtggccaagatcccctatcggaacgtgtgccaggacggggtctccaacaccttctccatcgttccccacgccctggggagggaccagggggagcgggaggccaatctggtggccattctggacggctacttctgccagggggcccaccacctgaacgtgaacgtgatggaccgggccaccctggaggacgccatggaacacccggagaaatatcccagtctcaccatccgtgtctcgggctacgcggtcaacttcaaccgcctgtcccgagagcagcaggaggaggtcatcaagcgcaccttccactgcgccctgtgagccagagagccccggcggtgacaccgccggggctcaagtacttttgagcggccgcacaggccggccgccggaaagatgctttgcagaggtccataggaggcgaccgccccacaggggcacaggggcctgcagggtgatattccttccggcccctgtgcagggcgcccgcttccggctgcggggcaggtcccgggcagcagcacgccggagcgccccattgggaaaagcgcccgccccgccaggaaaacgtgccctcttttctcccttgtaacgggttgtcagacggaggattttaggatacaataaagtgctaaggtctttacatctcggcaaaggaggggcacacctatggaggtcaccctgcgcacctgtcagagcgtcccgttttacgcctgtggcggctttgatccatccgtctgcgcccatggcttctccacccggctgggcggcgtctctcccgctccctgggacagcctgaacctgggtgctaaccggggggacgccccggaacgggtggcggagaatttccgccgcttctgctctgcggcgggggccgaccccgccgccctggtgaagaaccatcaggtccacggggatctggtgcggcccgtcaccctgagagatgtgatgtccagctccgctgagcccggcgtgtatgaggcggacggccttatcacggacgagcccggcctgtgcctgaccatcttttccgccgactgcatccccgtgctgctgctggacccggtgcgccgctgcgctgctgctgtccacgccggctggcgggggaccgccctgggcatcgcagcccgggccgccctccggatgcgggaggactacggctgccgcccggaacatatccgggccgccatcgggcctgggatctccccctgctgctttttgacccgcgacgacgtgcctggtgccctccgggatgggctgggcagtcaggcggagacctgcatacgcccggcggaggacgggcgctggcacgtggacctgaagggggccaacgccctctggctccgccgtgcggggctctcaccggagcacatcgccctctgcccggactgcaccgcctgccgcaccgaccgcttctggtctcatcgggtgatgggggagcggcggggcagcatggccgccattatccaacttttatgactgtgaggttccccatgggtcgtcggcgtattttcctgctgcttctcagcgcggcgctggccctgtcccttgccggctgcggccaggcggagcccccttccgcctccggcacggacttctcctctgcggcgaaggaggagcaggccatccccgcctctatcccctttaccctcgccttttaccccgagtacacgctccaccccgcccgggcggccaaccgggcaaatctgactctgggctccctgctctatgaggggctcttctcggtggacgcctcttttcaggcccagcccctgctgtgcagcggttacaccgtcagcgaggacgggctgacctggaccttcaccctgcgggaggggatcaccttttccgatggcacccccctgacggggacggttgccgcccaggccctccgggacgctatggcgccggactcccactacgcccagcggctggggggcgtgcggtcggtggccgccggagaggggacggtgaccgtcactctttccacccccaacggggcgctgccggttctgctggacatccccattgccctgggagacggggaccgccccctggggaccggcccctatgtgctgacggaggaggcaacaggggagaccgtcctcactgcccgctccggctggtggcagggcaggtccctcccattccagaccatccatttagcctcggtggggcaggcggacgacctgatctcctcctttgacgccggggacatcaccctgctggatgccgacctcactggcaccaacagcctgggctactccggcagttatgaggcatgggattacagcaccaccaatctgatctatctgggcttcaacacccagcggggacctttccgctccgcccagctgcggcgtgccctgtcccggggcatcgaccggcgatccattgcggagatctcctttgcccaccacgccgtccccacagcgctgcccatccaccctgacagcccgctgtaccaccaactgctgtcagactccgcggactactcccccgacgatctggtgaagggtctggaagggcagcagctgggcagcgacgggctggtctttctggtgaacagcgagaacagcagcaaggtggccgccgcccagcgcattgtggaccagctctcaggggccggagtgtccatctctctggagcgcctttcctggaccgactatctggccgccctggagcggggggactttgatctgtatctggcggaggtgcgcctcaccgccgacttcgatctgactcagctggtgggaacgaggggcggcctgaattacggcggctggtccgacccgtccaccgacggcctgctatccgccttccgggccgcgggcgcggagttgcgctcctctgccgccgcctcactgtgctcccacctgattcagaacgcccccatcgtccccatctgcttcaaaaacggctccgtgctgacccaatggggacggctgagcggactggacccagtgcgggacaacgtgttccatgggctggagaactgggtcctggacccctgaccgcccgctccagcgtgggaggtccaccgcctttcccatcctgaactatccacaaaggtttcccttgcgcgcccccgctcccccgggggcgggacacacagacggatcgaaacataaaaaataatatatatctggaggaatggacatgagcgtactgcgctgttattcacagaaaaagaccggattcgatgtggaggcccaggggctgctgggtgctctgcgggaccagctgggcatccgcggcctggagtctgtggtcattctgaaccgctacgacgccgaccagatcgaccccgcgatctatgagcaggccaagggcatcgtcttctccgagccccaggtggatgcggtgtatgacgagactttccccgtccccgagtatccccaccgcatcctggcggtggaggccctgccagggcagttcgaccagcgggccgactccgccgcccagtgcatccagctcatggccggggtggaccgccccctgatcgcctacgccaaggtgtacctgctgggcggccggctcactgaggaggagctggacaagatccgccgctacctcatcaacccggtagagagccgggaggcctccatggacaagccggccaccctggtccgcactcacgaggcccccgaccgtgtggccgtgatccagggctttaccgccctggacgagcctggactggccggcctgctctcccagctggggctggccatggacctggacgacctgaagttcctccaagcctatttccgggatgaggagaagcgggaccccaccatcacggaggtccgtgtggtggatacctactggtctgaccactgccgccataccaccttttccacccacatcgaccgggtggagatcctggaccccgcggtggactccgcctaccgccgctacctcaccgcccgagcggaggtgtacggaccggagaaggccgcggcccggccccagaccctgatggacctggccaccatcggagccaaggtgctgaaaaagcggggcttgctccagaacctggaccagtcggaggagatcaacgcctgttccatccacgtcaccgccacggtggacggggaggcgcaggactggctgctcatgttcaagaacgagacccacaaccaccccaccgagatcgaacccttcggcggcgcggccacctgcatcggcggctgcatccgggacccgctttccggccgggcctatgtgtatcaggctctgcgcctgaccgggtgcggtgacccccgcgccccctatgaccggaccatggagggcaagctgccccagcgcaagctggccaccaccgccgccgccggctactcttcctacggcaaccagatcggcctggccaccggccatgtggccgaggtgtaccacgacggctatgtggccaagcacctggaggtgggcgccgtggtgggcgccgcgccggcctccaacgtggtgcgggagcgtcctgcccccggggacgtggtcgtcctgctgggcggccgcaccggccgggacggcatcggcggagccaccggctcctccaagagccacaacaaggcttccctcaccaccatggccagcgaggtccagaagggcaacgcccccgaggagcggaagatccagcgcctcttccgggacagccaggtcacccgcatgatcaagcggtgcaacgacttcggcgccggcggcgtctccgtggctatcggcgagctggccgccggcctgcgcatcgacttggacgcggtacgcaagaagtatgacggcctggacggcaccgaactggccatctctgagagccaggagcgcatggcagtggtggtggccccggaggacgcggaccgcttcatcgccgccgctcaggcggaaaacctggaggcataccccgtggcggtggtcacggagagccccaggatggtgatgacctggaagggccagaccatcgccgacctgtcccgggctttcctggacaccaacggggcggacaagcacacctctgtcaccgtacccgaccgctccgccgcccagcggcagccctccccccggttccgggacctgcgggacatggcctccagcctgaagtgcgcctcccgccggggactgaccgagcggtttgacggctccatcggctccgcctccgtgctcatgcccttcggcgggagcacccagcgcaccccggcccagtctatggccgccctgctgcccgtgctgcccggccagagcaccgacctgtgctccgtgatggcctggggcttcgacccagacaccatggtccgcgaccccttcaccggtgcggctgcctcagtggtggactctatggccaagctggtggccgccggctgtgaccgccgccaggcctacctcactttccaggagtattttgagaagcttcgggacgagcccctgcgctggggcaagcccttctctgccctgctgggggccctggacgcccagctggggctggatgtggctgccatcggcggcaaggattccatgtctggctccttcctggatctggacgtgccccccacgctgatctccttcgccatcgcccccgccaaggccggggaagtgctcacgcccgaattcaagggggcggggcacccggtgtatctgctgcccggcttcccctcctatggggagctgaagactgcctgggactccttccaccagttgtgccgccagggcaaggtgaaggccgcctgggcggtggaggccggcggcgtggccgaggcggtgatgaagatgtccttcggcaactccatcggcttccaggccgatgtggatgccgccgctccctggtacggcccctgctccggcgccatcgtgtttgagctggaaggggaggagttcctccccggcatggcctggcgcatcggcaccaccacccaggagccggtcattaccatcggggaggacaccgcctccgttgccgagctgctggagcggaacgaaggggtgctggagcaggtgtatcccacccgggcgggaaagacggaaaaagtggaggccatctcctgcggggagcgagcccccatcgtctgccagagccggacggcccggccccgggcggtcatccctgtcttccccggcaccaactgcgaatatgacaccgcccaggcatgcctgcgggcgggcatccagcccgaggtcgtggtggtccgcaacctgtccaccgacctgctggcccagtccgctcaggcccttgaagaggccatccgccgcagccagatggtggtcctgcccggcggcttctccggcggcgacgagcccgacggctccggaaagttcatcgcctccttcctgcgcaacccccggctgaccgatgcgatccatgacctgcttcgggaccgggacggcctgatgctgggcatctgcaacggcttccaggccctcatcaagctggggctggtcccatacggggagatccgccccatggacgatcagtgccccactctgacctacaacctgatcggccggcaccagagccggtacgtcaccacccgggtggcctcggtccgttccccctggatgctgaagtcccaggtgggcgacctgcacgccatccccatctcccacggcgagggccgctttgtggcctccgacgagatggtctgccgtctgatccagaacggccaggtggccacccagtatgtggacggggcgggcgtcccctccctggacatcgacgtcaaccccaacggctccatcatgtccatcgagggcatcttctccccggacggccgggtgttcggcaagatggggcactcggagcggtacggcgactttgtgggccggaacattcccggagataagcaccagccgctgttcgagtccggtgcggaatatttcaagtaaacacatctttcaggggcctgggatgtggcgcaccgcatctcaggtcttttgacaaactaaaaaattcccgcacgggataccgtgcgggaatttttatgagcacacaggcaggttggagcagcctgttcagatagggaacatggtcatggtcgccaacacgctgaccacaccacggaccacggcgggcaccatgccggccttgaagatggtctttagattgtagccgccggcggtcatcgccaagggaacaacgcctgtggccataggggtgaccagggaggacattgaggcaatgttgcacaggatgatggggccgatgggatcgacattcatggtcacgcaggtcatgatagccaggggatagagcacttgggtcaccgcccggttatagaggaaagaggtcatcagccatgccacgatatagaaggctgcgccaatgatatagccgttggtggtgttgcccaggagcgaggccagggcgcttcccatcagctcggcggcaccagtgccgcccagggcggtccccaggacagaaacgcccacgtaaagcatgatagtgtccatattcagattgtcaatggcttcctgctcggtgagcacgccagtggccactaccacgagagcaccaatcatggtcacttcccaggcggggaggatcccggtcatcagacccaggatcacaacaacaaagacaccgtagcccagcatctcacgcacggggtccagaggctctttctgcttcatggcgcggcgtttgatctcaccgatctccacgtcgggctggtcaggcagaagcttggggacaagaaatacggagaccaggatagtgaagatgccggttatcaccagaacaggggtgtcggtccaaattgtaaaggcggtatcgtaccagccataggactcaagataaccgttgtacatcacatagtcagcggcgtaggggccaatgggaatgaccagaaagctacaggataccgaagcgatggccaccgggaacatcattttagaggggctgatgttcatcttctcgcaggtgttcttgaccataggggtaaccattacaaaggtagcgatgatactaggtacgaactggcccagtatcgtggtggctatcacataggtcatcagtacttttgtaaaggaaccgctggtggctttcagcagggcgttggacatcttgttaatcatctgcgtcctggctaagcctgctgctacaatatacatagatgccatcgtgataacggtggtgctcccgaaggtggccagggcactattagcgtcaatacacccagtaatgatcagcagcaccatcgcaatcagtgcgctaaacgccataggtatcttacgcgacaagaacaggatgaccattatggcaaaaatcgccagacaaatgtacatttgctccattgtagctgtttcctcctcaactttttcgtttttacacagtcttgcccaaacactcccctattgtgctttccataccgcctcctctcctatggccgggtctggattatattatcctcggcttaatgccgacggggattggcgggtcgtagctgcgtccgcccgtcctctcctggaactctttcttcgcttgctcgataatcgcgggagcctccagtgcatcgatagcagaggcagccatcaccttagctgcataaagcatccctttgtgggccatggcgctcttccccacggccaccatctgccaggagtgcataggggtccccgccggcatggtagtcgtgctgatctgtgccaccgggcagttccagctcacgtcacctacatccgaggaaacaaagccctgcctttcccgagccatgggcaataccacactgtgcaggggattggcacagtccgtcaatgcggtccgccgctgttccgggtcttgtatctcctctactaagtcctcgaagtatctgccccgctcctcgagggagtcgacgatcctggccgccagatccatgtcctgttggtcaaagaaatcggaaggtatctcttccagatttttttgcatcaccttcagtagagtcgtgttcagcacagtgttggaacaggcttttatgaactcaatctccacagtggtctccgtcatcatagctgccccctgggcgaccttgttgacccgctcatagagctctttcacctgatacagcttgggagcacgcatgaggtagagcccctcggcatagggctggaccacgcccggagcctttccaccggtgtcagtgatggcgtagtggatacgggtctccgggggaacgtgctccctcagaaactggatccccacgttcatcagctccagggcgtccagagcgctgcgccccaactcgggggacatggcggcgtgggccgaaacgccccgaaagtgatagcatatctgatagttggccatagtactctctgtggacacactgttcgtctcatctggatgccagctgaaggcaacgtccaccccatcaaacactccgtcgcgcgccataaagccctttccagagcctccctcctcagcagggcatccgaagaacttcactgtacccgacaagccgttatcctgcaaatactgttttactccgatggcggcggccagtgagccaacccccagcagattgtgtccacagccgtggcccggtccatcctcctgcatagcctgcttttccgtacagcccgcttgttggctcagtccaggcagggcgtcaaactcgcccagaaaagcgattacaggtccatcctgaccgtaggtccctgaaaaggcagtagcaatccccgcaaggtctcgctctacccggaacccctgttcctccagcgtgcggcagaatagatcggcggcaaagtgttcgtggaaccccgtctccgggtggtcccagatagcatcgctcatggcacacaaaagctccttatgttcttcaatggcctggagcgcccgctccttttccaatctcataattgttccgactcctccttgaaatcttcttttattttcagacatttaaaattttaattttattatttttggtcatatttcggaaatttaaatttagtatatagtttccttattgtattagtcaagtgtaacttcaattttttacgttatatttcactttttgacggtttttagctcctcgattttgtgctattcgctgaaaatggcaggggtattttttgctttaagctgcttctccattttcggacatatttttcgccacctgttcttgtattttctcatcgctttgtttataatgataatcacatatatttttccacaaggaaggggctgtatcaggatgcactcatttggtatctttaccagcaggttgtctctggagcgagtcatggatatcgactccgagctgacccgctatgggatggttacctatctaccctatacctctcccgatcacctgaagtttttgtatgaacaaaaccgagatcgcttcgacgcctttttgttcggcggctcatatccctttgagattatcactggcacctttggccccattcaaaagccctgtgcctatttcaatgtttcagaccgggactattacaagatgattgcctgtctagctgtccaggaacccaatctggattttcagcgtgtatattttgatatcccagatatgcccgtagatttccgctctatttttcagcgagagaacatcccccttttgagtgaggcccccattgactgggactccctcgacccatacgactgggatgctcccgtaaaagaatactatttgcatctttggaatagtggaaaggtggacctaatcgtgacccgctttgccagtctggctgactatctcagcgatcaccatatccgctatctgtatctctccccttcccccgaatccatgctggagaccttccgcggtctggtcatgcagctgcgcacccagtctatgcatgattccgccgcctgcctggggctgatccgttccatcatgcccctgtccaaggaacagtgggccgcactgggggaccgtcttcaggcctgcaacaaacaattcggcacccccttcctcatctatgagcacggggagcactatgagatcaccaccaatatttcagtcctgaaagacctcacgcagcagtacaccatctgtcctgtgactgcctttctggaggcgggactggattttcccatctgtaccgcctggggctgtgccggcaacgtagtggatgcccaccgaaacgcccagcgggcgctgaaagaggcgctgctgtgcaagggctccgccgcctttatcgtgatggaggacaacaccatcatcggcccgctctccagcgtccgccgcatttcctataccgatgcgcccgatgaaaagcggctggagctcagccgccgtctctccatctcccccctctatttgagtaagatcgtctccgtccttacccagaaaggaaacgacactctctctgcggaggagctatccttctatctggatatcacccctcgcagtgctctccggattctatccaagctggaggccggcggctacgcctctgtacagttccggcggcagctcaacttgagaggccgcccggccaagatctatcagatccacatccaggacctgacctgacgcccccaaacctgtctcatccgcaggaggtactacgcctatgaaaaagatccctacatacagcgggactctgcgcagccatttgctggccgtcccccactgtatttcagaatgcagcggcatccgcatctttggccgccgcatcaaatccctggtgttcaccaccgatgtggccatcatcaagaacgtcaacggagacgccatcatcgcggtctatccctttaccccccagccctccatcgcccaggccatcatcagtgtggccgacgtcccggtgttcgtgggcgtgggaggcgggatgaccagcggctcccgctccgtccggcaggcggagtacgcagagcaccagggggccttcggcgttgtggtcaacgcccccatcacagacgagaccatcacccagatcaagcatgtggtggacatcccggtcatcgccaccatcatctcttctgagatggatgtcgccgggcgtgtccgggccggagccgatattctgaatatctcaggggccgcacgcacccctgagatcgtggccaagattcgaaaagatttcccagacatccccatcattgccaccgggggccccacagaggaggacatcctccgcaccatccaggccggagctaacgccattacttatacccctccctccaccggtgagctgttttccgtgcggatgcaccagtaccgcgcccagttccatccagaataaaaggtatgatctccgccgcttttaagctgtttttaatgctgcctttctccccctttcagaatcaaatggtaggatagcgtcagtaggaaggaggaaattcaaaatgattaccctattcacgctgtctctgctctgcctggctgtgatcctggtcctgggcgtagtgctgaccatcctcagtgtgccgtttctggtcatcctgggcctgctgccctggcttctgcgcatcgccgccgcggtcctgctgatccgcgggctgctggaccatcccttccgttgggaaaatctgatccctgccgctgtcgcctttgggctttctgttcttctgcactgacctaaagagcaggggcggagcccccttcgtccccgctcttttcccaccggaaaaaattacagattttcttgcaaaaaaatgttgacaaatgggaacacttcggttatactaactcttgccctgttcgagacgggcagacatggcggcatagctcagttggctagagcatgcggttcatacccgcagtgtccccggttcaaatccaggtgccgctaccattacaatctaacagagcattggctctgagccatatacggcccggtggtcaagcggctaagacaccgccctttcacggcggtaacacgggttcgattcccgtccgggtcaccacctttttttgagccgtccatatggaggcatagctcagccggtagagcgtccgcctcacacgcggaaggtcacagattcgagttctgttgtctccaccaagaggaagagtgccacaccaataggtgtggcactcttcttatattgttctgagacgggaacgatttccctgtccctgtgaaacaaaatgcaggatctgcgcagcaattttctctgggtatcataagaacaccgatttgcgcgatgtctaccaaaagtctaccaaaaaagggcggcgggggcctggagtttcagggccctgccgttccttctgtttttgcgtgtctaccaaatgtctaccagggaaactttttaggcgtgatcccagagatttttcccctgatctccccctttttataaccaattcctcctgtgccagaagtgttgtacaggcatagtgggccaaaatgttctgggaaaggcccggtttgtcagaaaacagcgacttttgtcaatataaaaaggaggaatatccaatgagaaacctgaagcgtgctctcagcctggctctggcttccgttatgctcctgggcatgatggtcgtgggctccagcgctaagggccttgacgacttcagcgacaacgctgagatcgtcaacaaggacgccgtggcggtcacctctgccatcggcctctttgacggctacgaggacgggtccttcggccccgagaacgtagtcacccgcgccgagatggcggtcatcatcagcaccatgctgtacggcgctggcgtgaacgtcaaccagttcgcggagaccaatgtgttcaccgacgtccccgcctgggcgcagggctatgtgaacctgtgctccagcctgggcatcgtggccggcgtgggcgagggcaagtttgaccccaacgccaccgtgaccaccgcgcaggccgtgctgatgctgtgccgcgccctgggctatttccagaacgccgctgacttcggcgacaactggatgctggccgccaccgccaagggcaccgctctgggcctgtatggcgacctgaagctcaccgccaacgagggcctgacccgcgacaacgtggctgagctggtgttcaacgccctgaccaaggccgtgcccgttcagtacaacgaactgctgggcgtgtactacaacgagaacaagggtatcatctactccctgaccttctactacaccgataccctgggctacaagaacttcgacctggtctacaagaccaacgagaacaccgattacggccgtcccggcaccacctggggcaccggttcctaccggggcacctccgccaccaccgagggcaatgactcctacggcctcaatgaggacggcagcctgaagcccgagaacgtgaagatgacctccgatgacgagatcatcaccgtggccgacacccccgactatgtctacactgccgggaccaaggagaacgtgatctataaggacctgggcaagacggtcgtcgagggcaccgagaagggcgactatgtctatgactgggtcgcctatgtggacggcgccgagcaggaggttgccggccggcccgagaacgaaaaggaccccacctacgagtacaccgacaagggtgccaccaccgaaatctatgttgacgaggtcaacgagaccgtcaccgtggtgaagatcaactactacctggccgagatcaccgacatccgctccgacgatgacggcgagttcgccaccgtccgcatgctgggcacccaggaccccctgggcgactccgtggacacccggaagatctactgcaagggcttcgctgaggacgactatgttgtcgtcactgtggatgtggacgaggacggcgacgccttcgtggccaccatcaacgatcccgccaccgccgagggcactgtgacccgcgtcaagaaggacgccgatcctgaggaggatcagggcaactacgtcaagctggacgacggcaaccagtacaactactccaagtggaccgagggtgatgtggacggcatcaacgagaagcaccccaccctggatatcggctaccgcctgttcctggaccccaacggctatgtcatcggcttcatcgccctggatgactactatgccaactacctgtatgtggacgccgttgacgtgtccctgaagaccatcaccgccaaggtcgtcttcaccgacggcaccgccaagaccgtggagatcgatgacgagtacatcgacctgcactccgacagacaggacttcaccatgacccaggctgctgtcgaggccatgctggaggagcacgtcttcgcctggaccgtgtctgacgacgtctacaccctgcgtcagatcctgccctacgcgaacgtgaacgaccgagatgacggcgacctctatgaggacaacaactacaaggataccgaggatcacgctgtcggcaacggaaacaacaccgccgccatcaacagcgacaaggccttcatctatgtgaacggcaccaagtacatcgtggacgagaagaccgccttcatcgacaccgatgagaaggtcctgtacaccggcttcgagaacgtccccgactacgtggacaacgatgccaccgatcctgtgaagttctgggccatcgacaagaacagcgacggcgccctggacgtggtcttcgtctactccggcgaggcctccaacagcaacaagacctacttctatgtggctgattgggaagcctatgagtcctatgacaagaacaagatgtacaaggaagccaccgtgtatgtggacggcgagaagaccactctgatcttcaccgccgatgcccaccaggagatcaccaccggcaagtccggcctgtatgtggtcaaccgcaccaacggctccggcgtggtcaccgacgcggacaagatcgcggtcagcgcggtccccgaggtggtgggctccagagccttctccctgggcgacagcaacgccgaccagtggaccgccaacagcgagaccatcttcgttgtggccacctatgagctgaagaacaacggcaaggacctgaagagctccgctgacgtgcgcgttggcgacctgaaggacatggaagaggacgacgactactacacctatgcctatgttgccaagcccgacgacagcgatgaccccgccgagctggtgtacatcgtcaagcaggagaagtccgagtacaaggccatctccctgaccgttgacggcaccgccgtgagcgccgccgccgccaccctgaaggctggcgagacctactcctacacctacaccgcccccgatggcaagctgatcgacaccgtggccggcatcgccgccgctgactacaccgtagccgcggacgggaagtctgtcgccatcagcttcaaggtgaaggacaagactgacatcgccattgccctgaagaatgagcctgcggctcccgagacccgtaccctgactctggacagcaccctgaacaacgccaaggtctggagcgcggacggcaagactctcatctcctccagtgcttccaccgccttcggcacggagtaccaggtggcggagggcaccactctgctgatccaggattccagcttctctactgtcggcgcccaggtgcaggacagccagggcaacttcatcggcgaggtggagaaggccggcttcctgaccctcaccgtgaacgaggatatgaccctgagcaagactgatgtggtcagcgtctatgccatccacgtgggcgagggcgtgaccctgagcaaggtggagaatggctccggtactgaagtgacccccgtttccaagaacgagaacgtctggtacgtcaaggcctccgacaatgcccagaagtttacggtcaagaccgctgatgccaatgccgtgatcctggtcaccggcagcgatgtgagcaacagcaccgccgagaccggcaccaaggccagcgctcaggtgctggataactccagcgccatcagcgcggatgtgtatctgtatgcggcttccaaggtgaccctgaccaacgccacctccactgacattacctccaatgactatgtcaaggtgggagagactatcgctgtggctcctgctcgcggctacgccggtgtcattgacaacgccgacgtgggcgacaacctggaggagtacactgttggcaacgcggatgtcaccctgaatggcggacgtgaggtcactctgaacggtgtgaccgccaccgtcaacagcaaggctgtgaccagcggccagatcgtggcaaatacctcggataacctggtggctgcggctgtggagagcggcatgtcggtgatcgacaccaccggtggtgccaagtttgatgatactgtgtactctgccgccgctgtgtctgcggacatcgagctgagcgccgctgccaagctgaacctgaccagcgtgactgtctcctatgtgagccagccttccggcaagcccgtcgagatcgcggatagcatggacaccgaggtttatgttgtgcccggcaccgtgatcgtggttgagggctccgctcccgtgactgtgaccgacgggtctgatcctgttgaggtcgacgagcgcgatgacgttaccaactgggtgaagctgaccgtcggcactgtggagctgactattagctaagtctcgagcataaaagggatacccctgttatatggcggggggaaaccccggacccatttgggtccggggtccctttttacttgcttcgggtctgttcctcttacacggtgcaaacggggggaccagggggaaacgtcaaccccctgcctgcccaggcccgggacgccaggcgcaaagccggaacagcgcattgacccaaatgacgcagggcatcagcggcagcggcgcgagacgctggtcagtgcgaaagccttgccgcgccgctcaggtccaggagagctccgctcggtgtgtcctgtaccgggggggcgggggaaagcggactgccggacccaggcggagccgtggtcccgccgggaacgtcccccggcatctctttggtccctttctggaccttcagaaagggacccgccccgcagggcgggcacctctatggtccgcccgcgtggggcgggcggaagggcgccacctcacccgtcacggcatccgccgtgacgccttcccccgagggaaaggcttttgggggacacagcgtgggccgagccactctcccacaaagggaagctgcccaaacaagatggaagcgatcgtttggaaggagcgcacagtgtgcgccccttctgctgttttttgtgaaattggattgacgggaacatacaattttggcgccggggctgggagtggtagggggcgccggggcgggcagagctttggagaggagaacgctgagggcctttcagagaaaggagggggagaggggatggatctgacgacgctggctgtggcggggatgtctctgatcgggacgctggcggggacctttggaggcatcctggtgtccaacaagctgaccacctaccgcatcgagcagctggagcagaaggtggccgcccacaacagcctggtggagcggacctacaagctggaggggcagatgacggaggtgcagcacgacatccgggacttaaaatcggagatccggacatgagcagcactgtgatcctggccgcggcagcggccttcgcactggggtgcgtgttctgtctggggctgtggtggctgtccgcccaccggtccagaagggggcgcatggagaccatgaaagccgccgtctggctgtgcctgttcaatggctgcgcctgggtgtggtgctcctatctgctggcctatctgggccgtgagcagatcgcagaacagctatccgggaaagccgtcacagagatcattgccgtgatcctggcttacgccatcaaatccatactggagaacctgagcaaacataacaactggccggatagatccggcaaaaaggaggaaacgacccatgaatgaactgaccaactatctgcccatgctgctggccctggtgctggcgctgaccctggtgaccaacatcatcgtacaggtgctcaagagcctgctgtacgatatgctccccaccaacctgctggccttcctggtggccgcggtagtgacggtgggggcgggcttcggcctgtggtcctattaccgctttgccatcaccggctggatgatcgtggcgctgatcgccctcatcttcctggtagccttctctgcgatgttcggttatgacaaactggtgcagctgatggagcaggcggggtggatcaaggcacagaagtgaggaggcgcactatggcaaccgctgaaaagatattggagatcgcccggtcgcagatcggggccagagaatccccggccaacagtgacaacgtgaagtataacaccgcctactatgggcgggaggtgtccggaaaatacccctggtgcgccgtgttcgtctggtgggtgttccgggaggccggggctcccgagttgtactacggcggcggagagaccgcctactgtcccacgctgatgtccttccacaagaagcaggcggtgactgactaccggccgggagacatcgtgttcttcaacttctccggcaagagctccgccggtcatgttggcatctgtgagagctgggatgggacctacatcaccaccattgacggcaacaccggcggtgccagcgaggacaacggcggggcggtgatgcgccgcaggcggcataagaaatacatcgtaggggcatatcgcccagactatgaggaggaagagagcgtgacctacgagcagtggctggagtacctggagagataccgcagggaggcggccgccaagaaggcgtccatgccggagctgttggcggaggctgtggagctgggcttgacggacggcagccgcccccaggaccttatgacccgggaggagggcgcgatcatggcccgggcagcggcgaaggccagataaagcagaggagccgccccaatatgggcggctcctgacatcaaatttgacatgattttatatgggtaattttgatgctgaataatcattcaactaggaaaaaatggagaagccttacagcccgaggggggaggtgaagttgacaaacagtttcgaagacgcacctcaagtctgcacctcaacccaaatcgcgacccagcgtaagcggttgcgatctggaaaggaggagcaagggagcgggcggatgacgcttttttgtgcgtgagcataaaaaagcgccggagcaaagcggactttgctccgacgtggtgacccagcggagattcgaactccggacaccctgcttaaaaggcaggtgctctgccgactgagctactgggtcatgaaatcaatcaaacgaaaaacaggactgcctccgcaactgccggaccagaaaacacagaaaaaagtggcagggatggctggactcgaaccagcgagtgagggagtcaaagtcccttgccttaccacttggctacacccctgtatctccgtcagatggggagaaattgaaaaggcaaggaccggagccgacgctccggcccttacgccttgaggtcatatggggtgggtaaagggactcgaaccctcgaccctcggaaccacaatccgatgctctaaccaactgagctacacccaccatataacagcgacagcagagggaagatggcacgcctgaagggactcgaacccctggcccactgcttagaaggcagttgctctatccacctgagctacaggcgcatatggagcgggtgatgggaatcgaacccacgcgaccagcttggaaggctgggattctaccattgaactacacccgcatgggcgcctcactctctgtgtcagcttgaaaatgataccacatggaagggcgcttgtcaatcccttttttcgatttcgccctgcggaggacctccgcagggcgaaacagggatcactgggggtggggagcggcgggctgggaacggcggaccagcacccactggatccggtggtcagctacctgctccacctggaggtccaggccacccgcctctacgtggggacggctcccatcttccggaatggtgcggaggcagctgagcaccatcccgcccacggtgtcgtagtccgcgtcctccgggggatcgaatcccagctcttccgccagagtgtcaacgctgaggccgccgctgcaccgccagacaccgtcctccagatgctccagctccgggggctccgccgggtcgaactcatcgtagatattgcctacgatctcttccaacagatcctccaggctcacgacaccggccaattcgccgtactcgtcgatgaccaccgccagatgtacctttttgtgctgcatatcccggaagaggtcgtccgcagagagagtctccggcaccaggtaggccggacgcatcagctcccgcacagtgcggtgccgggaagaggccatatccagcagaagatcccgggcgttcaggatgcccaaaatatcattgagatcgctgccatagaccgggaagcgggacagcccggtggcgcggatgacgtccaggacctcgccgggcggggtgtccacctgaatagcggtgacatcgcctacccgggtcatggcgtcgctgaccgagaggtcgccgaattcaaagacgttctggagcagttccttctcctccgcatcgatggctccgttctcgttacccaggtcgatcatcatgcggatctcatcctcggtgacctgttcctcctcgtcctcggtcttcatgcggagcagacggagcactccattggtggacaaggagagaagggccaccacaggccgggcgatgaaggcaagcgtggagaccacccggcaggagagacgtgccatctccagggacttctgcatggcgatgcgtttcgggaccagctcgccgaagatcagagtaaagtaggagaggatcagagtgatgacgaccaccgagaaggtatccaccacggagatggggagggcggtaaagccaagatcctcacagatccagcggaccagatactcggagaagctgtccgccgcaaaggcggagccgaggaaaccggccagcgtgatgccgatctggatggtggagaggaagccggctggctgctccagcattttcagcagcctgggagccagcttgtccccgctctcttccaacatccgcagcttgtttgcgttgagggagatcaccgcgatctcggtagccgcaaaaaaggcattgatcaggatcaggatgacctggaccagcagttgtatggcaatagttgacacggatcgttcctcctcaaaattggacatcaggatgcaaaaaagcacagccggccctatcctggatagggcagctgtgcttttttacagtaataaatcgggtcgggcgcagtcgctgtctgtgtccataaacgcggataactccttcgagccggtccgaccccgaaggggagcggccggcgatcctttcccgctgaggggcgggatgataaaaaggataaaggaaagaggggcctgcgtcaagagaaaagaggcggaattaacggcatttttacagggagagatcaaatcttagcacagagcggcgtcacagaagccgcagcagtccacgccgccgatctttttcaccagaggcgggagatagtgctcggtctgggtgatgcagcgggggttggtacagacgggcttggttccgatctccacagcgggaggagcgtcatcccggggttggagggccagatgctccagaagggccatccgggcaaacatcccgtagcgggcctgctggaaatagacggcccggggatcgtcatccacgtcgatggagatctcatccacccgggggaggggatgcatcaccagcatgctgggcttggcccgttccagcttgcgccgggtgaggatatagatccccttgttgcgctcatactccagggggtctacaaaccgctcccgctggatgcgggtcatgtagaggacatccagctgggggatgacggactccagaccggtgacctcggtgaaccacatattgttctcacgcatgaagacccgcatatattcgggaacggccagatcccggggagagatgaggaaaaacttgatatcccggaacttggccatggccttgatgagggagtgtaccgtgcgtccgttcttcaggtcgccgcacaggccgagagagaggccgtctacgcccccccgcaggcgggtgatggtggtcagatcagccatggtctgggtggggtgcatgtggccgccgtcgccggcattgaccacggggacggcggagtagagggaggcggccttggccgagccctcccaaggggtgcgcatcaccactacatcggcgtagccggagaccatcttgatggtgtccttcagggtctctcccttggcaacggaagaggagttaggatcggcgaagccgaacaccgtcccgcccaggcgcagcatggcggtctggaaggagaagttggtgcgggtggagggctcgtaaaacagattgcacgacacccggcccttacacacgtccacaaattgggatgggtcatccatgatctggctggcccgggcatacagggcgtcccactcatggcggggcaggtccccaaaatcgatcaaatgacgcatcgcgctccactctcctgtcatccgtattcttcgagtaatcctaccacaaaccgcccttttccgcaaggcatcatggaaaagtctgccccactttttccaaggatggactcagcttccgggaaaacagaccgcaggcagaaaaaggcccgggacctggccgttaatgacaaaatttgcccgcatgaaagccactcattttcgctaccctatgtagcagagaaatggagggctgacctttgatctgggtttggaactttatcctatacagctttttcggcttcctgctggaggtggcctacgcccgggcaactggagggcggggggaccgaaaaagcctgcttgtgctcccgctgtgcccggtgtacggcgtgggggcctgcctgatcctgctgctcccgcggactgtcatccagaatccctttacgctgttcctgctggggggcctggcggccacggcggcggaatatgggatggcaattttgtacgagcggggactgggcgtctccttctgggattataccggcctgccgggcagcatccaggggaagatatgcctccccttttccctggcctggggggcgctggccctcccactcatctacttcgtccatccggcggtggcgcggctgaccgccctgatcccgcctggagtgacctggacggcggccgccacggtggcagcggacatggcggtgtctggggtgctgatgaaggtgactgggaaccgggactgtctgcggtggtatcaaaagcgggcggaaaaggcacgggagggtggttgacagccccctgagaaaccggtacactgaagctgaccgcggcaagcgggatcggagctggaaggactggagggccggaaatggaggcaatttactataccgtgagcaatattaatggagattatgctgaaatggtatcggatgatgggcagaaacactccctgaccatgtttctgctcccggaggggaccacggtggggagccggctgaagctggagaactttcaatggagcctgtgtggatgaacagagcggtccgcggatggaccactctgactgcgggaaaagtcctcaatttgctcgccgcagcccttgctctgcaagggctaggggatgtgattccattccaggcgggctgccgccccctcgagctctccggtctcatcctgaaacatctgcaactgaaaaaaggggattcgaaatatacagggccgcggatgctgtgcatccgcggccctgtatatttgacgggaaaaaggatcacttattgctcctgcgccagatgtgcattttttcggcgtcggcaatgagctgctcccggaagtcggggtgggcgatggagatgatggcctccgcccgctcccaggtggacaggcccttcagattgatcatgccgtactccgtgaccacatagtggccgcaggagcgggggtcggtgcagatggagccctgggtcagggtggggacgatgcggctcttgacagtaccgtccttgccggtgacggtggaggacatgcagatgaagcttttgccgccgttggacaggtaggcgcccatggcgaagtccagctggccgccggtgccggagatgtgcttgatgccggcggactcggcgttgatctggccgaacaggtctatgtcgatggcgttgttgatggagatgaagttgtcgatctgagcgatgacccgcacatcgttggtgtagtctaccggggcacccatcacgtcggggttgcggtcgacgtagtcatagagcttctgggagccggcggcgaaggcgaagacctggcggcccttgtcaagggccttgtgccggccggtgatcttgccggcggccgccatgtccacgaagccatccacatacatctccgtgtggacagacaggtccttcaggtcggactgggcgatcatggcgccgatggtgttgggcatgccgccgatgcccagctggaggcaggccccgttggggatctggggcaccaccaggttggccacagcccggtccacgtcggtaggctcgccgcctgcgcccagctgagccacgggggggttgtccccctccacgacataggtcacgtcctggatgttgatctcggtgccggtgaggccgtacacccagggcatattctcgttgacctccacgataatgcacttggcacgggacatcaggtcggccaggtgggaggccgccaggccgaagttgaagttgccatgggcatccatgggggtggtctggagcatcaccacgtccacaggggccagattctcccggtagaagcggggcagctcggagtagcgcatgggactgaagtagcccatgcccttggtgatgatcttgcggtcgatgccgctgcagtgccaggagtgccaggtgaagtggtcgccggcgtcctccgccttggcgatctcgggcatccacatggtgacgccgccccggacctttacattggtgagctcatccctgcgggcggcgagagccttgtccagggcaatggggtggttggtgcaccaggtgtagtccacccagtcgccggatctgaccaccttgacggcctcctcggccgtggtcagcttctgctggtacattgcttgataatccatgaaataacctccaaactcatctgtatttgcggtcagatatccaggtaatagggcttcatcaagctttcctgctcggtggagtccttgggatgtccggtgggacggggcgggtcctggaaggagcggcggcggtcctgcccgcggccctgggaggactttttatgcttggacggcgccggcttccggctctccgcctggggggcggtgtgggcagagcggcccttctggccctcgctcttctggcggggctgagcggcctgtccagcagagcgctttcgggggcgcccgtgctcctccctggaggataccggggagagagtcagccggcggggagccagcagacgggcagtggcgtccatgatccggtccccagccagggggtcggggcggtcgaactcagtgcagggcatggcgctgcccgtctccaggcgggtgccgggccgggtcagcttggggcgggcgggagcctgagcgggcagcggggactccgccggggcggcgggcgcctcccccttggacttgctccgcctgcggcggcgcttcttcttctctccgccctccaccgtggcctctggggacggggcagaagcctgagcggacttctcctgtttctcctgagctgcggcctggcgggcggcctcccgctcccggcgcagctcacgggcggcggctcgggcctcggcgtcctcctcattgatagtgcggccgttcttatcctttttgggaagctcgaagacctgcatgggccaggggtgctcctccaccacggggatggagcggtgggtcagcttttcgatctcccggagcagaggtttctcggagaagtcgcagaaggcgatagcctcgccgccacggcccgcccgtccggtccggccgattcggtggacataggtctcaggtacctcgggcagattgtagttgaagacatgggacagctcttcgatgtccagcccccgggcggcgatgtcagtggccaccagggcctggagtttcccggccctgaagtcggccagggcctgctggcgggcggtctggctcttgttgccgtggatggcggcggcggtgatcccgtacttgctcagctcccgggccaccttgttggccccgtgcttggtgcgggtaaagaccagggcgtttttcaccgccagctcctggatcagctgggccagcagccgggtcttattgcccttgtccacgaagtacaccgactgccggatggcctccacaggggaggagaccgggtccaccgccacccggacaggggagcggaggagagagttgaccagatcggcgatctccggcggcatggtggcagagaagagcatggtctgcttccgggcgggcagccacttcaggatcttcttcacgtcgtggatgaagcccatgtccagcatgcggtcggcctcgtccagcacgaagatctccagctgctccagatggacgaacccctggtcgtggaggtccatcagccggccgggggtggccaccaggatgtccaccccccggttgagggcctccacctgggggttctggcccacaccgccgaagatgacagcgtggcgcagggacagatggctgccataggcctggaagctgtcaccgatctggatggccagttcccgggtgggggtgaggatcagggcgcggatggggcggcccttcaccggggcggcactgagccgctgaaggatgggggcggcaaaggcgcaggtcttgcctgtgccggtctgggcacagcccagcacgtcacgcccttccagggcaggggggatggccttctcctgaatgggggacggccgggtgtagccctgttcctccagggcggagaggatgggggcgatgagccctaagtcgcgaaatgtcattcagctcttcctttttcgtgatccgggcgcggtcagcgccgcgccgggcccccatttccccgggggctggggcgggctgccgggatcaccggcggccgttcagaagggccaggaccatctgagtggtctgggccaaggtctgcccaggaaggcagtccaccgtcaaatcggcatagcgctcgtagaggggggcgcgctgggccagcacgtccgccagggtctgccccggctccatggcgatccccctggtggccaggttctggatgcggctggtcagctcctccatagggacccggagatagaccacggggcccagctccttcaggtgggccatggtcccctcccggcagacggcgctgccccctggggcgatgacggtgcggcggcagtccacggtgcggatggcctcctcctccacctggaggaagtgcttcaccccgaactggtccaggatgtcctggagcagcaggccctcccgctgctggatcaccaggtcggtgtccagaaagccgtagcccaaggctttggccagaagaacgcccacagtgctcttgcccgagccgggcatgccgatgagaatgatgttgtccaaagcgtgatcctacctctgtacagactgatatccgaattagtttaacacaaaaacccggaaaaaggaaggggaaatgtacgcccagcaggataaaaacaggagcggcagccctgaaagctcagggctgccgctggattcagtcctgggggctgtcccaccagagggcctccccggccgccagggaccggggaacatccaggatacgctggttggcactgccacggaaacggaggcggatgtctttctgctccagaaggaaggggccgtccaccagcacatccagctcatgaagaagttcccggtccagcggccccacccggccggcggccagctcctcgtagaggtagccggtgtagcaccagatatccctgccggggagctcctgccgcacccggcgtaccagggagagcacctccggctgattcgccggggccatgggctcgccccccagcagggtcagcccgcggatatagccggggcggagaagatccaggatggagcggacctgttcctccccgaatccctggccatattggaaatcccaggtctccggattgaagcagccggggcagcgatgggggcagccggacacaaagagggagacccggacgcccggtccgttggccacgtcaatggggcggatgtcggcgtagttcataaaaacctcttactcatatgtatctccgccccgcagggcagagatacatcctatatttttataggtgcagcacccgggacttgatctccttggtcttgcccacgttccagtagttctctcccaggtagccgcaggtgcggcgggtgacgttcatcttggcctggtcggtgttgtggcacaccgggcactcccactgcaggtcgtcgttgatggtgatctccccatcatagccgcagcactggcagtagtcgctcttggtgttgaactcggcgtactggatgttgtcgtagatgaaccggaccacctctttcagagcctccaggttgtggcgcatgttggggatctccacataggagatgcatccgccggtggagatcttctggaactggctctcaaaggtgaacttggagaaggcgtcgatgtgctcccgcacgtccacgtgatagctgtttgtataataacccttgtcagttacatctggtatcgtcccgaagcgctccttatcaatgcgggcgaagcggtagcacagggactcggcgggggtgccgtacagggcaaagccgatgttggtctccttcttccaggtgtcgcaggcggagcgcagacgctccatcaccttcagggagaaggcctgtccctcaggggtggtctgggagcagcccttcaccagcttggtcacctcgtacaggccgatatagcccagggagatggaggagtagccgccgtagagcaggggctcgatgggggcccccttgggcaggcgggcaatggcgccgtactgccagtggatggggctggagtcggagcgcacgttcttcagggcgttgtggcggcacatgagggcctcgaagcacagctggagccgctggtccagcagctgccagaacttctcctcatccccccgggccaggatgccgatctggggcaggttcagggagaccacgccctggttgaagcggccctcgaacttgtagttcccattctcgtccttccagggggagaggaaggagcggcagcccatgggggagaacacgttgccctcgtagttctcccgcatcttcttggcggagatatagtcggggtacatccgcttggcggagcacttgacggccagctcggtaatgtagtcatacttgccgcccttcaggcagttgtgctcgtccagcacgtacaccagcttggggaaagcgggggtgatgtagacccccttctcgttcttgatgccctccagccgctggcgcagcacctcctctacgatcatggcgttctcctccagataggggtcaccttcctgaaggttcaggaacagggtgacgaagggggactggccgttggtggtcatcagggtgttgatctggtactggatggtctgaacgccgctcttcagctcgtccttcagccggtcggccaccagtcgctcgatggtggcgtcgtccacctgaccggcgcactcataggtgatgtgctttctgaacttctccttgctgcggcgcaggtacttgcccaggtggctcatatccacggactgcccgccgtactggttggaggccacacaggcgatgatctgggtggtgacggtgcaggccacctggaagctcttggggctctcaatgagcttgccgttcatcacggtgccgttgtccagcatgtccccgatgttgatgaggcagcagttgaagatgggctggatgaaatagtccgcgtcgtggaagtggatggctccctcgtcgtgggccttggagatgtactcgggcagcaggatgcgccgggtcaggtcccggctcacctcgccggcgatgtagtcccgctgggtggcagcgatcatggtgttcttgttggagttctcctccgccagctccttgttctcgttgcgcagcagggagaggatggactcgtcggtggtgttctgcttgcggaccagggcgcgggtatagcggtagatgatgtaggtcttggccagcaggaacttattctccgctaccagggcctgctccaccatgtcctggatgtcctccaccagcaggcgctggcgcctgcgggcctcgatgctgtcgatgatggagtcgatgcgcgcctcctggatgcggtcctcctccgggacctcggcgttggccttttggatggcgagcttgatcttgctgcggtcgtagtccacgatggtcccgtcccgcttgatgactttgatggcgctcatggcgtactcctctcccttgaatcctttgtaagtgggtgagcgggggccggggccgcccgcataaaactctgccgggccctgattataccataagcggcatgtggtgtccactatatcttgtgggtgatttttttaaaaacaaaaaaagaccacaaaatctgttttgccagggaaagggcggaaaatcggggggtgcgggagttttccgccggcgggaggttgccccggcgggaaaaacgtgatatactggactcaaattttcagcgttttgacgattttcatctgggaaggagagacccatgggagagcggatcgcagtggcgatgagcggaggagtggacagctcggtggcggcatggctgctccagcgggaggggcatgagctgatgggggtgaccctgaggctgttcgaccgggagacgccggaagggacatgcggcgccagtgacgacctggcggacgctcgggcggtggcggagcggctggggatgccccaccaggtgctggactgccggacctgcttccgggagcgggtgatccgccccttcgcggcggcctatgaggcgggctgcacccctaacccctgcgtggactgcaaccgggggatcaagttcggggagctgctccgcaggtccctggagctgggggcggaggcggtggccaccggccactatgtgcgcatggagcgggacggcgccactggccgctgtctgctgaaaaaggccctccacccggagaaggaccagagctacgtgttgtacagcctgacccaggagcagctgtcccgcagccgattccccctgggggggctgtccaaggaggagatccgggccattgccgcacggcagggcttcggcaacgcggagaagaaggagagccaggatatctgcttcatcccagacggggattatgccgctttcctccgccggtacatggggagggagtaccctccggggcccttcctggatcagaacggcaggcgtctgggtacccatgaggggatcgtctcctatacggtgggccagcgcaggggactggggatctcctcggaggggcggctgtatgtgaaggagctgcggccggaggacaatgcggtggtcctgtcggacaacgccgccctgttcacccgcgtcctgacagcggaccggctgaacctgatccccacagacagcctcagtgcgcctatccgggccaaggcccgtatccgctaccgccagcaggagcagccctgcaccattgagcagacgggaccggacaccgtgcgcgtggagttcgaccagccccagcgggcggtcaccccgggccaggcagtggtcttttacgacggcgacctggtgatcggcggggccaccattcagaaaggaagagagtcatgagcaaaaagcgcagccagagaaagaattccaactacaattaccgccccggccagaaggcaggagaggacccccaggcgctccaggagaacagccggaccaagaaattcagccccgcggcccggaatctgctgttcgtggacctgatcttcctggcggtgtgccaaatgatggagtccggcggcctgctggacgacgtgctctctgcgtggctcaccctggtgggcctgatcctgctgctggtggcggtgggcatccaattccagttctggcggggccccaagtccaagatccccaaggggcccaggagctgaacggcctatgaagcgggagtatcggaggagcgagccgctcttctcccagtgcgggctcaactgcggcctgtgccccatgtaccacatccgtgaggagtcccactgtccgggctgcggcgggccgggacggccatcctgccccatactccggtgtgccggtgagcacggcggggtggagttctgctccctgtgtccggattggccctgccagcggtatgtccaggagcaggccgactccttcatcccccaccggaacgcccgcagggacctggagacggtgaagcgggtgggcctggagcactaccgggagacgctgggcaagaagatggaggggctgcgcttcctgctggagcggtgcaatgacggacggcggaagtcgctgttctgcaccgctgtcaacctgctggagctggaggatgtggaggcggtcatagccaggctggaggaggagttcggcccagagtatcccccggaggagcagaaggaccgggggagccgggcggctgagctgttccgggagcgggcgcagaccaggggggtctccctgaagctggagcggcagcggaagccctgaactggaaagaacgtggaaaaggtggagaaagaccgatgaatattcagtgggaagcgggaaagtacacagaaaactttgattttgtccaccgatacggtgagagcgtgctggagctggtggaggcggaagcaggaggcctggtggtggatctggggtgcggcaacggggccctgacccagaagctggcggaccgaggataccgggtgctgggggtggacgactccgccgagatggtggccgaggcccgggcccttcatcccggactgcccttccaaaagggggatgcggtcaccttccagctggaggagaaggcagacatcattttttctaatgctgtgctccactggatcgacgggagccggcagcaggccctggcccgcaacgtggccgcccagctgaagccgggcgggcagtttatctttgaattcggcgggaagggctgcgcggagcgggtccactcgtcgctggagcgacagttcgcgcggagggggctggcctatcccaggaccttctacttccctactatcggggagtacgctcccattttggagcgggcgggcttccgggtggaatacgcggtgctgtttgaccggcccacagagcagaagacgggggacggcctggccgactgggtccgcatgttcgtcaaaaaaccctttgaggggttggagcctgccctgggggatgagctcctccgggcggcggtggaggagctgcggcctgccctgttccgcgacgggaagtggttcgtggactacgtccgcatccgcatgaaggcaaggaagacggccggatgaccaagctggccgggggcaccggtgtgcggtgcacacggagacgtggtgcggaggggagagccaaagcagtagatgaattattcctttacagaaaaggaaattattattaaatatatccaaaaattttctgaaatgtaaataaatatatgttacaatgaaagaagaaaagaagggactgtagagcctaaaaaggagatggaaaaaatgaagctgaaattgatacttttggggagcttgtccccgctgattggactgttgatttttttccttcaattacaggtgcccttccatggaataaaatacttagtgatcctggcgatcatgtctgcggtatttttagcctatttctttttctgtgcattctttttttccagtaaacaacacaaaaagaacagcctatacttttttgtgactccctttatattgttcttggtcaattttataggatggatccaaaaatatgttgtattggcgctgatcgtatcaggggtatccgcaccatttcactatgttctgccagatttgatatttccaggagacaaatatcacttaataatgcgcatatttcctttggccatttgttggatcgcgtttaaactaggggagagagtgggtatttacttcaaagaaagaatttaatttgacatttaagtcttaccacttctaacatcttaatatctgctcgtttccttctctaggcccatagatttgctgactgtgcgacctccaagaacgaaaaacagaagggtatgccatctgaggcatacccttctgcgttctcgtaaagatgtgtgtgggaggaacctataaggggacaaagaaagaggagaccgagaaagctgtcggcggttatctctggtactcgaactccaggtcatacagggagacgatatctccgtcctggatgcccatctcctccagtttgtcgaacagaccggactggcgcagcttctggtcaaaccagttgcgggactcgaaatccccaaagttgacgctggcaatgagctgctggagccagggggcctccaccacccaggtgtcatcgaacttctcgatggacacgctgccgttggtgtccacctcggggggacgctccacgtaggtgggctcgtagaccatcacagggggcagctgctggagctcctgggcagcccgcttcaccagctcccgggtgccctggtgggcggcggcggagatctcgaagagctccatgccctgggactccacatgggcgcgcagccggtccagcagggcggggtcctccatgatatccaccttgttggcggccacgatcattttccggccggccagctcgggggagtactgcttcagctcggcattgatggcctcgaagtcctccaccgggtcccggccctcggagccggacacatccaccacgtggatcagcagccggcagcggtccacatggcgcagaaagtcgtggcccaggccggcgccgtcggcggcgccctcgatgataccggggatatcggccatgacgaaggagaccccctcctccacataaaccacccccagattggggaacagagtggtgaagtggtagttggcgatcttgggctgggcccggctgaccacgctgagcagggtggacttgcccacgttgggaaagcccaccagccccacatcggccagcagcttcagctccagcacaacctcccggctctcaccgggcaggccgggcttggcgaagcgggggacctggcgggtgggggtggcaaagtgctggttgccccatccgccccggccgccccggcacaggataaagggggtctcgtcagacatatcccggatgatctcgccggtggcggcatcccggatgacggtgccccggggcacctggaggagcaggtcctccccgtccctgccggtgcggcggttgccgcccccgggggcgccgttgcccgccacgtatttccgcttatagcggaagtccatcagggtggacatgtgatcgtccacggtgaccaccacgttgcccccgcggccgccgtcgccgccgtccgggccgccggcggccacatatttttcccggtggaaggagaccacgccgtttccgccgctgccggagcggacggtgatcttcgcggtgtctacaaagggtgctgccataacaggcacctccttttcagggttggaagtgacgccggacggggcccggcggcggaatgagaaaaagaaagccgcaaacgccatccgtttgcggcttttttcagcagctcaattactgagcgatctccacgatggagacctgcttgcggtccttgcccagacgctcaaacttcaccttgccggacttcagggcgaacagggtgtcatcgctgcccttgcccacgttgacgccggggtggatgtgcgtgccgcgctggcggaccaggatattgccggccagcacgaactgaccgtcggcgcgcttgacgcccaggcgcttggcctcggaatcacggccgttgcgggtggaacccacgccctttttatgggcgaaaaactgcagaccgattttcagcatgtcttacacctccaagacgataatgtgatcggggtactcctcatgcagctgggcgaagtggaccatgagagcggtcatcagcgtctgacaggtgctctcggcggtctgacccagcttggcggggagcttcagggagagataggcgtccttctgccggaccttgacggcggcctccagccccagcacgtcgttgacggcgcactcggccagacggaccgcgctggtgacggcggcgcagacgatatcctccccctccggggcgtatccgctgtggccctgcacttcaaagctcacgatgcggctgccctcggtatgaaaggtcacggtggtcatgatcaggcctggatggcgccgatctgcaccttggtgtagggctgacgatggccctgacgcttgcgatagcccttcttgggattgtacttgaagatccggaccttcttgcccttgccgttcttcaccacagtggcggccacggaagcgccctccactacgggagcgccgaaggtagccttgtcgccgtccaggatggccaggaccttgtcgaaggtgatggcctgtccggcctcggcctccagcttctcgatgaacagggtatcgccctcggtcaccttgtactgcttgccgccggtctcaataatagcgtgcatgtatgattcaactccttcataacgggctcgctgtcgggggcagggaggctggctcccattttgtggcccattcaaagcggctctgatagtttatcaatggggctttgatttgtcaaggggacggggagtttttttggaaaattattttagggacgggcaccgggaagggccagcaccgggtcgggcacagtcaccacatacttctccagcagggccaccggatggtaggacagcttggaggtgcgcagtcccgggtcgcccacgtcgtcctcgcggttcaggaaggagaccccctccccggcataggcctgggcaaactggctgaccagcatctgataggcaccaaagatctcccggtccgccttctcgatgtggatgaacagggtgtcccccagcacttctcccagagagaagccggccagacggtcctccaccatcagcaggccgcccttcatgtcgtagaggtccaggttgttcaggacctccttggttttgttcaggtcctccagataggagacggagtccttctcgtgctcctggacatagcggtccagaagggcgaggatcatgggcaggtcctcaggcacgatagggcggaaggtccaggtcccgtaggtcttgtggaagcggttgacgtgattgcgctgaccgctgagttttttgccccggaaaaacttcaggtcctcgctgcggtagagatagtcaaaggtgtcccggtccgcctgggcggtgcttccagggaaaaagtggagcattcggtcaagctcgtccttggggacggggacaaaacgcaggggcagcttgttctgcaggcagtattcggcaatctgccggaactgctccagcctgccccctcccaagggaagggtaaaggtgggacctacgccaggatagtccaccttaaaatagagagagttgtcccacagagcgtattcggtgcggtacatgtcccgccagatgaaaacggtgcccggtgtggtgtcacacaggcggctgccgctgtaagcaaaataggggcgcagccggggcaggtcctccagctgcaggggtcggaaatccagcatacgatcaagttccttttgtttctctttttgtctcgtaattcaggcggccctggtaccagccggtgacgccgtttttctttaccagggtgcccatctctccggtgcgggccacgatggaaaggcagtcccccggcacgacgggcagaaggtagtcagtggagtcctcgcaccggagcccctccgggctgtcataaagatagctggtgaggatggggagcacccgtccagtctccagatggcggcacagagataactccggtccccgctccagcacctcgacccggttgcggccccagcggatgttcagggaatcctccgaaggcgcctgtgggtccagggcccgggccgtgggcagcccgtcgtaggcggtccagctgaagtccggagaggactcctccgggatgataagggcgttgagctgaccgtccagcttgaggacgcagccgccgtcgatggagatgatgtgccgtgcgcggtcgatgatgggggcagcggaggggatgcgggggtcatacagggtgacgggccagtggcccaccaccacatacttgccggtgtgggcaaaggagtggccctggccccagtagtcgtcgtttttcatgcagtgccaggcgtccagctcctccatgcggtccagggaggggactccgccgtggacaaagaccaggtgttcgctctccaggatggtgggcagggaacgcagccagtcccagacccaggggaaggtccggcgcaggcactcccgcaggcggggcaggtcgtcccagcggtcaaagccggcctccctggccatctggcgcaggatactctccgggtgggcgggaagatagacccggaaaaagccctggtcccacaggtcatcttcaaagaaacggaggaccagcccatcacagttgccgcagacagggagaatggtgtggtcctgggacaactccaggatatcccgcagcaggcccagactgtccggccctttctctaggatgtcccctaccagcaccagaatatcacgggacgagaaagcagctttttccagcagaccgcggaaaaaagcgcggttgccgtggatgtcgctgaccgccaggatgcgtctgctgggggccagggcggggtggacaacagtggcgagggccatgaggcgtgctcctttccgggagggtgtggggacgggaatgggcccggtcctgatgctctaacctttatcataacacagaagctgtgacagaatcaagccaaaggggagagaaaaacctatcgttttgcggggagtttttagcaggaaggggaaagaggagggggtcagaatggcaggggggcgcattccccggcggcgaggtgggcgggccatcttgcaggggccgcctccgatatggtagaatgacctgaccggaacaaaatgagccaacaggaaaacagaaggggagcggagcgcaatgaatacaccggagctggagacggagcggctgcgcctgcggcggttcacagcggaggacgcagcggccatactggccatttttggagacgtggaggccaataccttcctcccgtggttccccctgaagtcgctggaggaggcgaggcagctctttgaaaggcagtaccagccggtctaccgggcagagcggggataccaatacgcgatctgcctcaaggaggacgacatccccatcggctacgtcaaggtggacctggacgagagccacgacctgggctatgggctgcgccatgagttttggcatcggggcatcgctgcggaggcagcccgggccctggtagagcaggtgaggcgggacgggctgccttatctcacagccactcacgatgtgaacaaccccaacagcggagcggtgatgaaaaagttgggaatggtctatcaatactcctatgaggagcagtggcagcctaaggacatcccggtgctgttccggctctaccagatggatctggacgggaatagcggcaggccatacctccgatactgggagcaatcccgggtccatatggtggagcagggcatatagccgggcagggattctctgtttacagaaagttcacagggatgacatgatttcgccttaatttctgggtatgataacaccgtacccagaagaaaactcccatttctccctctccttttacaacacacacaggtctgacaccccggtcccatggaccggggtgtcagactgttccggtacaggatggggctatttacagaaaattcacattgcggacatgatttagcagtacttctccgttaagataagaccgtacccagttttcataggatacctcccatttctccctctctttacaacacacacaggtgcagcgccccggcctcaaggctggggcgctgtgctgtccggagagacgcgtgctgtttacagaaagttcataggcaggtcatgatttcgacgtatttcttcggtaggatatcactgtacccaagatcacaaagaattctcccatttctccctctcctttacaacacacacaagcagagagccccggcctaacggccggggctctctgctgtcatttgtggggaaagagattccccaggctctctgcctgctggtcatgcgccccggccggtggccccccgttctgcctccagctggttcatcttccgcttccgggcggcggagaaggccagcttgtccgccagctgacgggtgtccccggactggatgacctggcggtagaggcgaaggttgtcctccaacgtctccagcgcctgggtcagggcgggagcgttcagggagaagagctgggtccacagggggacgtccagggcggccacccgggtgcagccccggaaggagtccccctcgaagccctggtaggcgaacaggctggggtcgtcgcacaccgagacggcgatgatgtgcatcatctggctggtataggcgatgatggcatcgtgctgctccggggtggtgcgcaccacatcggcacagcccaggtgcctggccacccgctccatcagcgcaagatgctccggctgggtcccctcgtccggggtgaggatgtagtgggccccctggaacatgttgggcagggcgtgctgaatgccggaaaattcagtgcctgccatggggtgccctcctagaaaggatacactggagggcagggtccgggcggcatccacgatggcgcccttcacgccgcatacatcagtgaccaggctgccggggcggaagtggtcccgatgctcagagaggaactcctggatgccccggggatgcatgcagaggaacaccagatccgcctgggccagggcctcccgggggtcctcgcagacctgatccacaattccctgctccagggcgtagcgaagggtgggctggcttacgtccacccccacccgcttaaaatcttcaaactctttcagccccatagcgatggagccgccgatcaggcccaggccgatgaccgcgatctgtctgctcataaacgatctcctcgattccaaagtgcgtctgtgggaacgatagcactgtaccacggtttggggcgcaaatcaacactttaacacaaaaaagcgttaaatttttattttgcgcaccggtaaacagtcccgtcctggggctggattcccttggcctggaggagctgctccaccgtgacaaagcagtagccctgcccggagagggcatccgcgatctggagagcggcgtccactgagctgtcgtagatgtcgtggagcaggatgatgctgccgtcctccacatggctgaggacggagcccaccacccgcccagtgtcctggtccttccagtcctccgggtctacggaccacaggacaacgggggagccggcccaccggagccccgcatcgtcaatgattccgtagggcgggcggagccagaagtcaccggagcccagcacggcggagaggacgccccgggttctgcccacctggaggtcgaagtccgcccgagagaggtcagagatgcagctgtgatcgtaggagtgaacgccgatctggtggccgtcttccgccatgcgccggacaagggcctcctgaccttggatgcggtcgcccaccaggaagaaggtggcctggatctcccggagagccagaccgtccagcaggcgggaggtggtggaggttctggggccgtcgtcaaaggtgagagccaccagggggggctcctccggcaccgtcaccgacccgccgcctcctgtctctgcggctgggcctgggccgggccggcacaggcctgccagaagcagtgcaggcacaaggacccgccagtatttaaaaaattttttcctgcaccacatgatgaccgccgcctttcccatcgcgctcactgttcagtatgtgcgctttttccggcagcttgctcagaaatttctgacagaaaaaatgccctccggccggggccggagggcaggaaaagcggatggggcggcagatcagtggttcagcacccgcacccggatcacgccggggatggcgcgcagctcgttggccacctggtcggtgatgcgggtgttcacgtccacgatggtgtaggcgtagtcctttttggatttgttggtcatgttctccacgttgatcccgtcgttggacagggtggacatgatgttggtgagcatggcgggcacgttcttgtggatgaggcagaggcgggagatgccgctccactcctgctccagattgggcaggttcaccgagttgcggatgttgccgttgaccaggtaatcctggagctgacgggcggccatgacggcgcagttctcctcgctctccggggtggaggcgcccagatggggcatggcgatgacgttctttaccgtggcgatggtgtcgttggggaaatcggtgacatacttggccacccggccggtctccagggcggcgatcatgtcctggtcgcacaccagctcgccccgggccagattcagaatgcggacaccgcctttcatcttggcgatggcgtccccgttgatgaagtccttggtggaactggtgtaggggacgtggatggtgacatagtcagacaccttgtacagctcgttcacgtccttgaccacatggacatggcggtccagccgcagggcggcgtccacagacaggtaggggtcgtagccgtacacgtccatccccaggtccaggccaatgttgcacaccagggcgccgatggcacccaggccgatgacacccagggtcttacggtagagctcagggcccacaaaggcggatttgcctttctccacggcggcggctacatccacatttggagtatgagcctgttcctggacccagtccacgcccccgacgatgtcccgggaggcgatgagcagggcggcgatgaccagctcctttactgcgttggcgttggcaccgggggtattgaagaccacgatgccggactcggagcagcggtcgatgggaatgttgttggtgccggcgcccgcccgggcgatggcacgcagggcatccgggaagacgtagtcgtgcatcttggcgctgcgcaccaggatgccgtcctcgttctccacatcctcccccacctggaagcggctcttgtccagctgatccaggccggcggacgcgatcttgttcatggttttgatgcggtacatatggcaattacctcgaatcctgatttctgatggaaggggcggatcactggggagcgatcacaggcttcccgtccggccccagcagcggggtgagcccagaggcatttccgtcccggtgaaagagatactgcaccccggtgacagtatccacccagatctcggtctggaccagggcaccctgggcgtagatcttgacgaagcggttgttttcttttgcggccatggaagcaccccctgtttggtctgcaagcggaagatcgaatgggaacagggcctcagttggccttatcgaaggcccggatgaagtcacagagcttctccacgccttccacagggacggcgttgtagatggaggcccgcatgccgcccactttgcggtgccccttcagattgacgaagccggcttcggccgcctccttgacgaacttggcgtccagctcctcactggcggagcggaaagtgacgttcatatcggagcggaagggcttctcggcggcgcaggtgaacagcttggagctgtcgatgcagtcgtagagcatctgggccttaccgtgcttgacctgctccatgccttcgatgcccccctgctcgtccagccagtccagggtcaggcccagcatgtagatgcaccagcagggcggggtgttgtacatggagtccttgtcgatcatggccttgtagctcatcatcacgggggtgtagggcagctcgtggccggccagatcctcccggatgatgaccacggtcaggccggcgggggccatgttcttctgggcgccggcgtagatgatgccgaacttggagacgtccacggggcgggagaggatgtcagaggacatgtcgcacaccagggggacgctgccggtttcggggacatactgccactcggtaccgtagacggtgttgttggcgcagtaatagaagtagctggcctccgggtccagcttcagctggtcctggctggggatataggtgtggttgcggtcctcggaggaggcggccaggctgatctggccgtacttctgggcctccttgtaggccaggttggagaagttgccggtgacggcgtagtccgccctgcccgtcttgccgatcaggttcagggggatcatggagaactggccggtggcgccggtctggagaaacaggatcttatagttgtccggcaccttcatcaggcggcggagcttggcctgggtctcctcaaagatctgaatgaacacctttgagcggtgactcatctccatcacagacattcctgatccatggtagttggtgatctcggccccggcacgctcaaggacggacaggggaagcatggaaggtcctgcggagaagttgtaaacacgctggtcgctcattttgggagagcccctttcaaattaagatcttgccagctctgctcccgcacaggggaagggaaacaaaaatgacaatgtatccctattatagtgaaggaaaatttctctgtcaatgcccccgtccgtccccaaagaggccttttgggataaaaaagcccgcgttttttggaaaataattttcaaatgcaggatatggggaaaaaagccgcaaaatccggggagagaacgggaaaaaagtgggaaaaatgccgcccctgcatgaaaggctgcagaggcggcatgaagaaatgagatgggtccatgggattatttcacatagggaccgggccctcaggtccgcaggacccactggagcattaggagcaggcccaggccagggacacccagcacacccaggatcagggcgttgaccaggttcacccccagccccagtccgatctggttcagcagggccagcgctgccagccccacagaagagcgcaccgccagccggagcagcctgcccagcgggcggtggagcaggagcagggcggccagcgccaccataactgccacgccccaggccccggccagggagccggtcatggctgggcctccagctccttgacccggcgcagcagatagttgtaccgggactggagggcattgatctcaaaaacgtaggattcaatgagatctccgtcctccgcactgttgaagccccggtaggcctgctggatcagggcccgggtgtgggccagagaggtcaggagctcctgccgctccacattgtcagcgcgctccagacggcgcagggaaaacatgcgggccgcttccgccatgagattgtcctcctttcggccccggcacaccggggcacggctggtcttgtcccttgtcaatgaaaggtatgatatagtctggtcaaatattccattgattaaacacacataggaggaaaaggaggggagatactaaccccggaccgtgtatcaaacttcctgacctgtgctccagagggcccgatggcgaaaggcgaaaaggagaacggagaacgctggggccgtcccatccgggagggctgaacagccgccggacttttccggcccatcctttttaagccggtgctggaccgcttttgagccgcagaccggggagggcgtgggggaccccgcagaaggcgggccgacccgcaatgccgaagcaccgtccacacagacccagtccctccccgtcccggacggaggagctgacagagtcaaaacggggccgccgggacaccggcggccccctgagactgtcggaaaagtggctttgccgcttttggaagaaagatgcagtctgcaagtgttttgctcggcgcacatgtcgccggggaaaacagatcagaacttgatccgcacctgcgggcgcaagctctgcgaggctttttccacagacagagggggccgccgatatcccggcactcccctctgctgtttcacaatagtaaaccgagaaaaaataaagttgacaatccggggaagcggtagtaaactattgcagaaaaatggtttacaattgagagaggggataggcgtgaaaaagctggcagtggagatcatctcaggcagaaggctgaaccgccgggacgacctggccgtcttcctgacggcagacctggaggagctgcgggcgggagcggaccagatccggcaggccctgtgcggggaccgggcggacctgtgcaccatcatcaacggccggagcggccggtgcagcgaggactgcaagttctgcgcccagtcctgccactacggcacccaggtggaggagtatcccttcctccccctggagaagatcgtggcggagtgcagacggaacgaggcggggggcgtccaccgcttctctatcgtcaccgccgggcgcagcctgaaggggatggagctggagcaggccctggaggcctacgcccggctgcatcgggagagcgggctgaagctgtgcgcctcccacggcctccagaccgaggaggagttccggcgcatgaaggaggcgggggtagagcgctgccacgccaatctggagacctcccggcgatacttcccacagatgtgcaccacacacacctatgaggacaaggtgaccaacatccaacgggcccgggcggcggggctggaggtgtgctccggaggcatactgggcatgggagagagctgggaggaccgcctggacctggcggtcagcctggcagagctggagatcagctccatcccgctgaacctcctgcggcccatcccgggcacgccctatgaggggatggagcccatttccaacgaggacgtgctgcgcaccgtggcttttttccggtacatcaaccccaccgcatggatcaggatggcggcgggccgggggcagttcccggacggcggagcggagctgttccgctctggggccaacgcggccatcaccggggacatgctcaccaccaccgggaccagcatggcgggggaccgggccatgctgctgggactgggctaccaggtatgagcgacagcggggcaggagaaacgccccaaacgacaaggaaaggaaatcagaactatgagccacgaacccatgaccgccggggcggtccagaaaaaaagcaagatctacggcctgtccatgaccgcggtgatggcggcggtgacttgtgtcctggcgcccatgtccatccccatcggaccggtgcccatctccttcacaaatctggccatctacctgtctctctatctgctggggtggaagcgggggacagtgagctatctggtctatgtgctgatcggcatggtgggcgtgccggtgttctccggcttcaccggcggcatgggcaggctgctgggccccaccgggggctatatcgtgggcttcatccccatggcactgatcgccggcgcggtcatcgaccgcttccggaaccggggcatccagctggccggcatgatcgcgggcactgcagtgtgctatgccttcggcaccgcctggtactgcttccaggccggttcctccgtgggggccgccctggggctgtgcgtgttccccttcatccccggcgacctggtcaaaatgctgatcgccatggcgctgggccccatgatccgctcccggctggagaaagcgggactgtatcggggatgaccagcttctctcagccgtccggcggggaggcccagaggacggcggcaggccccgcataaaactaaatcatccggacagggcagacagcggcggccgctctcttctaagagagcggccgccgcctccctgtgccggaggttgacaggccagacaaagagaggtacagtgtcagcaggaaaacaaattttggagagaaaggcgggcagacctatgctgcagggaaaggtatatggggtgtatttcagcccaacaggggggacgagagcttatgttacggcgctggccgggctgctctcctgcgaggcggaggagatcgatctgacggcgcgggaggagcgggcgcgggaccatgtctttggcccggaggatctggtgatcctgggggcgccggtctatgcggggcggctgccccagctggagggcgggatctttgaacgcctgcggggggacgggaccccggcggtctttaatgtgagctacggcaacagagcttttgaggacgccctgctggaggagcaggacatctgtcaggcccatggattccacgggatcgcggcgggggcctggatcgcccctcacaccttctccggccgcatcggatccggacggccggatgggacggacctggaaaaggtgcgggaatttgccgcgggggtccgggcgctgctggagcgaccggactggaggagctgccggctcacggtgccgggggaccggccctaccggccggccaggcgggtggaggtgtaccccgcgggggacgagagctgcacccgatgcatggcgtgtgtgtcccggtgcccggcgggagccatccctccggaatccccccggagcactgacacgggccgctgcatctcctgtctggcctgtgtgaagaactgcccggcgggggcgcgggcggtggccggtccggctttccacaagatggtggaggggctggaggggcggctgctgtccccccgccgggaaccggagctgtattacggaaggtgagacgatgatcaaaacagtttttagacctctgcggcacggcggcctataagggtggggctgtctcctatggggtgatgcagcgcacggtcccggacggcgtggaggcgatccgggatttcagggggctgatggagcacctgccccagttgtccggcgaaaaatccagcgaaaaagcagaccgcgccccggaagacggtctcttccggggcgcggtgtttgatcggggggcggaatcagtcctcgaagggcaggccgctgagataacgccgggccagatcgaaggcgtggtgggcggtctgagtacgcagacgggcacggactgggcggctgcccaggttcagggcgcggacatgggcgccctcggcggtggagatggccacgaaagcggtgcctacctcgtggtcccattcgtcctttccagggccggccacgccggtggcggacagggcgatgtcgcagcccagcagcctccgggctccatcggccatagcccgggccacctccggggagactgcgccgaactggtccagcaggtgctggggcacccccagtacgcccgccttcacctcattggtgtaggagaccaccccgccccggaacacctgggaggagccggggatgtcagtgaggcgcttggccatcaggccgccggtgatgctctcggcgcagcccagggtgaggcccttctcccgaagcaggtcctccaccacctcctccagagaggagacatccaccccgtacacccgggtgccgaagcgggccttcagctcctccaccttgggcagaagcagggcctgggcctgctccatggtgggtgccttggcggtgacccgcagctcacactccccctccttggcgtaaggggccagagtggggttggacatggcgttcatctcgtcccggagctgggcctccatctgggactccccgatgccgaacagcttcagggtgtgggaggcgatgactccctcggacagggcctgaaggtaggggaccacccggtgctggaacatgggacggcactcgctgggggggccggggagcatgatgacgtggcagccctccgcctggaaggcgcagcctggggcggtgccccagtcgttgaccaggacggtgcagccctcggggagcatggcctgctgaagattgttctccgtcatgggccgcccggtgcgggcaaaataattccggatgcgctgggcagagggctcgtggaacaccagcttctttccaaacgcctcggccaacacgtttttcgtcaggtcatcacaggtggggcccagccccccggtggtgatgatgatatcagcccgccccttagcggcggccaccgcctcccgggcccgctgggggttgtcccccaccacggtgtgccagtagacgttcaggcccagggcgctgagcccctgggagaggatctgggcgtccaggttgacgatgttgcccagcagcagctcagtgcccacggacaggatctctacagtatgagacatgaaaaagacctccaggaaaatgagattggcggcgctccagtcagggggcgggggcttccgccgccccggcccggtccaggatctgctctacctggcgcaggtcccggatgtcatagtcgatgcgggggtctgccgggcggggctcccccagagggttgtaccagcagcacaggatgccggcgctgcgtcccccctgcatgtcgctggtgagggagtcgcccacgatcatcacctcgtcccggcagcaggggccgatctgggagaataccgcgtcaaaaaaggcggcccccggcttctcggtccccacgatctcagagatgaagaccccgtccagcatccggtccaggccggagcgggacagcttccgctcctgggcgacccgggtgccgttggtcactgcgtactgccgtacccggcccttcagccgggccaccagagaaccggcgtcatcccggaacaccacagtgtcccccaggcgcagctggtactcctggttgaaagcggggatgtcacggcagttcagcccctcctgggcgaaaaactcctcaaagcggcccagcaggacctggggcttggtcagctccccccgctccagccgccgccagtaggtccggttgatctgggagtagcgtgccagcagctccggcgtgcaggggcccatctgaaaggagcggaagcaatcctccagagcccgccgctccgctgccgagaagtccagcagcgtcccgtccacgtcccagaggatcacgttgatctgtgccatatcgcgcctcctgtccctcagacctggacccgctcgatgccgtccaccgcagcttggatcagcgcctggatgtccagcttctcctcggcgaactccacctcgccgggcaggggacgcagacgaggatgacggggcgtgaagacggtgcagcagtcctcataggggaggatggaggtctcgaaggtgccgatcttccgggcgatctggacgatctcctccttgtccatccccaccacagggcgcaggatgggcagatcgaccaccgcgccggtgaccagcatggcgtccatggtctggctggccacctggcccaggcactcaccggtgaccagggccttagccccgcaccgccgggccacctcctgggcgatgcgcatcatgaagcggcgcatgatgacggtgaacagctcctccgggcaggagcggcgcagctcctcctggatggcggtgaagggcaccacgtggacggtgagccgcccggtccagggggtgagcaggcgggccagctccagcactttctccttggcctcgagggaggtgtagggataggagaagaagtggaccatgtccagggccaccccccgctttgcaatcatccaactggccacaggggagtcgatgcccccggagagcagagagacggcccggccgttgatgcccacaggcaggccgccggcgccgggctggggctgggtgtggacgtaagcggcgtagtccctcacttccacgtagacggtgagttcgggatggtggacgtccacctccaggttgtcataggcctcatggagctccccgcccacatactggctgagctggatggaggtcatggggaaggtcttgtccgcccgcttggtctccaccttaaaggtgcgggcggcgcggagctggtcgtccagaaattccttggcgcaggccaggatggcgtccttgtccttcccgcaggggcgggccagggacagacccacgatgccgaacacgtgcttcagggcctcataggccccctccacatcgcagccctcgcctatgggctccacgtaggtggccgactgccgggtgtacacccggaactggccgaagggacggagacggcggtggaggttggcctggagcttgtcctcgaagctgcggcggttgagccccttgaggaccatctcacccagcttgagcagaatgatttcgttcattatgtgtaagatcctttccatcgattcgcttcacaggcattatatcggaaagcgccggggatgtccagcgggagcggagaaagtctcggatctgtccggggatgtccctccggcgcgtgccctatgcagggcgcattctaccgccgcaggtactccggcggacgatattggagggcctcggccaggtgggggagctggatggaggtgctgctgtccaggtcagcgatggtccgggccacccgcaggatgcggtcatagctgcgggcggtgagccccatccggtcaaaggccccctgcatcagccgctggcactccgagtccagggcgcagaaccggtccagctcctgctggcccatccgggcgttgcaggaggcgtccccatagcgcccacgctggatgtcccgggcccggtccaccctgcccttgatgacggaggagggctccgacggggcgcggcgggccagctcaccgaactccagggcggccacctccacaaacaggtcgatgcggtccagaagggggccggacaggcgggagagatagcgccgcacctcctgctccgtgcagcggcagcggccgctggggtggccgtaccagccgcacttgcaggggttcatggcgcacaccagcatgaaccggctgggataggtcaccgagccggcggcccgggagatctgcacctgcccgtcctccaggggttggcggagcacctccagcacctccttggagaactcgggcagctcgtccagaaagaggaccccgtggtgggccagggagatctcacccggcctgggattggtgccgccccctgccagccccatgggggagatggtgtggtggggggaacggaaggggcggcggctgatgagggggtggtccgggtcggtgaggcccatcaccgagtggatctcggtggcctccagggcttcagagcggctcatatcggggaggatggagggcaggcggcgggccagcatggatttgccagacccgggaggaccacacatgagcaggttgtggccgccggccgcggcgatctccagggcccgcttcccgttctcctgccccttcacctcggagaagtcgggggcgggctctgggccggggccgggtacccaggggcgggccggggggatgggctcctctccggtgagatgccgggccagctgggccacgtcccggacagggtaaacggcgggaccgccggccagggtggcctcggcggcattggcctccggaacgaagagagagcggatgccagcccgcccggcggccaatgccatgggaaggatgcccgccgcggggcgcagttccccggacagggacagctcccccacaaaggcgcagtccgggtcccgcaccttcagctgcccgccggcggccaggatgcctaccaggatgggcaggtcgtacagcgtgcctgacttcttcacatgggcgggggccagattgacagtgatgcggctgaccgggaactgaaagccgcagttcttgatggcggagcgcacccgctcccgggcctcgttcaccgccgcatcgggcaggcccaccagggtgaaggcgggcaggccgctggacaggtcgcactcggcgctcacctcatagcctgagaccccctggagccccagagagcgcacttggaataccataggcacatcctccttggcgggagtatggaacacaaattgtccccgtttggtacattttactccttcggcaccatcctttgcaacggatgccagtatttttcttccggaaatcgggggaaatcgctccagcccgatttacaaatgggggaaaagatgataaactagctttgtctgagaagagaccgcccgctccaaaacagggaggggcgggatcgctgtgcccggacgcctgaccgcggggagctgaccgccatcccgacccaaggcaggcggcccgccgggccggcgggaggagacatacatcccacaggagaacagggaccggggcgggatggccgggcccagaaaattggaagaaagcagggattctctatggctagaaaattcaagaccatggacggcaacaacgcggcggcctatgtcagctacgcgtttaccgaggtagccggtatctaccccatcacgccgtccagccccatggccgactatgtggaccagtgggcggcccagggccagaaaaacatcttcggcaccaccgtcaaggtcatcgaaatgcagtctgaggccggtgccgccggcactgtccacggctctctggcggcgggcgctctgaccaccacctacaccgcatcccagggcctgctgctgatgatccccaacatgtacaagatcgccggcgagctgctgcctggtgtcttccacgtgtctgcccgtaccgtggccgcccagagcctgaacatcttcggcgaccactctgacgtgatggcctgccgccagaccggctttgccatgctggccgaatccaatgtgcaggaggtcatggacctgggcgccgtggcccacctggctgccatcaagggccgcgtccccttcatcaacttcttcgacggcttccgcacctcccacgagatccagaaggtggccatctgggactacaaggacctggccgagatggtggacatggacgccgtggaggcgttccgcaagcgcgccctgaaccccgagcggcccaccatgcgcggttcccacgagaacggcgacatcttcttccagcaccgcgaggcctgcaacacctactatgacgccctccccgccatcgtggaggagtatatgggcaaggtcaacgccaagctgggcaccaactaccagctgttcaactactacggcgcccctgacgctgaccgggtcatcatcgccatgggctccatctgcgacgtggccgaggaggtcatcgactacctcaacgcccacggcgagaaggtgggcctgatcaaggtgcgcctgtaccgccccttccgggccgacaagctcatcgctgccatccccgccaccgcaaagaagatcgccgtgctggaccggaccaaggagcccggcgccctgggcgatcccctgtacctggatgtggtcaccgcgctgaccaatgcgggcattaccgacaagaccgttgtgggcggccggtacggcctgggctccaaggacaccccgccccgcagcgtgtttgctgtctatgaggagctggccaaggccgagcccaagcgccagttcaccatcggcatcgtggacgatgtgaccaacctctccctgccggagagcaagtccgccaacaccgccgccgagggcaccatcgagtgcaagttctggggcctgggcggcgacggcactgtgggtgccaacaagaactccatcaagatcatcggcgaccacaccgataagtatgtgcaggcgtacttccagtatgactccaagaagaccggcggcgtgaccatcagccacctgcgcttcggcgacaagcccatcaagagctcctactatatcaataaggctgacttcgtggcctgccacaacccctcctatatcctcaagggcttccccatggtccgggacgtgaagcccggcggcgtgttcctcatcaactgccagtggtccgatgaggagctggacaagcacatgcccgccgtggccaagcgctacatcgcggaaaatgacatccaggtctacaccatcgacgcgatcgacctggcagccaagatcggcatgggcaagcgcaccaacaccattctccagtctgctttcttctccctggccaacgtgatgccccagaccgaggccatccagtatatgaaggacgcggccacccactcctacctgaagaagggccaggacgtggtggatatgaaccacaaggccatcgacgccggtgccactgccttcaagaagttcacggtgcctgcctcctggaaggatgctcaggatgcacccaaggagagtgtcctgtccggccctgccaagctggtgaagatggtggagaacatcctggagcccgtggaccgcatggacggcgacagcctgcctgtctccgcttttgtagaccacgcagacggcaccttcgagcagggcgcctccgcctatgagaagcggggcgtggctgtcagcgtgcctgagtgggactccagcaagtgcatccagtgcaaccagtgcgcctacgtgtgcccccacgccaccatccgtccctatgccctgaccgaggaggaggccaagaacgcccccgatgcggccaagatcgtggatgtgaaggcgggcaagggcaagggcgtgtacaagtttgccatggcggtcagccccctggactgcatgggctgctccgtctgcgccaacatctgccccaccaacgccctgaccatggtctcccaggagagccaggccgctcagcaggaggtctttgactacatggtggccagcgtctccgtgaaggaggatatggccgacctgactgtcaagggcagccagttccgcaccccgctgctggagttctccggctcctgcgccggctgcgccgagaccgcctatgcccgtctcatcacccagctgttcggagaccggatgtatatctccaacgccaccggctgctcctccatctggggcggtccggctgccacctctccctacaccgtcaacgccgagggcaagggtcccgcctgggccaactccctgtttgaggacaacgccgagcacggtctgggcctgtatctgggacagaaggccatccgcaaccggctggctgccaagaccgaggccctgatcgcggtggactgggcccgtcctgagctgaaggaggccgcccagaagtggctggacactatggaggacggccaggccaaccaggaggctgccaaggcctatgtggcggctctggaggccggcctgtgcacggtggacgagctgctggccagtgacaaggccgagatccaggccttcggcaaggagctgcaggccaagggcgagacgctgtgtcagtgcgaggcatgcaagctggtcaaggagatcctggacgagaaggagtacctgaacaagaagtccgtgtggatcttcggcggcgacggctgggcctacgacatcggcttcggcggcgtggaccacgtgctggcctccggcgaggatgtgaacatcttcgtctttgataccgaggtgtactccaacaccggcggacaggcctccaaggcctccaacatcggccaggtggctcagtttgccgcggccggcaagacagtggcgaagaagagcctggcggagatcgccatgacctacggctacgtctatgtggcccaggtggctatgggcgccaacatgaaccagaccctgaaggctatccaggaggccgaggcctaccacggcccgtccctcatcatcggctacgccccctgtgagatgcactccatcaagggcggcatggccaactgccagtccgagatgaagaaggccgtggagtgcggctactggaatatgttccgctttaaccccgccctgaaggcggagggcaagaatcccttcactctggactccaaggcgcccgcaggcggctatcaggagttcctgatgaacgaggcccgttactccagcctgacccgctccttccccgagcgcgccaaggaactcttcgctcagaacgaggaggaggccaaagcccgctacgagaagctccagcgcatggtcaagatgtacgaggtgtaagggtaagatccctcgcccgcgaaaaatgagaagaccgcacgccgccccacgggggcggcgtgcggtcatttatcaggccccgcccgggcggccctgaccgcaacccaatgtaagtggctgaggttgggagaggaggaacaagggatcatgaggtgtcgtcttttttgctgcagaaataaaaagacgcggccgcaaaggggactttgcgcccacatagacggcagctgcgaaaaatgtgcagtagctgtaagtctgcaccaaaaacaaaatcacaacccagcataagcggttgtgatttggagcgaggagcagcaggatgagtgcgcgatgagtggcgcgtaaattcccgaccgcaggccgggaattgtgcaggagcggctttgccgcccccaagcattcaaaggccgaaggggggaagccgcactctgggcggcgggccccaaaaagaagggcatgaccataggtcatgcccttctttttggcggaggtgaagagattcgaactcttgcgccggcgaagccgacctaccggatttcgaatcattacaccaacttggatgatgacggtaaatcagggacgatagcggtaactacggaaccccaaaacacacctctcaaagtggccgtcagatggctgctctcattatagccattttcccgcaaaattcaagccgtggaaattgggaagaacaacaggatagaacagaccccaattcacgatttgaacttgcccgcaaatccgcatggttactggcttttcggcagtttggacttccaaagtggaaacatgatttcgagtcatttcccgcttatgacttttggtggaaattaagcgaagatggaagtacacaacggaagcccaaaagctgcggtatactgcggattttggcttccgtttttcgcttttatttgaacccaccgggttttccgagttcttcccgtttttgccccgaattatgaccggaggatagaacaaggatagaactgcacgccagatcgaggagtttaacacccatccctttttacgaaaacgcaaatctcaatttgatttgtcatcctaattttatttgaactcatttcaaaagtcaacattatacgacgcaccagtgaagtacctcacctaccaatgacagatgaacaagaaagtgagtgctgcacatggatttgaccaagtattaccccgacatcgccgcaaagtatcccgcctatgtaacccaacgggaactatgcgagatctgccgcatctgtcccaagaccgcctacaatttggagcaacaaggtgagattccctacaccattgagcaaaaccacctgatccgtagccacaaaatcaagctgacggacattcttgcctatctctatcggcgtgagtgcagacaggaagcagacagtccctatatctgtgctatgagaacattctatgacaaacatctatctccctactcagacctgctttccgtaaaggatattcagcagattacaggcttttcgtcctcggcaatcgtgcggtggatcagcatagggattctgaaggctttccagcctggaaagcagtacaccgtcccaaaggattttatgctggactttctgataagcccatattaccgccgtatccgccgaaagacccctgtccaaaaggaattgatggatacatttgagcgtctgtggcaggaaaaaggaggcgagtgatgtggcacaggtatccaagtatcgctatttgctgaatcagtacccagaaacagtccaaaaagagcaattccgcatcatctgtcatatcagcaaacgcacagctcgttatctgctgcaatccggtctggttccctgcgtacagagtgggaaaaagacccggaattacaccattaagatgaaagacattgttcgctaccttgagcgcagggaaatccaccccgagaaatacaaacttccccccggctcatatagcgggacatacgcagtcaagcccctgcttcccgaatctgtgacaacggaggaactgcgaaaatactacatagagagtttccgggacattcccgacatagtttccacgagagaggccgcggaattaacaggcgccacggcatctacggtcgcaaaatggatcagaacgaaaaagctgaaagctctttcacatggtccggcatttatcatcccgaaggtcaatctgatcgactttatggccagtgacgcatatttgaacaaacgcttgaaatcacaaaaattccacgaaaatataggaggttttctatcatggaaagagggaaaataattgttgtagccaaccagaaaggtggagtagccaagaccagcacggtccgaaatctgtcctatgcgctggccgagatgggcaaaaaggtcttggtagttgactttgacccccagtataacctcaccaccagtttcggtgtcctgccgacccagacgccctgtaataccgggactctcatcaccaatctgcttctcgacgaatctctgccggataccaacgagttcatccagaaaatcggctctgtggacttgatcccttccagccgctctctcaccgttgcggaggcaaatctgctgatgacgccggacagcaatgactacctggctgctctgctgaaccctctgcggctgtcctacgattacattatcgtggacaccaacccctctctcggctcgttgaccatcaacgctttaacggctgccgacgaggtaatcatcccgattgacccggaactgttcgctctgaccggtttgcaggcgttggtggacaccatcaagaaaatcaagcggaaattaaatcccagcattgagatcggcggtatcctgttcaccaaatgcaacaagcggacgaacctgtatcgccgtacatacggtcaggtcacaaaggcattccaatcgctccccatcttcaactgtcagattccctacacggtcaaggtgggggacgcaaacagctacggaatgagcgtcatggaactggagcaggcaaaccccgcctctcttgcctatctggaacttgcaaaggaggtgctggcaaatgcctaaaatcaatccgcgcatcaagtccattgacgatcttctgggcttggatgccgcagaagaaagacctattgaacccaccccttccgtatccttgccgaccaagaacaccatcatcacccttcccccgcaggccattcgtgctttccgaggccacccgttccggctgtatgagggcgaccggctcaatgatctggtagaaagcattgcggaacatggggtcctgaatcccgtcatcatccgcaaaatcgaacgggatgaagatggctttgagtatgaaatgctggccggtcataaccggcagaacgccgcagctattgcaaaccgtgaacttccctgtatcgtcaaggaaaatctttccgatgaagatgcctggatttatgtgatcgaaaccaatgtcctgcaacgctccttctccgaaatgctgccctctgaaaaagcggcggtgctggctctgcgctattccaagatgatctgtcaggggcgccggaacgatattgtcgaggagttgaaacggcttgaaaaccctgatgaaatcagggaaaccgggacttgtggcattgagtgccacaagtcgaaaagccgtgatgttgtaggcgcagaatatgacctgaaaggccgcgccgttgcgaactatctccgcatcaatgagttgattactccgctgaaaaggcgaattgatgacgccgagttcccgattgtggtagctgtgcagctctcttatctgaccgaacaggaacagcagatggttgacgatgtgctttcgggaagcgagtacaaggtcaatgagggaaaggttgtcctgctgcgggaatataccggaaagctgaccccggagcgtaccgaacagattttgtccggcgagtttaaccggaaacccaaaaaatccacggctacggcgttcaaggtcaaaccggcgatttacaagaaatactttaccgccagcatcagccagaaagagttcgacagcattgtggacgaggcacttgccctctactttgctcagaaaggacaggagtccgagcaagaggccggataaccggccataatcaccaacacaggaaggaggtcagataccgttgagaaatgatgaacgcctgcggacgatatatgaagtcatggctccctatattgtccgaaatgaacacaactggcgggattatctggcatttgcatcgcagttccataagcacagttttgacaacatacttcttgtgtacgcacaggacgaggatgtttcgattctggcgacacgaaagcaatgggcagccataggcagaaatttgattccccgtgcaaagggcgttgctgtttgtgtctatcggaatgccaaactcacccttgactatctctttgatgtaagccagactactggcaaagagattcatcctacggactggcagctttccgatgaaatgaaagaggccctgaccgagcgcctgtcatatgcacacggtttccccaagcagggcttttcccaagcactgtatgcgctggccagcgaatctgtcgcagacaattacaaccactttttgcaggaactcaagcaggaaaccaaaggccatttgttcaccgagatcccggccggtggttttgaagcccaatacatccagcttctgaccgacagcatttcttatttcatcggcaaaaagtgtcacctgccggatgaagaaatccagttgagtgacggtatggcgacggtcagccatttcaatacactcccgttggttgctcatcttggtacggcagtaaccgccctttccaaaggcatcctgttagaagtggaacggaacatcaagatcatcaatcgtgaaaggatggcacaacatgaacaaaccgaatatcaatctgaaatacagagagcaggacgggatgatgctgcccgatctgcaaatctccaacagcagcgaagcagatcagcctctgggcaggtacggccggatggccctggaatacctcagagagaatcacccggagcgatttacgactttgaaaatggatggcagtctgatggagatcatgcaccgggtacaggacgaggcgaccgagaagatcgaagccctgacccagcaaatgctccagcaggagccgatcccgcagaccgaggacatcatggagcggacgcgccacctgaacagtctgaaactgatggcggaggaaaccgtactccagagcgtagtcctgattccccgctgaccgaagaacatccaaatacagaagcggcgccaagcgccgcacctgtgggagagccgtctgaaaaggacggctctttttctgttcctgcggaacaaccgacacgccattttaccgatgcagaagtccgacgcaattatgagtacatcctgaccagcaccaacctatacccctcagaactgcacagcgcggttcgcagcgtattgtcagaaccgccgcttaatccagactggtcagacaaagggcggcagattgcggctctctttactccctatggcgaccgtgaatatcaaggcgatcttctctatcgtacccggctacatggtgaggatggcatttcgtttttctttgatgaaggctatacctacattccctggaacggactggcgtttttactggacgccatgatcgaggacagcgactatcccaatcctgtcgtagaggaacagcctgatcccatcggggattataacatccctgatgaagttgatgaaatgggcggtcctcaccggcaaatgaccatcggagaagcggatttcgattatgtcctggattctgttgcctatgaagccggagaaaccgtagtggaaccggtcaagccaccggcgattgttcaaatggaaaacgacacaccagcagccggtgacgagcctgcatccgttcctgacgagaatccccatgctattgtggaggcccccgaaacggctctccccacagatacagcggagcatcctgcaccgccgcccgtcaagggaaacacgacggcgcacacgaatttccgccgctttcaagagttgttcccggagattgtgtccggtcaatatgagtatctgcggctggaggccggagaagcctactaccctctggtcattcaccataaatacggttcccattactgcatggagcattactatatgcagaacggcgaccggatgtatgacccctatatggatttccaaatcgacaaagaggccggaacacttcgggctttcagctatgagaacagcggcattggtgtctataacgaggctgatcccgacgaccccgcacatgaaaagaaaatcaatggattcaacaaattctttgccacttggctgaacaacatccgcagccagggctatgagccggtgcgggcctctatgatggtcaacgatgaagaagtcgatgtggatttgcgtccagctgccgaagctgttccggtcgtggaagaagaacagccggagcagctctcccttctgtccctggaaaagagtacggaagatctgcttgttgagcgtgtcatgcagaaaggtccccttaccgcagggaaaaaggaacaaatctacgagtttgcccagacccaccccaccggatcggaatttactgctttcctaaaaaagctatatggctatgaagggttctccggtgatgaaatgggcgtgaaatacgccatgttcaatagtgaaggtgtcactatcgaatggcaggataagcagggcgaaacacaggaaacgaaactgtcctgggcgcgggctgccggtgtcgtgcaacgcctggtggatgaaggccgctatctggaaacccctgttgtcagccagacggagcagcagaatgaagtgcagcctttcagtgaccaataccgtctgttagaccgtctgtgtgctgactgcgagtattttctgggggcgggacagcgggcagaaaagcatttgtgggcaggcagcgtggatgcacagattgagaaaatgcgggaactgtatgcccaactgccggaaaaacctgattggatttccctggatgtaatcaacgcctacgcccgccgcatggcagccccggagccggtagaaaatactgcggaagcctcgccggaggaaacgcagattttagacgaagccctggacgcccatcatgggcagattgatatgctgatgcaggcggtccgaggtgagctgacggttggaaccatccggtacagtatttttgaggggcggccccatatcagcatgattgaagttctggaggactaccgccgtcaaggtatcgcaacccagatgctccgctatctgcaagggcaatatcccaatgaggaaattgtatgggggtatttaaccgaggatggttcggccctgtaccaagctgtggtggatgagcagcccaatcccgactatctccgggtacaaaatgaccttgaagatattacgcgggaatttgacgcttatgtacggcgcctggacggtggggctattctctccccccaagaagctgccgacatggacgatctggaggacacgcaataccggctggaaaaagagttggaagaactgcgccccattcgcgcctttgtacgaatgggcgatggtacagcagcagaggtgcccgctgttatgggtgaagccactcgcactgatctggcgccccttcgtgagccgcctgcggcgccgcaggtcgccgcacacaacttccgcttttccgaggactatgacctgtatccaagtggggcaaagaccaaatataaaaacaatgtcatggcgatcaagctgctcaagcagattgagctggaaaagcggacagcgacaccagaagaacaaatcatccttgcctgttatgtcggatggggtgggcttgccaacgctttctccagtacggcctctggttgggagaacgaatatcaggagttgaagtccctgctgactgatgtggaatacaaggcggccatgaactccaccatcacagcctactacaccgagcctgatctgatccggcacatttaccgcgctctggaacggtttggctttgaaggtggtcccgacagaaaaatcctggaccctggtatgggaaccggcaacttctattctgtgctgccggagcagtttcaagagagcaagctgtttggcgttgagttggattccatcactggcagaatcgcaaagcagctttatcctgatgcggatatttccatcatgggatacgaagccaccaaatttgaggacaacagctttgatgtgattctgggcaatatcccgttcaactccgtgaaaatctatgatcggcgctacaatgacctgaacccgtacatccatgactatttttttattaagtccctggaccttgcgaaaccgggcggtatcattgcctttatcaccagcaaaggaattatggatcgcaaggacgagagccttcgagaatatatcgcgcggcgggcagagttcatcggtgctattcgcctacccaacacagcgttcaaggctttggcgggaaccgatgtaacagcggatgttgttttcttgaaaaagagagcgcatcccatagaacttgatcgcacgaatcttccgtcctggattgaaactgacctggaccgcagtaaatggatcgcctataaccgctatttcaaggacaatcccgaaatgctcatgggcgagatggtgagcagccggaatatgtacggcaacgaagatgggacagcctgtgttgccccggaagattttgacctgaaccagcatcttacccaagcggttgattccctgtatgcccgtttcaccgcagagccggatgaagaaatcgaggcggacgaaccggaagaaagcaatgcagagtatgaggacgccccggccggaaccaaaaacttcacctatgttgtgcggaacggcgagatcttcttctgtgaaaaagataagctgatcccacagccttacaccggcatgaaggccgaaagaatcaaggggctgtgtgagattcgtactgcgctgctggaggttatcaacatccagtcccatgagtatgacccgcttgatcttcagaaagcgcaggacacacttaatcaggtatatgaccgcttcgttgcaaagtatggagccatcaacagcaaaggaaacatcctcgctttttctgatgatgaccaattcccgttgctacgctctatcgaggatgagcggaaagacaagaccggttgggataaatcagcgatcttcaccaaagccaccatccgcctcttccgtcaggtcaatcatgcagacaccgccgaggatgcccttcaaatctgcctgaatcacaagctgcgggtggatttgccctatatgtccttcctgacgggaaaagagccggaagaattggtgcgtgaactggatactcgcatctatctcaatcctcagaaatactacggcaatccgctggaaggatgggaactcgcagaagaatatctcagtggtcatgtgcgggataagctgctctacgcacgtcagaaggcagcagaagaaccggaactctttgcccggaatgtagaggctttggaggaagtacagccggagccgctgactcctgccgacattgaagtgaatatgggcgccatctgggttcccattgagtattaccgccaattcatgtatgaaaccttccagaccagtggatatgaaaaggtcattgagggcggtgacaaccggcaccgtattgacattgagtatttttcctacaccacgacctggcgtgtcaccaataaaaatgcggaaccggattccgtaatggtcaaccagactttcggaaccaagcggaaaaatgcttatgagatttttgaggattgccttaatatgcaatcctcaacagtccgtgaccggcaggaatacatcaatgaaaatggcaataagtcagttaaatatgtaatcaacgcacaggaaacgatgattgcccgtgccaagcagcaacagattcaggaggcgtttgcgtcctgggtttggaaagaaccggagcgccgggatacgcttctgcggatctacaatgaaactttcaacacggttcgtccccgtgagtttgacgggagccatctggtattccccggcatgaacacagagatgaaactgcggaagcatcagcttgattttgctgcccgtgtcatctataccgggacggggcttgctgcacatgaggtaggcgccggaaagaccgctgctttaattgccgccgggatgtacctcaagaacctgggagcgatccacaaggctgtgtttgtagttcccaatcccctggtaggccagtgggcaacagagttctaccgctttttccccaacgcaaaccttttggtatccaccgcagaggattttacccctaaaaaccgcaaccgctacatttccaaaatcgccaccggagaatatgacgccgtaattttggcacatagccagtttgagaaaatcccaatctccacagagcggcaaatcgctatgttggaacggcagatcaacgatattgaaaatgctatctatgagatcaaaagcgaaaacggcgaaaattggtccgtcaagcagatggtcattttccgcaagaatctggatgaacggctgaaaaagctgtctgccgaggaaaagaaagacaatctgctgacctttgagcagctgggcgtagatatgatgatggtggacgaggcgcactttttcaaaaactgctttgtctttacaaagctgcgaaatgtggctggtattacaacctcaagcagtcaacgcgcctttgatatgctgctcaaatgtcagtatttgcaggaaacaaatcaggggcgcggcgtagtatttgcgactggaacgccaatcagcaactcgatttccgaactgttcgtcatgcagcggtatttgcagccgcaggagttggaacgctttggctggtcctacttcgacacctggatcgctcattttgccaaacgaacctctgtgctggaattgaagccggagggcggcggctatcggatgcgtgatcgcttcgtccgcttctacaatctccctgaactgatggcggtctttcgtgaggtcgctgatgtcaaaacagcggatatgttggatattcccggactcccggctgttcgcactggtaaggcggagattgtttcagtggaagccacacccgcacagcaggcgatcatggctgattttatcatgcgagcagaagcaatccgaaccggtcgagtgaagccggaagaagataatatgctgaagctgaccggtgaggcccgcctgatggcgattgacccgcgcctgattcgaccggacgcggatggtacaggaagcaagttgagtgtctgcattgaggatgtttatcaggtttggaaggacaccgccgcctctgcttccacgcagcttgtcttttgtgatgttggcactcccaaagccgggaaattcaatgtatatgatgaaataagaaatgtgctgctggcaaagggtgtgccggaatcggagatagcctttgttcacgacgccacttctgaagcacagcggcaggagctgttcgagcgtacccgccaaggaaaagtccgtatcctgatcggcagcaccagcaagctgggaaccggcgtgaatgttcagaataaggtaatctccattgaccatctggactgtccgtggaaaccctctgacattacacagcgaaatgggcgtggggtacggcagggcaacgaaaacccggaaattatgataaagcaattcgtggccaaagggacatttgatgcgtatctctggcagattcaggagcagaaattgcggtatatcacgcagattcttaccggaaagcatatcgcccgttcctgcgaggatgtggatgaaaccgtcctgtctgctgcacagttcaaggcggccgctaccgacaatccgatggttgcacagaagatggaactggaaaaccgggtcacggaattgaaaatcctgcggggtgcgtggagtaacgaacaactttctttggagcgcaaaatcagcactatttatcctgggcagatcaggcggtatgaaaaggaaatcgaccagatcggtgaggatattaaactgctgaaccaatcggccggtagcgacttttcgattgtcctggatggcaaacgctatacagaacggtcagaggccggagaagccttcgggctgctttatcgcatgataaaagaaggcgcaaaggacgattcggaagaatttgagattggtgcttatcgcagtttcccgttgtatctgtcggttggttatgtttcacgattggttttgagatacaaccaccactacacaacggaggttggaacttccgctttaggtgctatcacccgcattgaacaccttgccgaacggattcccggctatcttaaagaggcccagcgtgagttagaggaagtgcaaaaacaactggcggttgcccaacaacaggttggacagccgtttatttatgaggatgagttgtcggaaaaggttgcccaactcacagaaatcaataccaagttggagtttgagtcattacaggaaagcgaggtgattttggatgaaaacggacaacgatctgatggcgaggaagattgggattctgaaagagttccttcctgcgcttctgccgaagtataagatcatgctgctggaggcattcagcccccatgatcttctcacggcgtatatcaaaaacacgctgtcgggctacccccgtctggaagatcagaacctggacgacttgacgctggaactgctgtaccccactgacgaggcggcagaacactgtatcaaagagttccttgctctgcgcctggacgatgacaacgagcatgagctagagcagtgatgtgaggtggtgatatatgggcgagaaacattcggctgtctgctatatcttccgtgagggggcttttacacccgttcaggaaacgaaaccgctgcggaatgactttggccttgacctctttcagtataaaggggctgtttatgaaggcaaaaccggactgcatctctgcccagcgcgggatgcggaatatcttgcactttttatcaagagccacggcggaatagaaaaggttcagcaagtgattaacagtagcttggagcgtaccggcctttctccccgctatacccgaccggatgaaaagaaaaaggacatcttcccgccaaaggaaaaagacgagaaccgggtttttgccaaagacctgatgggaaacaagcacttctactaccgcttctacaacgaaaacggcattgaactctacacaatggagaagaaacgggagttcttccaaacggtttatattccatgcgacgggtttatggtgggcattgaccagcggcaccgacttgaggaagtcctgaaatggctgcccactctggagcatggcatccggggtgagatcgaaagggttttcaatcagagtatggaagccccggaccggtgggctgatctgggatttgccaatctgcttggacggtatgaggaagcaaaagcccacaatgcccccattgctgcggagcggcaacggcaagctgatgaaagacgggcgcagcaagacgcccgtgaacagcagttggcacaagaacgacaggcccgttacgattccgccatccgtgaggccgaaggaaatattatggcgggaaaggaggtgataaaccgggagatcaacggcaaatctctcattatgcagctctttcgtgagcatgaaattcctgttcctctcaaaacacagggctggatcatcaattcgcttcacagtatccggtacgatccccaaattggagaatggaactaccgctatttcaaaggcagccgggacagcaccaaaatgtttgacctgcttgccaaactgtccgctgcgattcagacccgacagcagtttgaagaacacggggaatccccgccggacacccctgtgttggactgtgaggaagaacaggatatggaactataaatctggtttttgaaaggagccaatatgaaaaaagcaattttgagcgtatccgctgccgccgccatgattggcggccttttctattttggctggtatcgtaaccgccacggcgccaactaagcaaaccgacctgtctggaaggaggtgaagcgatatgccgatgacagcgacaatggcgccctacacccttttcattctggatgatgatacccctctgaaccctcgtgaggactatgactgtttgggaaaaatggtctgctggcacagcagatacagtctgggcgagaagcacgattatgacgagccgagcgatttcctgcggagcctgctgttttctgaatactccagcggccacgaccgcaacaatccggttttcgcatttctcaaatccggcaaagccaaggatgcccgtctggaatacaaccgatccacgcgggagtgggaattgcgggagaatcagcactggagttcagacagcgattggtatgtgtcctccagctatgcggcctcgttgaaagatgaagtcccggactggtttttggatgattgcctttctgccctcaccaccggcgaactgttttcgctggtagaacaaatggatggcatggtgattcttccgctttacctgtacgatcacagcgggatcaccatgaacacctgcggcttttcttgcccgtgggattccggtcaggttggctggatctatgcagataaagcgatgatcgagcaggaacacgggaaaatcacccctgaaatattggagaaggttcgtcaaaccctggaagccgaagtcaaggagtacgattactacctgaccaaccagtgctatggattccagcttttcaaggaagatgtggaggtggatagctgctggggattcctgggggaaatccgggatgttcaggatgctgtaaaggagcatctgccggaggactgcaatccggcaatcgttgaatcgctccaatttcagtatgaggaactggacatcgacgagtatttggagcgattgcaggaagaaacggagggattagactgtgagcctggataacacagtgaatgttttcatcctgtatggctgcaccttgagcaaggagcgaagttccatgcgaatcgtggccgccactacggatgaagaaatgctgcataccatcatcggtgcccaaatcctcggcggcacaatggactaccggggcttcagcaatatgaagggctttgaacagttccgggcggcctgccgtaccggtgatgttcagtatagcaatctggactatggctttgtggagcagacggaaaatctgatgctcccggactgtgcaaaggagccgcagcttgagaaagcatatcggctgctgaacctgtccgaccatgagttcaatgccatccgcaatggttctctggagagcctgggcgaagatcgcgcccgtttgattctggataaggcgctgtcctgggcagcacagaactatgtcggatgggaattatatcgccatttgagagatgaactcggcatgagcaacgaggaaatcggaaaaaccggatttgacctggatgagttctatgaggacgaagcggcggactctgcggagtacgaagtggaggctgactatggcgaagaactttaatcctgctgctctgccggaacattgctatgcggttcttcccggctccgggcagctcatagaggtcaggcgcggcgaaaagggctactatccctgcgcctattccaccagcgaccgtgagtataacaaggttctggcaaatcagttcaatgcccatgagggtatatcaaaggcacaggcggcagctatgttggccggttccatgtttggctggaatgttcctgctgccgatcctgcctgttacgatgcagagggcatcccgatccaaccgggagaaaagaaagcgcccaccagatcgcctgaatatcagtacgagcaggcaaagctcatccggcagaactaccagcccggaaccaaggttgttctggatgaaaagatggaagatccctaccatgaaatgcctgcgggactgaccggcatcgtggattccgttgacgatctggggcaaattcattgccattgggagaatggttcttcgctggcgcttattccgggcgttgaccattttcatcaggatatgactcaggagcctgtgattgagagcagcgaagaacaggagcctgatttggaattgtgaggtgatgtgatatgagcagaagcgccgctgcgtatcagaaatttaccgaggatgagattcggaaagcaaacagcgtggatattctgtccctggcccgtggctatggatatgagccggaaaaggcaggccgcaaagctgtccacatgaagcacagcggcgggctttacatcttccccgaaaacaatcgctttttccaatggacgggtcctgatgatggagtcaaaggcggcgccattgattttgtcatgcgggaagaaaacctgtccttccccgaagcggtgggcaagctgatcggcaaggagttctctccatccgtaaagcaggtggttccctatgagaaaaaagaacgggagccgctggtgctgcctgaaaaggcagacaacatgaagcgggcctattggtatctggtttctgtccgaggtatcagccccaaaatcgtaagccactttatgaatcggaagatgatttatcaggaaaaaaagtatggcaactgcgtgtttgtaggctacgatacagaaggagcagcccggtattgctccatgcgggcggccagagataacagctccttcaaaatggatgcgaccggctcagataaaagctaccccttcttccacgagggcaaaaccgatctgctgattgtcaccgaggcgcccatcgacctgatgagccatgcttctattgccgctgacttttatgggcgtgactggatgcaagatcaccgtatctctaccggttgcctttggaatggagccattgaccgttatctggaaggccatccgcagatcaagcggctggtgtttgcagtggacaatgactatctggcccgtgataagaatgggcaactgcgaaattgggggcagcttacagcggcaaaatggatgaaggcatacaccgaaaagggatatgcctgcgcggttcatgtgccgcatttgaatgactttaacaccgacctggtggaaatgcggaaggggcgttctgtggaggatttagaccgtcagcgtatggcggagctggaaactgcatttgaacagagcgccgaggaagaaccggaacaaggtatggaggtgtaaaattggcaaaaatcaaaacctttgaattggatcgctggagtgagccggatgaaaagcggcgtgtccggcacatcggcatggccgacgcaaaagaaacctttgacagactgcaaacgcacctggaactgaaaggtctgctcccggatgagtatttcctgttctccgatgaactgacgggcgaactgcctgagtttgaccaggcgctctgtattcccaattttggggccagcgaaggtatctatctggacatttccctggcctgccgcgacaaagacggcaagcgctattttcaaaactttgccaccggcaagacattgggagaaactgcggacgactattacaggatgttccgcattgctgccgaatgttccctgatgctcaatggccgtggaaatacctatgaacagaaaaaagtggacatcgttctgaccgaacaagaggcggaagccgtggggactgtggtggatatggaactctgcggccaccatccgccggaggccgaggcaattttgaactctgcgctggagaagatcgaccggattgcctttgcaaaagtccagaccatcacctgtcacgggaaagacgattactctctctggtctgcggaaatccccaaagatatgctgcactccatcctgcacgaagcctgcgaacgggttggaaccctggatgaactgatggacgcaatgaacccgaaggacgggtatgaaatgcggctgttcattcagacaccgggacggcagtttgcgttctaccgtatccctgaacggctctccaatctggaggactacgccaatgagggctgctctgtccgaggaacaaaggacgaaatcatggcggagatttttaccgagtgggcgcccgcccaagaagatctggaagatgactttgaactgtgacagcccgcacttttcttttcatctgtacctgcccgcccccctgcgggggcgccccgcaaccggaatccgcaggccacgccctgcggttctcggttaaggcaggaatagccgtcatacctgacggcgggctgacagcttgaaagcagtgctttcaacggggttttgaggatttcaaagggtatgattttttgattctggtgtgatttttgtcataccgcgctttgtatccgttctacccaccgattctaaccatcctctgcgttagaatggttagaatgtgaaaagcattttgtcagagcgccggatgaaccggcgccttttctgctggaagggaggattgatttgaaggaatcgcccataaaaacagagcgcaagacgctccatctgccggaggataccattcgggcgctcaataagctggcggccaggaacgggacggacttttccaaagaagtgcgcagggcgattgacgaatatctggatttggaaaccaccgccgaaaatattgacatgataaacggggtcatccggcaggaactcagcgggcagctcaaagccctgggaaatcggttggccggactgataaaccgcctgacgatcatatcggctgcgggctattatgccaacattgccattatcgcagaccttattgaccaagatcgctattcgtcttttgaaaaaattgagtcggcggcccgaaagcgggcattggcatttgccaatcagaaaaacgcggatgcgttgcgtactttcatggatgacgaggaaatgcagaaagccatccatgccgtacaaggagggtcccgtgtcgattctgatttataagcagcgccaccggcaccccaattataagaaaactccaaaaggcaactatgcacatattggttacattgcaactcgtcccggtgccgtgaagaatgaggggatgcgccacgggctgtttggcaaactggagtcgggggcggtcaaagagtttgacacttggcaggaagccgcccgcctggttcgggagctgtcctatcgccgtgtcaatatgtatcggggaattatttccttttcgccggaaacggctgccgaattggggctgtccgatcacaaagcgtgggaggactatatcgaccgccacattttgaccttggcgaagttcaatggaatccgggtgcaggatttgcaatgggtggctgcccaccataacgaaaaaggccatccccacatccatgtggtgttctggaataagaatcagcgaacaatggtcccttttgtccacccaagcatcccggataaaatccgtaagcagctcattcgggatacctttgccgagcgcattaaggcatattgcgaggacaaacagcaggccaaggaacacctgtcggccatcacagacgaaatgatcgacgagtttgagaagtatatggaacagcttcacccgcaggaatatcgccgcctgcgtgaagcgtttgggcgaatcacggatgatgaactggggacttcccctttggacagcgttgttggtgcaatgaagattgccccctttctctcacgcctgttcgcgctgaaggagaaaatgccgaaaaagggacggctgtattacaaattgctgccagaggatgtgaaggtcgaagtggatgcctttgttgccttcctgaaagaaaacaacgagtacatccgcaatctggttcaggactatgtggagagcaaaacccgccttgccatgctctatgacaccgacccgacccacatcaaagaacagcaggaaaaggctgtggcagaggctgataagctgatcgccaataaaattctcgatgtgatccgcaccatgctgtgcaaagaccgtgaggtccagtcttttgaatatacagaggcccggaaagcctacttcaccgaacagatgatttgcgaaattctaatagcgctggagcaggctgctatgagttttgacatggaatacgacgaccggcaaaaggccatgagtaccgaactgtcaaaggcggcccgaaaagagtggtatctgcggcataaggacaagggggtggaaccatagcaatccgcaaataaatgtattgtcgaaaagttttgcgattataaaccgcaagactgattgaccacctgtgcgttttgcggtataataatagcgaatggaggtggtcacgatgattgaaagaccgttatatgtggataagattatggcctatgtagatactccttttgttaaaatccttacaggggtgcgccgctgcggaaaatctaccatactgaaaatgattatggaaaggctgaaaacggaacgaaacatcccggaagatcgcattataagctgtcgttttgattctatggaatatgaggatatgacggcaaagcagatctacacgctattgaaggatcagctttcctccacaggaaggacttatctgtttctggacgaggttcaggaaatcagaggctgggaaaaggtcgtaaactcactggcatccgattttgatgttgacttgtatattacaggctccaactccagaatgatgtcctctgaaatagcgacctatcttactggccgatacatttccttccgcatttttaccctgtcttttggcgaatatctgatgttcaaaagcaaattcgccaatgttggggagccgaaagcagaacttgccaattatgttcgcctgggaggatttccggcaacgcatttgcaggcgtattctcaggatgaaatctacacgattgtccgggatatatacaattccacgatcttctcggatattgtaaagcgaaatcaggttcggaagatcgaccagttggagcgtgtcgtaaaatacacatttaataatgtcggcaacaccttttccgccaagtccattgcagattacctgaaagcagaacggcgatccctcgacaacgaaacggtttacagctatttggaaaagctggaaaaggcatatctgcttcaccgctgttccagatatgacttgcaggggaaggaaatcctgaaaacgcaggaaaaattctatctggccgatgttgccttgcgatacagtgttctcggctataacgcagacagcgttgcttccagccttgaaaatatcgtatatttggaactctgccgacggggatatactgtcaatgtggggaaaaccggagatagcgagattgattttgtagcagtcagacaaaacgaaaaaatttatgttcaggttacgcaggaaatcaactcagaaaagacagaaaagcgagaatataaccgcctgcttgaaatacccgacaattatcccaaatttgttctcacaacagacgaatttgccggtgggaactatgagggaatcaagacaatgcacatagcggattttctgcttagtgcggagtattgacatctgaaaaaattgatattgccatacagaaaagcagtcctgcggggctgctttttctgttttcaaatgattgtggaaatcaaaaagtgaccggccgcccggttccagaaaggagaaaggatgatagcagcgaacacttcctataagcaaaatggtgtgccggtgtcgattccgagcggttcgtatggcattgcccatttgacggttcaccaatatgaataccccaaaggacatccctgccataactgcccttataccctgcgcacctctgtcccgtcctgtatgttccctgaacgaagggatggcggctgtctatggtacgatctgaaaaaacagcggcgccctccgctgcctgcggtttaccccaaaaatcaggcggcggcagagcgcatttttgctttcgttgaagttctcaaagatgtgatgaagcgaaaaggttatcaggaaaggaggaaaccgattgcgaagtaaaaccgatttttacaggctgttctttgagcagcttgcccggcgcggctttgatgtaaagcggtcccaatcttccgattacatcgctgatatttatttcaagaaccagcttgtggcctatttctccaaagccgatacggtgatccagaacccctttgtcacagtcaaggacaaactcattcgccttatcaacgatacggcccaggacacggcgaacaaagcgggtatctgccgcgactgtccttatactgacgccaatgagaaacttcccaatggctcttataagctggcagaatacaatggcgtgactctcgcctgcaaggaacatcatctgtttggctatgtgttctccacctaccgcaccgccccggattccggcgaaatgatggcccgccagattttttacaacaaggaatttgcaggacaggatttcgccaaacggagcggtttggtggatgaacgtgcgctgttcaccgaagaagaactccgggtccttcatgcgggcttagttaagatgagcatactcgatcaggatgtttccaacgaggcccgtgaatctgtggaacggattcttgacaaaatcgaggacattatcccggagctgcgggagcaggaaatggagtttgactttgatatggagttcggccagcaggaagaaatggagattggaggatagcaagaatgagtagcaagaggaatcagaccatcgctatcgcccgtttcctgatgtataaatacgggctgaaccagcagcttgagggcatgacggacgaagaatacctggcgcatcccattggcttggaggtggggcaatatgtagctgacctgatgaaatactgcccggagcatatcgtcgatcaagtcatggaacatcaggatgctcttttgcggcgcctgggtacggattacctcaccgtcatagcctatatgccttatgaggaagatggagggacaaagtatgcgtgatggacgcccgaatcccgatatttggggaaatatcatcacctgcggggagattgccgtgggcatttatgagattgtcggcacaaagaaacgtgggctggaagtgccgaaggctgttgccgaggaaattctgccggaatctgtggtggaacaggctgcacaggacggtgaaagcctttgttttactgacccggtttccaacgctatcgttgcggacgccctgctggaacaggaacttgtcaccgatccgcaggcggtggcccgtctggacgcaatccggcagcttgatgatgtggcctatgatacggcctttgaaccgcctgtttcagactatgagctggacgggctggacttggaaagataggagttttcaatgaaaatcctggacttcgacctggaaggaagtcacttcatcatcgaagcagacatttcgccgcgccaagaggcggatgatgatatggagtgtcaatggctccggttcgactttgataacacgcaggtttataaggaaacggacggcgctgtttcgccgttccaaattacagccgttgcttgggctggctatcaactgactgccgatcatgcgttgaaagatgtgatcggacgaatttcccgcaatgaaaccggtaagctgaccgtgcattatatctgccctgaacttcaagaattttttgatgaactcaaaaagtatccggctatcagcggggaacgaacgattccatatttcatttttcacgacggcgacattgcaagactggcctatgcgaccaatgagtttctgtattacgaggacagtaactatatgccgctgatgttccgtaccgttgacggtactcttgtttccgataatgaatttgccgatatgggcctttatgaatccgaggaaaatgttgagaacggcacagaacacattttgccgttcacagattacggttccgatgtggaaagcgcctgtgatttagaggacgaggaagatctggaaatttgaaactcagaggtttgcgggctatgttccgtggccggtgggcagttttcatcgacttttgcaccgtccatctgttgggtggatgggcttaatttggaaaggtaggtgttactttgaggctggtctatatttcttcccctctgcggggagatatggaaaagaacaaggaaaaggcaaaggactactgtgcttatgcggcatcctgcggcgtgattcccttggcgccgcatacgattttcacgcaatatctgaatgatgcggtgccggagcagcgggaacagggtctgcgaatgggtcacgaactgctggagcgctgcgatgaactctgggtaatgggcgacaccatctctcagggaatgaaggacgaaattggcctggctacttttttgcaactcccgattctctatgtatccgatgatatggtgaagaatcagaaaatgatccgccagtcggatcgccctctggacataaatgactgcatccccgacagtagccagtacaactacgaaaatcaatttttggttctcaagcctggggtgagcagcaagggcaaggacatgactgccgacgactccatctggtatgcccgtaacggttttggatgtatttatggagccagaggtcaggccgtgtatgcggaaagcctgttgaccggcaaatacattcattgggaacgacatgacttctgtggcatcgtcaagccggaaagcttgaaagaatggcttctggataagccggtcaggaatgaggctgccgaagaactcaccaagtttgtcacccctgaacttataagcgcagccaagcaaaaccatactgcttgcggctatccttttctaatcgggtatgcccctgcggagggcggtctgcatgaagcgttctgcctggaccccgatccggtcaatcttgcatcttttattgtgaagatggggaaagagcgcggcgacctgatgatttgtactccgttggataccccgtttttgaacaccttcgggacattcattgaccgctgcgcggatcaggactttttgcaaaagcatctattgccggtcctgattcccatgcagatgggcgaaacggagccgcaggcaatcaagctgactgaggatcaagacaatgaagcgtttctggatgattttgctgttgaggatgatatggaattatgaaaacaaagcctaaattgatggtttgtgcgctgatcttcgtttccggcgcgattctcaacctgtttttctcaacagcggttcacggtctgctgacaagagagatcacccggctttcacttctccccatcggggactgccttgccagtctgttttccagccgccagcacatgatgttgtatctgtgtctgcaagggtttgtaagtgtgttggcggttatgttcttcctgaccaacatgaggccgtatgaatcagacctggacacgatcaccccggaaattcagacacccagagccgtgggccaataccagcatggttcagcccggtggatgaccgattccgagaaagacaaagcatttgacagctatattcttgacccgcacaacccaacgatccggcagctcttagataccggatacgatggtttggattttctcaaagaaaaataaggaggcgataaattgaagttgaaccttcaccccaaaggtattcccaagcaggaacctttgggagcggatactccgctaagaaaaggcggcgtggtggtaggtatgcgaaaggagggtgataaagaaaaaatctattttgtcggtgatgactgccacctgctctgcgttggcgccactcgttccggtaaatcaagatgtctggttctggaaagtatctgtcttttgggactcgccggagaatccatcttctgctccgaccccaaagccgaattgttccactacaccgctgatttcctgaaaaagttgggttatgaggttttggtgctggacttcaagaaccccgaaaagagtatgcgctacaatctgctccagcccatcattgacgccatcagtgagggagacaccgaccgtgcagaaatgctggcctgggacttgacgaacaatctggttggtaagccggagggcgaaaagatttggacgaacggtgaatgttccatcatagcggctgccattctttgcgtggtgtgcgacaaccaaaaacgaccggaatttcagaacatgaccaatgtgtattggttcatttcggaaatgtgccgtaccatcggaaataagatgccgctgttggagtatgtcaagaaactctctccgtcccacccagcacgggcgcttctgtccatttccgatgtggcgccgtcccgtaccagaggcagcttctacacctctgccctgaccaccttgcggctgttcacctcgaagtccatctacgctatcacccataccagcgattttacccttgcagatatgggcagtaaaaagcaggcgttgtttgtaatcctgcccgacgagaaaaccaccttttatcccattgcttctctcattgtgtcgcagcaatatgagcttctggcagaggcagcagacaggcgcggcgggcgtctggagcgccgtgtcaacttcatccttgacgagtatggcaacttcactcccatcagcgacatgaccaacaaactgaccgtggcggctggccgtgggatgcgatatgcgctgtttgtgcagggcttcgaccaactgaaagaaaagtacagtgacaatatcgccaacacgatcaaaggcaactgtcaggtatgggcgtacctgcaaagcgatgacccggaaacgctgcgggagatgtccgacaaactcggcagctacaccacatccagttaccagctttcggccagcaacggcaaatacacaaccccctctaactcccagagcgtcagtctgaccgagcggaagctgctcaacacggatgaggtccggcgtgtcaaacgtccccatcagattatcaccagccgcgaccatcccgctatgatgtatgcacccgacctttctcaatggatgttcaacaagatgttggggttgggtgatatggagcataaccgcaggctgcgggaagaacgggaacagaaacggccaatcatcaccgacacgaaacaggaaatcgcattgtggaacatctggatttactaccagaaagacatcatgcgccgccttgcacagcaaaagggcgctatgggcggcggccttgatgatgattaactcataggaggtcttgaatgaaagagaaaatcaaccagacggcgggcaggctgaaacagactgtccgggcggcaggtgctggaatcgccacacttgccgcctctttttttatgtccgcaccggcctatgctgccggtgtgcaggatagccagatcgtcaagggaaccgagcagttgatcggtgatgtgacgacctggctgatggtgctggcgccggttgtggccggtctgcttatcatctatttctgcatccggcgcggcatggctgacgagatggatcagaaaaagtggaacaaccgcattgtggtggcggtggtgtcctgcattggcgccgtactcggttccgccaccctgaacctgattctcggctactaccagtaagccgggatacattccgtagtacaggcgatttccgcgccttgctaaataaatcactttattaacaggaggaaaaaactatggctaacttcatccgcaacactcaggttaaggctatgacttctatctggactgccaagcagaaggcccgtgagctggccgaccgcacggcggcggcgctgaccgaccgcaccggtcagggtacgctggatgtggcgattactgtgctgatctccatcgtcctgggcgccctgatcctggccggtctgtacctgatcgtggacgacaccgtgctgcccaccatcacccagcgcatcaaggatatgttcaactacggcggctgatcggaacaagcagcggcggggccatcggccccgccataatttttgacaggaggtttttcaatggagttcaaagcggaaatcaaaaagacttttaccggtcccgacaagctgcgggcggtgtgcagcgtggtcctggatgactgctttctggtgaagaatgtgcgggtcgtcgagggcgaaaaggggctgtttgtgtccctgcccagccgccggaatgtcaagggcgagtgggtggagcattgcttccctatgacgaaggagctgcgggcgaagctctccgctgccgtgctggaagcgtatgaggccgccgtgcagaacgaggaagctgctgcgtcctgattactgccccatattccaatccctattgggggcggccgagcgccgcccccagaaaggaggtggttgctgattggaatatatcttagtgctgctgattgtggccctgctgaatggagcaatcgcctacattgatgggctgatggaagggatcatccctcttaccctgtatgcagagcagtatatgtccactttggccggggttgatctgtttcaatccctgtttgacattgtgttcggctttggtgtgtccctgattgtgctgaagttcctgaaaaaaggctttgaaacctatgtactgtggtcggacggggatgcagatgaagaacccatagccattctcacaaacttcttcaaggcaatggcggtagcaatctgctttcccaccatgtatgactggcttgccacgattgtagaggaaatgagcaataaaatgttggaggccatcggccttgccaccgcttacgattgggctggctgggtatccggcatctcgacgatgggacttgtgacggccatctttggtctggtatttgtcatcgtctatttcattctgtatttccaattcctgatgcgcgggcttgaaatcctgatcttgcgagtgggcattccgttggcctgcgttggtctgattgacaatgacaaaggtgtattcaagccctacatgagcaagttcttccagtctgcgctctctgtggtaattcaggtttctcttgcgaaattgggggttggcctgatgatgaatatgcacatcttctggggcgtggcctgtatgattcttgcggtgcggacaccgaagttccttcaggacttcctcattacgaccggtggcggtggcggcggcgccattgtcaacaacgcataccattctgtacggctggtgcagatggtcaagggcatgggaaagtgaggtgatggccgatggtgacaatggacgatatttcaaatgccatcatcctgcttgtgcgtgttggtgcggtcgcccgtttcatctactgcctggtgcgtttgaccgcagccgaggaacaagcagcgcagtataaaaagcgcgcccgcaacacggtgatcttctacatcatcgcagaatccatctggcagatcaaagacctgattctgtactattattcctgacaggaggtgcaaatggacgaagatttgaaactctacatccctctgggcgtgaagccggaggccgaactgtttaccggctttgggaaaaagcagctttttcaatccattgtggggtccctggtgatgggcggcatagcggcgctggcctggctttttaccggcaatgtgaccactaccgttatcctggccctggccggtatctttggctctgtgatgatgactaccaaagaccagagcaatttgtccgtggtagatcaggtgcaaaacctgattcgctttttacgcggacagaaaatctacccgtatcgttacggggatgaatgggggcttgagtgatgtacgcaaccattccggtctactacccctcgctggaggaagccgcccgaaaggatgaagcggctctctggtgtgacagctacaacatcaatatgtcctgccgcaacttcattcaggataaggccatgactgcctttaatacccgtgaactggacgcctttattgaagaattggtgcgttgttatggaacagagcgggcgatgtatgtgctgtcccgtaccatccagttttccgattgggacgcgcggttcgatcaggccgtgcttgaccgagcgggcaaaacggacttccccgacgcaagagagccgagggaggcacatcaggtagacccgaccacccgatatgtcacggagattgatccgtgtgttgtaaatgccgtctttgtgaagctgatggagcttgaggacgaacaggaagaaaccaaccacatgaatgaaatcgagcaggatgagcttgacgaggatatgacggcagaactgtgaggctgccgatggagcagatgacatttctggatttcttcgcaggcatcggcggtttccgcaagggctttgagctatgcgggatgcgctgtgtggggcattgtgagattgataagtatgccgaccgcagttacagagccattcacgatgtaaaggaggatgaatggtatgcagccgacatcacaaaagtcgcccccgcagatctccccagagcagacctgtgggcaggaggattcccgtgtcaggatatttcggtcgctggccgccagcgagggcttgacggagcaagaagtggactcttttttacacttgctcaactcgtcaaaggccaaagtcctgaaaatcgacccacatggattgtccttgaaaatgttaagaatctcctatccattcatggaggatgggactttgcgaccgttctcgatacgctggcctcactcggctatcgtatcgaatacggacttctcaatacaaagtatttcggcccccctcaaaatcgtgagcgagtgttcattgtcgcttgccgacatcctggagccggacgcggacccaaaatatttcctgtccccgcaggcagtggcaaagctcttatccaactcataggcggtatgcaggggcagcgcgtctatgacccggcaggcatcagcgtaacaatggctgcacagtctggtggctggggcggaaagaccggtctgtatttcgttgacctttgcaacggaaatcccaaactgaccgaccacgcccgttgtatcaaagccaagtattacagcggtattaccaaccgtggcggggacaattccggtgtcctgatctctcccgcagggatggacaaggatgcggttctgtcctttgtggacatttgcaccgggaaggcgaaactcaccagagaagcccgttgcatcctctccgcctataaccgcaccatcagtaattggggcggcagttccggggtgttctatggctgccgtgctgtcgtgaccccagatcgggaagaaaaacggcaaaacggacggagaatcaagaactgcggggagccgtctttcaccgttacggcgcaggatcggcatggagtgctatttcaagactgcgatgagtgtccctacgggatgcagattcgagaagcgacaaagaaaggatatgatattgcccgctgcggcgacagtatcaacctttctttcccggagagcaagacgcggcgcggacgggtcggcaaagaccttgccacgacgctggaaacctcttgtaatcaaggcacagcttttgccgggtgcggcctgatccgcaggctgacgccccgtgagtgctggcgactgcaaggctttacggacgagatgtttgataaggcacgggcggtcaacagcgacaatcagctataccggcaggccggtaattccgtgacggttcctgtaatctacgccattgggaaacaaatccttgccgcacagaaggcattggaatgtggagaataagatgtttcagaaaaattggaacccgtggcccattttcatcggcatggcggtcgcaatgaccgccatcgccgtattctatcgacaaatcatgtgatggaggtgattcatgctggaaactgacgcattaaaagaaaagctggagatggaacttcatcgctttgcccggccgccggaggaactttcttccggcgatccgtattttgagcagcttcagaccatgctcgcaatccgagatgaactgataaatattccgctgtgtgatattcagcggaatatgctgctttcgatggaaaatgtattggaatcggcatggtcattccgcaacacacccgtcccggatcgctgcatgaatccgaacaatatcagcgaagtggtgtactacttccttcaggacaaaggcgctgagtaccggggcgacctgctctatgaacgggccaaagccgagtttgatgcccgtatggaagaactcgccgccctgccgcccaaagaaattcttgaccacgcttatgagaaaatcatcaaagaagattttctctgccatctggaggaagggttggacgagtgggaaacggacgctctgttgtcttatccgcagcctttgacggctctctatacggaatggatgggaaatgattactcctatctggacatagaccgaatccaaagcacggccacacaagcggcgggaaaacggttaaatgaacttcgccgccatgagtttgacgtcaatggtgagccgcccgtggaactacggtatttctatgatttgcatagcgagatactggacaacccagatctggagtgggtcggtgatatggagccatgaatcctctgattgtaaaaggcgtggtatttggcctgctgttggcttgtgctgcgctctgggatatgaaagaacgagagattcccaatctgattcccgccatgattttagtctgtggcttgatagagctgcgccccgccgcttctgtggcggggcttcttgttacgggaggcccgtacctgttggccgcattgctgacacatgggaaagcccttgccattggcggcggggacattaagctgatgggggcttgcggctttgtcctgggagtgtggcctggtctgctgcacagcattttatctctgttcctggccgtgcttacaggggtaatgctgtttgggtttcgcaggcaggacttttcttccatccggctaccccttgccccgtttttctgcattggcggcgtaactgcttattggcttgcggctgcggccgctgtaatttgaacaaatggaggtatcaacttgaacaagaatattttcaggaaccggacgatcatcggtgcggtttgtatcctgctggccgtcctggtttgctttggcatcacgccccttttcaatgcgggtttgaaggcccagaccgaagcggtacgggtgaaagccgaggtgattccccgtggcacctatatcacggcggatatggttgaggtctacaccagaggcgcgtccggtatgtctgacgccattgccacatcacttgacgaggtagtaggccgatataccgatgtagagcttcgcaaaaacacagatgtaaacaccggctggctttcttctgaaccgctgactcagtacgagtacctgaccaagctggacggttccaaagtggcgatctccgttaccattcccacctttgccaaaggtggttccggcaaggtggaagctggtgacatcatcatgctctttgcaaccgataaggacaccggggaaaccacccagcccccggaactcaagtatgtagaggtcctggccgcaacacagagttccggcgccgacaaggaatatcaggcgccccaggatgacgaggaagaaaatcccgaagaatcgctcccgtccaccattaccctgctggtaaataccgaacaggcacaactccttgcgcatttggaggaatccaacagtctgcacctggcgtttgtgtaccgtggaacccgtgagaacgccgaaaagttcctggcagctcaggatcagttctttgtggagccggaggaagataccgcagctcaggatggcgaacagggtgaggtatccggtgataacaatgtggccgacaacaccggtgataatgcggccggcaatgaacccgcagaggaacaggaggttgagaataccgatggcgaataagcagaaacagatgcttgctgtgtggggcagccctgggggcggtaaaaccgtaactgcggtcaaactggccctggaattgtccaagcggaagaaaaatgtggtgctggtgtttaccgatgtgacggcgcccacgcttccggctgtggtcagcgagaagaaactgccggatgtgtccgtaggcgaactgctggcggctcccggaatgacgcaggaacaggttctcaagacctgcgttccctgtgagaaaaacccctatatcagctttctgggctacaaggccggtgaaaatgtctttacccatgcggagtacagcaaggaaaaggcggtggatatgctggtcctgctgcggcacatcgcagactatgtgattgtggactgcaccagccttttgaccggcaatgtgctggcgaccaccgcactggaggtggcggatgatgtgctgcgggtgtgcagctgtgacctgaaggccatctcctacttctcgtcctatctgtcgctggttgctgacagaaagttcaaaccggaacagcacatcaaggtgctgtccaacacgcgcccctatcagggcggcagcgaatacgagaactcctttggcggtgtgaaataccggctgccgtatcttccttcgttggaggaacaggcggcgacgctgaaactgctggaaccgctttccggtaaagaggccaagacctatgagccggtcattgccgctattgccggggaggtgttcggagatggcaagtaatattgacctgttcttcaataccagcaggaacaagcggacatttcccgaagtgctggcggagattcaggaatatctcgccagcaagtattcgaccctgattaccgataacccggaggagcagcaccagcagatcaccgcatacatcgcaaagtatctcaacgattacagtctgggcgttgagggcatgagccatgaggaactgatcgacaaactctatacggaaatggccgagttctccttcttgacgccctatcttttcgcaaatgatgtggaggaaattaacatcaattcgtggaaagatgtgaaaatcacttatgcagacgggcgtgtggttcccaccaaagatcggttccagaccccacagcacgctgttgatgtaatccgcagactccttcataagtccggcatgattctggataacagtcagccgggtgtggtgggccatctctccaataaaatccgtatcacggttctgggcaatccgctcacggacaaagaaaaaggtgtggctgcatccatccgtatcgtgaatcccaagcagttgagccgtgatgatttcattggctacgggacagccaccgccgaaatgctggactttctggccgaagttctccggttcggtttgtccatctgtgtgactggttccaccggcagcggtaaaaccacgctgatgagctggattctctccaccattcccaacgaaaagagaatcttcaccattgaaaatgggtgccgcgaatttgaccttgtgaaagaggatgcagacggaaatgtcatcaacaatgtggtccataccgttacccgtttttctgacgatcccaagcagaattacgatcaggagcgccttttggagtttgccctgacctgtaacccggacattgtgtgtgtcggtgagatgaaatcggccgaggctttcgccgcacaagaggcggcccgcaccggccacgcagttatcaccaccacccatgccaatagctgcaaggctacctattaccgcatggtaacgctgtgtacccagaaatacgatatgggtgacaaaaccctgtataacctggtgacagaagcgtttcccatcgttctgtttgtgaaaaagctggaggacaacagccgccgtgtcatggagatcaccgaatgtgagattctggaggacggcacccggcagctccacaccctttaccgctatcatgtatcggaaacctctatcgaagatggcaaggtaaaggtgcatggcgagtttcaaaaggtatccacgatctcggccagcctgcaaaagcggcttttggagaacggtatgccgccccgtctgctggagcgtatcgccggtggcggtgtaaaactggataccggaaaggaggaaactgcgtgattgtattgattttgctggcctttgtcgggatgctgaccggcatcttcttgattctgggcatgaccccctttacatttgcagaggaactgaccaagccgctttccgggcgccgacagccgatttccaagcgaatccagcaggtcaaccaccccaaagagccaaagggcatccgtaaaaccgtgcaggaagcacgggagatgttgatcctcaccggaaagggtgggaagtttgccgccgtctgcgctttctcgctgttcctggcggcaatgggcgctgtgatctgtattgtaattcagaactactttatgctgccggttttggcggccggaatgggcttgctcccattctggtatgttctgttcacctctcacagctataaaaagctgatgaacaacgagattgaaaccggactgtccatcatcacaagttcctatctgcgcagcgagagcatgataaccgctgtggaagaaaacattcattacctgaacccgcctgtggctgatgtgttccgaggctttttggccgaaaccaatatgataagcgccgatgtgaaacaggcgctctccaacatgaagcccaagctggacaactatgtgtttcgggaatgggtggatgccgctattgcctgtcaggacgataagagcctgaaaagcacgctcaccccgatcatcgggaaactttcggatatgcggattgttgcagcggaactggactatctgctttatgagcctttcaaggaatttatcacaatggcattcctgctcattggcaacatcccattgctatacttcctgaataaagactggtacgaggtgcttgtgaatacgggctttggcaaggggattctggcggtctgcctgctggtgctgctgatctcctttgcggcggtgatccggctcaccaagcccgtagaatacaagcgttgattccgtcaggaggtgataccatcgagagtgctaccaatctccctgcgggacgccaatgcgtttgttctggcgcatcaccggcacagtgggcaggtgcgcggctgtaaattctgtgtggctgtcgtagatgatttggatgccgttcatggagttgcgattgtggggcgccccgttgcccgccgactggatgatgggaaaacagcggaagtgacccggctttgcaccgatggtattgccaacgggtgcagtttcctttacagccggtgcgcccggattgcgaaactgatgggctatcagaaaatcatcacctacacccttgcaaccgaaaacggagccagcctgcgggcttccggctggcaatgtgcgccgggactgcgaggcggcgggaactggaatgtgccggggcgccccagagccgacagccgcaacaccggccccaaacggctctattacaaagaattgaggtgacgcgagttttgtatctcattttgctatgctttgggacgctctttggcctgggagcgttctttttattggccgggctgctccggctgccgacttccgcaagcacaaaggcggttctgaccgtaacgagtcgagggaagtcccagaaaggcagcatcaacgctgtcctgttcgatatggctgcacggctctctccgctggtacatctggacggctataagcggaagaagctggaggcacagttgaaatccgccgaaattaaaatgtccccagaaacctatattgcggcggcctgggtaaaggctggtctgattgctctgctgataattccggcccttctgattttcccgatccttgcgccggtcattgtgtttctggcggtggcagtttacttcaaagaacagaaacgagcggacgagatcgttcagcagcgccgggaagaaatcgaagccgagctgcccagatttgtaaacaccattgaacaggaactccgggcatcccgtgatgtgctgaacatcatgaaatcctaccagagaaatgccggtcatgccatgaagcgggaactggaaatcacgattgcggatatggcatccggcaacgaggaaaacgcactcacccgcatggagagccggattggaagtaccatgctgtccgatgtggtgcgcggcttgatctcggtcaagcgcggtgataacggaattatgtatttccagatgctttctatgaccttcaagcagttggaacttcaaaaactgaaactggaggccatgaagcagccggggaaaatgcgtaagtattccttcatgctgctgggctgtttcctgctgatgtatctgggcgtcctgggctatgtggtgttggaagcctttggcgatctgttctaaaggaggtggtgaaaccgtgaaacgacttctgaaggacaaacggggtgagggctttgtggatgtgtgtgtcctggtcctggcgattgcaatggttctggcgttggtggtccgcattgcgccggtatttgtggcaaagcagaaccttgatgtctttgcagacgaattggttcggacagcagaaatcaatggtcaggttggctctgccaccagcgcaaaagcggcagatttgcgggatcaaaccgggcttgaccccaacatctcatggagcgacaccggaaaaatccagcttggaaatgaggtggaagtgaccctcacaaccaccgtcaatatcggactgttcggtgagtttgcatcctttccagttactctgacagcaaaggccagtgggacttcggaggtgtattggaagtgaagaagattcgagaagtcctgaaagacaattccgggcaaggcgtaccgatgattttggccgttgtcctctgctgcctgattctggactgtgtaacctttgagtatatgcgactgatgatcgttgcacagggggtgcgcgattctgtccagtctgccattgtggatgtggctaccgagaactgggatgaagcctatgccggtttgcgggagggttactccggcggctatcagctttccggttcgtcctggtcacagaatgttaccagcggcaatgtgtatgcccgcctgcaaaatgttttgggtgttgaatacgagggcgggcagtatgtaaagtacagcggcgaggatttggagtatcgactgtacgatctgcacctggaagtggaaaatgctccgctggccccatctgtgccggatgggattacgcagctcaatgtcacaggaacgatcactgttgatgtgccgctttcctttgggttcgggcatctgccccccatgcagatcaccatgaaactcaacgccaaatatgttcccaggttttaattttgtgtatttcgccctgtcgcttttccatagcgcaaaaaaatatttggcaggaatcacacctggacgccgtatttgtgcaaatggtataatgatggcgggaaatattaccgtcgttttaatataaaattaccgtgcaaggaggttttcaaatgagtgctaaaaacaaaaagctgctggccgttctcggcgtagcagctgttgtggtaattgtaattgccgcagtgctgctgggcaagggtgggcagaccacgaccgttgatccggcatccactccctcggatgtatctgccgaggatgtggatagcagcaataccccggacggtagctccagcgaaccgctggtggtggtgccggacgcctcgaagcccgaagctactgacagccagaaccagacggacgccgttttgaatgtagaggaagaagatcaggtggatgtcaacctgaccgacagcgaaaagaagcccgaaaccactccgcctccggcgccttctcaggaggaacagcaggcggccagcgaaaaggatgagccgattgtgcatgagccgaacagcaaccagcctcagaccggcgacacgcagggaggttccatctatctggagggctttggctggatcaccgatgagggcggcggctctgtccagcacaacattgactctgatggagatataaacaagcaggtcggcaacatgggctgataataaccccggagagtacggtagcgataccgtactctttttttgccctcaactaatttgattggaggtgcgtttttgaagcggatatttataatattgctcacacttgtgctgctgttgggtatctgccctatgagcgccctggcagaaaccggaggaagcggaaacgtggatggcggtggcggcgatatggggcaaggaacctcgcagaactcctggaatcctggtatggatggtgtgcggattaccgtggttgacgcagaatccggtcagcctgtgtcgtcctcttttgatttgaccaacaaatctccatctatcaaggttcattttgggaaagtcagtaaaattcaatatgcgaatggggcgagtatttctcccaccacggggaattacgactactataccccggcaacccctatgccgagaatcatcagcagcggcagtcagagcgccagcattgaagctatcaaaaaatacttctgctccgagtatgcggtaaaactggtggcacagcagaccggaatcgcatacgaggaactgatcggcggacagtacaagctgtttttggagccaatcgcctatttcaagcacaacggaattatgatggcaatgactgcccatgaagccgcgctctatgataatcaggcaggcgggtccttgcgtaagaccatgacgagtttgactcataaaaacctgccgctggctatgttcctggaatatgcggatatgggatttccggcctatacaggggctaccaataagacctgttccaacgatactattatcacctatctgggcatgggtattgtatggtttaccgacccgcccgaacagccggagccaaccgactatgactatgagtatcgggtggatacggatgtcatcacgccggtaacactctatgctggttcggagatcaatcctgacagtccggccacggtatccttcacgatcaacggcagtacctaccgtatgaacaatattgtgattccgtcgggagacagccagattgcatgggtaaagtggcatacaccgtcggagccgcaggacattaccatctatgtcagcaccaataaaggctcgttgagccaaagcaccattcaggcaaaggtggtagatctctccggcaacgacccgcccgacccgaaagccaccgatacgatgggaagctggacggccagcagcgttcccagccgtgaaaccaagacctatgctgcttggagtgtctggtgggcgcggtggcacccctattgggtgtggcacagcaccggtgatgacgatggctattgggtggacgaaggatggtatgacttcttccggaacaattactcggccagcatgaccgctaccacccgaatcgaaccggacgaaaaggttcccaccgcttcgggtgatttgatgaaatcaggctatggcgtaacaaacacggtaacagcgacggtcagcacctctgccccgctgtcgcactatacctatgggcagacagccgtatcctacttcccggagtttggatacggaacctactggcggctgcttgaacggctcaccagcggaacgacagcacggttccagtttgcaaagaacatttacagcacctataaccagcgggtgcattttacgccggtttggttcccggacgggagctacacagtcaatactcatgtgatggatatttggacgcctgcggggatgcttgccatgaatctcaccgatgatgtaacgattagcggctccctctatgatgattggcatatcgcaccgggcaatccgtaaggaaaaggagaatggatatgaacgacaacagaacgattcggattatggtgtttgaacctgggcgggcgccttatacgaccatgctggaggattctctggaacaccggcaggaacttgtgggcggggatattgagtgtattcctctgccctgcgaaacggttctctgctgcaatgcgtccgggaaactgacaggtctgccggagaaccgacagtacgggccggatacccttcacggaacttttttcctctatggcgataccccggaaggacggggcgtttctttgaccgatgaacagattgccatgtatcaggagtattttccgcagccggtccccacagcagtatcctttgaagtacggtccgccgccgacatgaaagagtttatgaaccttatgttcggcaagggatgggaaatggacaccggagctggggacgatatggaggcaggccgatgagtaaaatgttttcggtggtgactctggatgccccccactctctgatgacggagcattttgtccccggcagcccggatgggctggatgaactgctgaactgtgatgaaatctccgaggtccttgccgaatggcccctgggggataccattgaagcgaaaattcagacctatctctatggtgatggcgaaaccgtgcgcgctgacgaggaggatttggctttcttccgagagcattttgacgagctggacgccagcgacgccctggactgcatctcagaccacagcttttcttttgaatcgggcgagttggattttgggtgcggcgaagaaagcgaagatgaggaagatttggaactgtaaaacacggctctgctgaaaagcagggcctatttttatggcaaagaaagcgaggtcgataaattgcttttgccgattattatgatctgcgtctgtgcgctgctgggcggcgggacgctgatttttttgaagttgtcggccaaacacaagaaatcgaagaacaaggacaaggaagaactggcccagatcaccgccaatgagtttgtgaatgtgaaggatattcgagggaacttcctctatacccgtgacaatttggctctggcatatctgaaaatctacccgatcagcacagaactgttcagcaaaaacgaaaagcgtctgattgccaagcagcttacggtgagcctgtccagcgcacagtacccgtttcagcttcttgctgtatcccgcccggtagatatttctccgctgttgtcggagctgtccgccacactcacttcttcttccgatgtgaagcaaaaggaactgctgaagcaggaaatcgtggaaatgggcgcctttgctctttccggcgaggttgtggaacggcaattctacatcaagatttgggatagggtaagtgatggcgttgagcgcgatctgcttcagaagctcaaactgctcggcggatatttttcggacagcgggattcagacagagattctgcaacagcaggatattgtccggctgtgcaacctggtcaacaaccccgcctatgtgcatttggaggattccggcatcaatgctgcgatcccgattttggaaagtgtaggtgttgcctaagtatgaagcacacccggcaggatttgaaaatcatgcagggttggagcctcgaaagaaaaatcagagttacgcagacgagaatcatggaatggtatatgcggtacgatgggcaggtctttatcagcttttcgggcggtaaagactccaccgtgctgcttgatctggcacggcgggtctaccctgatattcctgctgtgtatgttgacacggggttagaataccctgaactgcgcgatttcgtaaaaacgaaggacaatgttatttggcttcgcccgcgctatccgttcactcagattcttgagaagtacggctatccgatcatctccaaagagatctcggatgttatcaatggcgcaagaaagggacaaccttaccgtctggcgagaatcaacggagaactgctggacaagaacggaaagaagtcgatttacaactgcgagaattacaaatatcttctggacgctcccttcaagatttcggcaaggtgttgttaccacatgaaaaaggcgccgctgaacaaatttgaaaggcagtccgggcggcacccgattacgggtgtcctggcctgcgaaagcaagctgcgggagcaatcctggatcaagtttggctgcaatggcttcgagcgccagcggcctctcagccagccccttgcgttctggctggaagaagatattttgcggtatttgaaaatgaccggcattccctatgcccctatctatggggagattgttgaaagccgcaagaagaacggcaccccgattctgaaaaccaccggtgtttccagatcggggtgtatgtattgtatgtacggcgttcatctggagcatgagccgaaccggtttcagcttatgcaggtgacgcatccccagcagtatgattactgcatcaacaaactggggtgcggcgctgtgctggactacattggggtgccttaccgcaatcagcagttggaggtggatcattgttaggttctaagaaaaaagaagaagtgcttcccgttaatgaagcgctgttaaatgtcattaccccgatggggctggaaatcaagcggaacagtctggtcatcggtgaaaatctgggcaaggtgtacggcgccgtccgctatccgcagaaggtggatatgggttggctctccaagatcaccaacatccccagcaccatcgtttcggtggggattacccccattgacaatggtgcgctcatttccgcaatctccaaaagcattgtccagcagcgcggcgccgccgacagtgctaaagacccgctgacccggcagcgcgccgagaaagccgccgaggacggcgagagaatcatgcagcggatcgaccaggagggcgaaacagtcgccatgatgtcgctgaccgtgatgccgattgcacaggatgaagccaacttcacaaaggtctgccgccgtgtggagagcgccttcaatatccagaagtgtaaggtgcgcactctcgccaatctccaaaaggaagggttccagagcatttctcccacctatccggccaactccacggtggacagcattgtgtcccgcattattcccatgagtacctttgtgggcgggttcccgtttgccagctccggttacaacgatggccggggctattattttgcaaaggacagcaacggcggcctggtgattctggatacctgggagcgcggaaacgaccgcaccaatagcagcttcgtgattatgggtgtggccggtatcggcaagagtaccgttgtgaagcacatcatgctttcggaatacatgaaggggacgaaaatcctgtgcatcgacccggaatccgaatataaggatatgtgccggaacctgaacggaagctggctcaatgctggcggtggaaaaaacggccgctccaaccttttgcagattagaccggcgccccgtgacgatgacgatgaaaccgacaaactctataccgatgaaggaaacggaatgtctgatatggcgctgcacatgaaaacactggagattgaattttccctgtatctgcccagcctgacggatatgcagaaagcgatcctcaagcagacgatcattgaactctacaatcagttcggcatcttctgggaaacggatattcggcagctcaaggccacggattttcccattctgtccgaccttcacgccctgctggaaaagaaagcggaggccaacaaggagaatccggtatatcgtgatctggcaatgctgctgtacgacgccgcagcgggcagcgacagctttctatggaacggccacaccacgctggaggccaattcccggtttatttgcctggatacccacgacctgcaaaatgcgtcggataatgtcaagcgcacgcagtatctgaacctgttgagctggtgctgggaggaaatgagccgcgaccggaatgagcgttgcctgctggtatgtgacgaggcatatctgatgatcgacccgcaggtcccgcaatccctggtgtttctgcgcaatgtggagaagcgggcaagaaagtatgaagctggactggcaatcatttctcattccgtggtggatttcctggccccggaggtcaaaatgtacgggcaggcccttttggatattccgtgctataaaatcctgatgggctgcgacggcaaaaaccttcaggaaaccaaagacctctacaacctgacggacgcggagcaggaattgttggagagcaagcggcgcggacacgcgctctttatcattgggtccaagcggcttcatgtaaactttgagattccggcttacaagttttcctatatgggcaaagctggcggccggtaattcggtggcggccgggagcaatcccggtcgccttacttattccacacaggaggttttcagatgaatcatgcggaacgatacgaatacctggtcaacaagatggctgccatacgttggaggggcagtgatttggatgcttcctactatgccgcccttttcctgatggcttcccatccgaccctttttcagaagatggatcgctacctctgcccggagggaatcgactttacaaagatgatgcggaaagaggagtttgaatatgactggatgaagattacggcggatgccgcccgcaacctcttttcctggaacagcaagtgtgctgctactccttttgagatttcgcggatgcctgccccggcgattcgggcgctctttacggcctgcttcattgctaacggggactacatggtatctgtccgggaaaataacaaaggagaaaaggtgtttgaaattgacgacagcgccggtaaacggcgggaggcgttcaatctgcaaatggagcagatgatgaaagcccccggtatggaaccggactgattatggaggtgattttttggctgttgatccgttgactgcaaaaattttggcaaaggtagctatgcaggcggctaccgactccgagagccggaaaagaatcctgtttatgatcctggccccggttctggggcttttgcttttgattgccttcatcctgtacctcattaccagccccttttctgtgctgtcccaatggttgattggtgatgaggtaaacgtggtagaggattttcagaagcaatatggttacaaccagcagctcggcatttatgagaaagactatatagacggtagtggtcagagctatgagggcgtcatctttacggatggggcaaccgaagttgtctactacaatcagttggatgagcgttgggccgatcttccgtatggaaccgataatatcggcggttatggatgtggcccgacctctatggcgattgtggtatccagcctgacagaccagaccgttgatccccccacaatggcagaatgggcgtatcagaacggctattggtgttccggcaacgggtcctatcactcgttgataccgggggctgcggagggctttggacttcaatgggaaagcatcagcaccgatgacccgcaggctgtggtagacgctttggcgtccgggaaattgattgtggcgctcatgtcaaaaggccacttcacatccagcggccactttatggtgctgcgcggagtgacctctgaaggaaaaatcctggtggccgatcctgccagtaaaaagcgaagcgaacaggaatgggatatatcaatcattctggatgaggccagaaagggtgccgcagcaggcggtcccttgtgggcgatctattaaaggggtgcgatatgaataaccgaaacaagctgattgaactgtttatctacatcgtgatcgtggtggtgggcatcgtccttttgctgaccggcggggcggatgacaaaaccagtgctgaaaatatgagaggtgaatcctgtgctgttgtacttgacgagtaaccagaaaagcaacctgatcgaccccgccgtgcggaatatgactctgcccgccaagaaactggtcggccggttcagcctgaaaagcttcgtgaccaaagatatgcgcaattatgccaacgccaaattctttgtggtggatgcggcgtgtatcgaggaaagcggcaatgatttcacccttgccctgcaatcctttcagatgatgttctccgcccggattatcgtcatcctctccggctgcgaggatgtgaacggcgaggtacagcggctactgtccatcggcgttgtgaatctggttacgggtgaaacgatggaggacgccttggacgagctgacagaagcactttccgaagatgggatgcagcggtatgtggtaaaggctcccgtctacgaacagccagtttcccgccacgagaaagccccggagccggacgagattattccgtaccgctggaacgcccggaatatccgtattgccgtggccggttcgcagcgcagaagcggcgtgacggtaacggcctttaacttggcatcttggctggcggccagaggtgcggaggtggcgtatatcgaagtcaatcagaaccgtcacctgcagctcctgctgaacatctacgaggcggcgccggatggggagcattacaccattgatgggatcgactgctacctgaccaacgagccggataaggcgtatcagtttatcatctatgactgcggcgtaatgcagacgcctacttctatttttcgtgacgcagaacaccggctcctgtgtgggagtgtcctgccctatgagattccggtgttccataaggcattgtccgagtgcggatcattggaagtgcgcccggtggcgatctgtgtgccgcaggaaattcaggaatactgtacggaactctttggggaagatgtgcagattgcggcggcatcccacgacctgtttgcgaaacaggtcaacgggcagatttaccggccgctggtggagaagtatattgcaggagaaaagcgcctgtaacagtgagacatgactgggaggattggaatatggcaaagtttgagtatatgcagcgggcattttcttctgaactgaagcccagagcgcggcttgtactgcaagtcctggttctgcattgcaacaaagagggtgagtgtttcccctctatcaagaccatagccgccaagtgcggctatggggtgtccactgtaaagcgggcgctggatgagctggtgaaagcgggatatatcgtcaagcaggcccggtttgacgagcgtaagaacggcggccagaccagcaacctctataccttatgctctgacttgccctgccctgacgagccggaaaatgtccctgtgccggaagatgatgcgtctgatgaatccccggcagtgcaaccggaaagtgctcctgcggatacctgtgacgcccctgatcccacacctggggagcagtctgccactttgccgacagcggattcctactcctttgcagatggctttgaaacaaaaatcgggcggcagaattgccgcccgattcgtatgtggactggggggcagtccatttttatacccccttgaaccgtacaggtgaacagatacttacggatgaagaaaaaagtaatagttatttagaaaaattgcaaaaatagacgaccatgggtcgaaacccccgccgtcagtccttggattgcagtcggttaataaagccaattagcataatcagatcttcgtccttgagttttcgcattccgtccatcgctttacggattaactgtggattgaccgcttctgcatcaaaaaactgcaaaggggtaatctcaaagtaatcacaaatttttaagaactgagccattgacggaagagatcgaccagatgaaatcccctgaatatagctccggttctgtcctaaagccaaactcatttgatattccgatgcgccttttttcaaacgcaattcggtgatccgattgcggataaattcttcatccatatcctcacctcgctatataaaaggataacagatgaaatgcctggattataaacatagtatgtgttataataatggatatatgcctatttgcgccgttttatttgcgttatttcatttttgtttgcgtgagatttgaagtggggtgaagtttttgaaaaaaacatacgcttgtgccattactgggcaccgtccaactcgatttaagttcaagtataatgaagggtattcgttgtgcaaaaaaataaaaaaagcaatgctaaaaacattttgtcatttgcatgatgaagaaggtattttccgcttttatgttggaggtacattaggggtagatatgtgggcagccgaacaactcttatatctcaaagaacaaccgggatatcaagatattgagttaattgttgcacttccatttgaagggcatgattcgaaatgggatgcaatgagcaaacagcggttgcagataattattcataatgccacaaaatgtattgttataggacaaagtggaactgcatccgattataaaaagagaaattattatatggtagatcatgcagatttcttgctggcagtctatgataacaatcgtaaactacgatctgggacaggccaaacagtaaattatgctttgaaacaaaatcttcgcataatttttctccatcccgatacagcagaaataagttaatggtttagttagttcataaaaaatagtcttaggattggagggtactgctatgatgcaagagatcatggaccaggaagagcgggttatgcttgaccaaattgccaaacttacagaagaaaatcatgttgaatgggcttgtgacgaatacaatccgattgggtttctcgacaaagacgatgactctgaacaatccgcctgtatctgccaaatgtttcagttttccgctgtcctaaatggttttcattacgaacttgagttagctgaatatatcaatgtacccagcggtaagattgacctatccgttaccctcacaagaaacgatgacgaacatttcctgaaaattgactctatcctgtctgtggagcttgccacttcccaagaaaaagaggcaaaggatatagacagcatcgctgctgttcggttagcaaagcaccttgttcctctggccgttaagacggatgccgttgcagaagccttttcgtgggcgagtttcatcaaccagaccggcatatctaaggcgcttctcaataataatctcacgaaattgggagaaaaactgtgttcggaacatcgggcgctcgacttccactacgctgtgtttgacaacgcttataaagaccgacttcttgccgaactatgagagtgaagcccccctgcaattcacaggggggctttgcgtcactgtgctatgctattcccttgatccagcatcatcgcaacctgataaataaactcttccggtgtcggcctgtcgcccttgaaggtcatcatgtcccagataggctgtgcatcagcatcatgatgatcgaaagcttcatcaatcgctctctgcatctcctgtaaaacattgtctggggtagttccattttcctttgcgatcctttcaagaatttcctgaaaatttctcacgagaaacccctccatctttagaatttatacttgctctttagaacaagtatataattaaaagatagtcgaagatgcgcaaaccttgtcgaatgcaagaaaaaagattggaagagccggtggctcttccaactgctacttttcaactaatgcgcttactgctttgagtattcgcattttctcatcgtgtgggagatcctcgatggcggcagaaagctcagaagcgacgcttttcgtcgcgtgatctactacatcaaccagtaaagaatccgcagatacctcaaggacattagcgattgcaacaaaggtatccagccgtgggatttttgaaccgcgttcgatcacacttacatgagttgggctaatatcaacaagtgctgcgaggtcttcctgtgtcatatttttcttttcccttgcagttttaatccgttgcccgactgccttagcatccatcgtaccacctccttctttagaacatgaattagctctaaagatagtataaattggaggcgttcaatcatacagaagccaaagaccaagcaataattctaaagacctaaaacgcaaaaaagaagagccgcagccgacacccggatagaagaacaagttacaatgctaaagaacgaatctcaagaataaatccaatctgttaacttagatattatgaataagcgggcctttgttcgtctcttcaaccccattttcaaatctgcagacaaagtcgcactgcgccggccagctaaataataattcagatagagtccagcttcacgatacatactccaacatatttgttttcatagtattttttactcgtgtctgaaaaatcacatgcatagaagaattcgtattttcgtgccgctgtccgatcgccaaaaagtcttttcagatctgctgtcaattttccattactgcggtagctggtcgcagcaaagcattcagcaatgatttctccatcagtagactcaatatcatagccgctgacattgccccaattaagaaggaatgatttctcgggataatgggataacaaatactcagtagcggcgagcgtcacaaaataagtctgactttgattgataacctcaactaagttctcgggttttccagataaaggctcggtggcaatcttgtcaaatttgaaatgtttgaagatttcttgagcatcctcactgtcaatcatcgccttaatatcctgcacgctttttctgaggtttgacaggatcgtggttttgtatctgctaagctcttctgcactgctaatcgttaccgtgtttgccatagatttctccttcattgcagcgatgcaaatatttcaccctcgatgtccagtatgtcatccatcggcagctttgttccgtcctgcatcacaatcaaccgttcaaagtcatctatcttttttaccataccagtcacttcgacatatgctccaccagctttgcgtttatccggcttaaagtaagtaaaggtgacttccggtttatcattcatgctatcaacaagaatatggaacttcgtgttcagggtgctcagagcctcttcgtccatttcaacctttcccactgttagacgcccggtttctttgatagcggcatcatagccggtaagcgctgcaaagggtgagaattgggcggctcgatcctgcatggacatctgcggtctgattttggatacatggtgtggtagatggattatatcatcgtactgctttttcataatctttgtcctttgtgttccgctaaaaagaaacagcaattcccttatgatcagagagaagtttatcctcattccattcttcaatcgtcagctttacgaaggaagcaaaacggcgggagatggcaatatggtcaatgcactcggcctgttcacccgtcaaaagggacagttcgacctcctgaaataaattctgcaaatcgtttcttccggctcgcgtgaagtagtagttatcgaagaaggaacagttaaaatcaccgcacacgcagataccgtcacctttcttactcaaacggcgtatgtcatcactctggtgatgaagttcctccatgaaggaagggtgacggttgcccagtattcctatgattgttccatataccagcagatttccagcttccgtttttagctcagcgcaaagggcagtatgcggatcataggtctgatgcagctgaacaacgggatagttggtgtagagcgaaacacgattttctgtaacggcataagggatggccttatcttctatcaaagaagtggtctcatggcagaaggtatacttggggtgcagccgcttgtcggtctcggtcagtaccaggatgtcagccttaatgctattgcacaaaccctgaatctggtcaagctgctttttgtgcttgagtcgctccacattccatgtggcgattttcatgccttgtgacctccaatctgctggttccgatctttggctgttgcaccttcttccaagttcatcccccggagaatcgcattcttaccaaactttttcttgatgttcagcatggccgtctgcattttctgctcgcgttctaattcctgctgctcctgttcctgctgcgcctcctgagcggcatagtcagcgaaaaggtcaagttgttcaaatccgccgttcttttttggtacggactctttcgggaggacatggtttgccacaacattcagtcttcggatgagaagactttggtctacgatgcggtcaaacagctccgctgcgccggatatgatctttttggtggaggccgtgtatccatccagattgattgtgccgtgggcgtgtttgggaatctgcctcccgtaatgatccttcacaatcgcgccgtgatactttgcttttcttgcagggtcggtgagattttcaatgtcatagcccaccgtcaccacaagctgatcggtgacaagccctttgtccaccaaatccagagaaagcatatctgccatctctcgcaggacgagccgcgccttttctgcatcgtaggggcagtgaagcacctgtcccgatcccaagctgttagaggtcggcttgtatgccttaattgcctcgatggtagttggctcccagccccacgcatggtcgatcagtaattctgcattctttccgaagagatgatacagcaaatcctcattgcgctcggagcatcgtgcaacatcgcccatcgtgaacatcccgtgctcttccagcttctttgcgtagccacggcctactcgccagaagtcggtgaggggctggtgtgaccacatggtctgccggtaggtcatttcgtccagctgggcgatgcgtaccccatttttatccgccggaatatgctttgccacaatatccatcgccaccttgcagagatagaggtttgtcccgatccccgccgtggccgtgatgccggtggttgcgatgacatccagaatcatcttcatggcgaggtcatgggcagacagcttgtaggtagaaaggtaatcggtcacatccataaatacttcgtcgatggaatataccacgatgtcctccggggcgatatatttcaggtagacctcgtaaatcttcgtgctgtattccatgtagtaggccatccggggcggagcgatgatgaagtcgatctccagattcgggttttcttgcagctcagagaagaagcaggatttgccttccagcactctgcccggagcatcatgccgccgtccggcgttggcttccttgactcgctgcctgacctcaaagagccgccctcggcctgaaatgccgtagcttttgatacttggagtgacggcaaggcagatggtcttgtcagtgcggctttcgtctgctacaacgaggttggtgtccatcgggtcaaggccgcgctcccggcattccaccgaagcatagaaactcttgagatcgattgcaatgtaggtgcggtctttcatgcttcggtgagcctcctttcagtccttcaaatgagaagttctcactccgatatatgtttaatcttctgtaaattcccgctacatagcgcatccatgtttctgaatattttatctgcgtcccaatcccaccatttgaggtttagcagatatgcggtcaaatcatcatcaaaccgcttgcgaatcagtttgcacgggtttccgccagcaatgctatatggcggaatgtcttttgtgacaacagagttagctgctatgatcgaaccgtccccaatatgaacacccggcatgacagtcacattctgtccgatccaaacatcatttcccacaacggtgtcgccctttaacggcagatcttcaaggctgggagtaaactgctcccagccactgcccatgatgttaaatgggtaggtcgttacgctgttcattctgtgattggcgccattcatgacgaattcaataccctttgctatcgcacaaaactttccaataatcaatttatctccaagaaattcataatggtgcgtgacgtgatcttcaaatttttccgcaccatttatatcgtcgtaataactgtattcacccacgataatattcggcctggtaattacattcttaatatataccacttgcttgattgcttcgttcgggtatacagcgttgggattcggtcccatatgattccccctccaaattcagatttttgttttaatgatacaccgggcaagctttagtcaagggcaaacagcgccgcatggatctcaaaccgttgtagttaccacggctaataaaggactcaacaaggatgtcgaatttattgctaagcgaccgtacgacgccttgatgactatactttattcaaattggatatcgttctcattgcaccatcgttcggcaagctcccggtaggcgtttgcctgatagtcgtaccacaactgttccacgccttgaaagcggatcgtttgcttgaaacgccggaacgcacccttgccgcgtattgccccagccagctcgcttttgatcctgcccgctgggaggtcgtccacaaaggagtccatgatgctgtattcgtggatttcatattttgtcgggaatcggagaaaccgctccggttccttctcgatcagttcggcaagatcctcatctgtctcaccggtaatccatacatcaggcagataaaccgtttcgttggttttcgtatcatagagcatcgtgtaggcatcgctggcctgttcgattgcgtctatgaccgtttgcagcttgatcttcatgcgcatcaccgtccgcagcactttttgtatttcttcccgcttccgcaggggcagggatcgttccggccaacctttttcggttttgttccgttctgaatttctgcgatttctttcaggaaattcatccgcagctcttcgctgggcatctccattgccagaatcccttgccgaagctcgtctggattcatggttccgtccgcaatggcctgacggatgttcgggccaaaggaaatagacttgggaatgcgttcttccgggggatacattgcggtcaattcgtcgggcgtatgaccacggttatattgcatccgcacatggttgtgaaacggcgtatacacctctgcaaaatcgcctatatccactttgcggcgaaacttcacaccgatctcatccaaccggttcatcacatcctcaaatccggcgttcatgcaatggagaccataatagatgtcgatgaacaccgcttccagcttgtcctccggcacagtggttttagtcaggaggaagtttcggaatgcctctgcttccggggtattctcccagtggaagggattgtcgtaagcaaggaactccttcttgtccggcacatagtagggctttccctgatggcctcgtaagatctcatgatatggttcaaggtcctcgccgattagctgcacatctatgacctcgtactccatcaactcggtttcaggaccgtcgtaatagagttcagatttaccgaggatgtagtagtcctcgcactcatgccttgcgatttcggcaaaggcaagaaattctttcttcgtcaccagcgatttgttctgcgatgtgatgatcccatagagcttgctgagcgggataatgccgtacagattggcggcggcattcaaatactttcgcagaagccgcgaggcggtatccttcaacgggatctcccgatagagcgcatttaattttctgcgcccgtattcctctgggatcgggatataatacggttcctctctgctcattccgcttcctccacaatgccaaaatcaatcagaatatttttatctccgtaggtgggatagacgatgccggtcatctcatacgcatatcgcttgaccttccggaaatcctttgtccgctccggggaaaatgctgcggtttcatacttttcgtattccggcagaccggcaaggtcatccgcagccgccttgatcagtgcatctgtaacatcatagatatctttcccgtactctacggccaacagctcgtgtttctttacatcctgatccagattcccgaaggaacgatacagcaagtatttcatcgtaattttttctccttttccatgatgtcatcttgttcgatgcttcgattctctcaggagcctttgcgctgatccatcctacaaatttatcacagttcatttcaagaaactgcttcggtgctcctgttcgcggaatcggtgtccctgcatattcagctccgaaaccttgagcgccaccaagtttatatctgaacacatgatgcgcgcaatctggccgacatcatagccgccgtatatgtattccagaatctcatcgtcaggaagagcgatctgtgcggcaaacatatttgcctcgtattccatccgctgattccgcatgtcaaaaatattgaattcctgcaagccgccaacctggatcgcctctccgcggtggagacagtcatgcccgatctcatggagcagaacaatatcgtgcatcactgggtcgaggtgtttgttgatgaaaatataacggttgcgttcaataaccatgtacgcgcctttttgtcgggagaaatcacgaggcataacgatcagccccaactcccgtgcaattcggtcggcatttcttgtgccgcattgacgcaaaacacgattggctttttgaatggcctcctcagctcgaatcagcatagcggtatcacccctttcgggcagaatggtataatttcacattttcagtataacggatgcgaagtccaatataagggacttagttctcttcattctgctttcgatactttttcggggtgtactttttgttgcgctttttcgcatcaatgtaggcttcctgaatcgcgagcatcagctcatccatgtcttcttcggccatctcaccgccagaaaaggcgccccgtatctctttcaacagtcgctcggcgcccttcttaccacgatagccatattcctgccccgccatcgcaatgaagtcatcgccctcgttgtgcagatagtctgcatcacacccgagaatctgggcgagaacgctatacacctcacggttctgggggtatgtggtgcctttttcatagttggtgatcgtcctgagacctactcccgccagctttgcaagttccgcctgagtaagccccttttccttgcgcattgcgcagagcttttctccgaacctcatagcatatcctcctgcctgtaaatatgttaatatgcaattcgtttgcgctatatgcacaaaaccgcttgacacaagcaaacagttttcgtataatgagattacgcaatcgctttacgcatttattgtatatcggtttgcgtgtcccgtcaaggggcgtggccttcatttgttctggaacttccaagagatgccaggcaatgaaagctttgtctgtgttttccgtgatagcaagcaaggagtgaggaaaatgagtgtaccgtgcaggaaagcttatgtctcagtcaatctggatgtagatcaggagggtgtgttctatccccgcttcatccgatgggaaaacggcttgatttttcagatcgaccaaatcttgtataagtgccgcgccgcttctaaaaaggtggggggcggcggtatccgttacacggtgcagatccgtggcagagagtcctatctgtttcaggagggcagcaagtggtttgttgaagcaaaggagatctgacgatgattttgtcccagaagaacatcgaagaaattgccgcagccgtgaccaaggatttcaacgtgctctacttcggctgcgactccgaagaatcccggcgtatggcacggggaaccccgattgaccagttcgccagggaatatcttggaatggctgtgtcgtttgcccgactttcctcagacggaagcatatgcggcctgaccgcctatgcggacaccgagtacatcacagaagaaatgggcgtaaaacgagcaatcccgctcaggaaaaatcagattctgttggatgtgagctttattcagcccggacaagtccataaactctgcggcaagaggcgctttactctcgcccatgaatgcgcccatcagattttattccagatggaaagcgacgctgtgcggtcggcctgtaccaagaaatactcggcgtggacagcgtattcgctccgggacttgaagacccgcgaggactggaatgaatggcaggcaaatgtccttggggcggcaattctgatgccgcaaaaagagatcgatctggccatgtggtactttgccgccggcaggaaattcatcaactacgagggggtgtttgcataccgcgacaaggtatccttgatgatgttgtgcaagcagctcgccgtatccaagtcggctgcggtgatccggttacggcagctcggctatatcgaggatcgtccgtaccgggaatatattgatccgttggaggtgtggccgtgaaaaagaatatccgcatctcagaaccgtctgaggaaatgatggaaaaaatccgaaaagcgcgccatgccattgcaaaccagaaaacaaggatggtgaaatgccccttctgtgggcacaattcaatcgccgtatttgaagacaccagaggtcatgttcaggccaagtgcaagctgtgtggccgcgaaacggtctttgatgttctgagtatgagacggtttttcctccacctcaaccggaggtagagatcaacaaataaatattttgatagctgtgctgtggagccgctgattggtgagtcttcctaatgccgcatgatcagatgtttccgaaatggaaacacctgatttatcggtatgggacgacaagctcaccgtcatgcggctcttttttagtctcgtccttccgctgctctccgccagcggaaaggacgagctatgaaaatcccgaaaaccccgaaagaatttgactacgatctctggactacggaggacggaaagtgcatggtgcggatcaaggccaccggagaagcggtagaggttgatcgcacggtgatgcaagtgcttcgttcggaggaaaagcggctccggcgggccttatcctcagagagtgagccgtgtggaacgggaaagactgcgcctacacacctctctctggatgcacttccagaagatgtggcggattcctgctggttggcagacgcccgtgactacacggaggagatcaccacgaaacttctggagaggaaactgcgggaaagtctgacctccacccaatatggcatttatcaggcatgcatcctgaatggggtcagctacaaggcatatgcggatcaaatgggggtcagttaccagagtgtccagaatgcgattcgcctcattcagaaaaaagcaaaaaatattttcgggtgatagttgtggttctcctggaaaatgtccgttgtaaagtgaaggggtcctttgggcaccttcgttgaaccttttcaaccgaatatccggcagctaaataacatcagcggttgagcgagcgatacggacggtgcgcgatgaccacctgtaggagaggaaagggcgaaagccttcttccgcttctatcaatgacggccaataaggtgcccagcgggtccaccgatccaaaagcaggcgtggcagcctgtttcgccaagacctcatccgcctacaatggtacccctgcccagccacagtctcaagcaatgggggcagctcggagagatcctcggaggggttcgattcccggagtgcggcgcccgccgcagtttagctgaccgccctggcctggggaagtagtgtcgaatacaggcaaggctaagacaaaaaagtcttgatatcagaagcaatgggggtcacccatcatgtagcaggaaagccaaggcttcctcaaccaaatcgggtgacccctatttttgtggtatcaattcatattcatatttaggagggatcacatcatgattgctgtgtcgcaaaccaagagtgcaaactacctgtttattgtggccgtgctgaagtcgatgcgggaaggtggcgtgatcactcaggccgagtatgagcgagccaagcgctactaccagaagctcaccggctccgatctcgtcatcgcagattaaatgttcagaaggaaccgtctaaattgatgtattttgggcatcaggtcttgtcgcttgtgtagaaatttacttctctgcgttctttcaatagactttgccttgccgttgactataatgttgcttgaaccggaaaagtggatggtaccaaaatgtagtacaatccaaaattcagccagaaaggagggctgttgatgccgcaggtcaaactcatctcgcccatcaccaggcaggaaatccgcaaaatccgagttgccgcctattgccgggtatcttccaattcagcggatcagcagaactcctacgccaaccagattcgggtatataccagcctcattcagagaaaaaaagagtgggagctggtggagatattcgctgacgaagggctctctggcatgaacgcacagaaccgcaccgaattccagcgaatgatcaagatgtgcgaacagcaccaaatcgacctgatcgtcaccaaatccgtctcccgcttcgcccgaaacgccaaggagtctctggaatatgtccggaagctgaaattgctcggcgtgggggtgcagtttgagaaagagggaatctacaccctggccctcggagatgagatgctgctcaataccttctctgccatcgcacaggaggagtctaaggcaatttcccagaaccagcggctttccattgtgaagcggatgcagtctggggaatatgtggacagcaacgctccttatggcttccggctggtggataaagcgctggtggtctatgagccggaggccgccatcgtccgcatgatgttcgaaaactacctgagcggccattctacatcggagatcgcccgggatctcaacagccgcggcatcaaaaccaaaaccgggaaatccacctggcgctccaccaaggtggcatacatccttggaaatgagcggtattgcggcgattgcaaatatcagaaaacctaccgcgacaccacagttcccttcaaacagttccgaaatcgaggtcaggaggatatgttctacgcctccatgacccacgctcctcttattgaccgagatacctttgacaaggtccagctcctcttgaaaaagcgtcaggatgtctttggaaaatctacaacgcaaaatatctaccctcttacgagccgcattcagtgttctgagtgcggctcgtattttcgcaggaggcagatttccggggcagtaaagtggggatgctccaaacacattcaggatcgtacccagtgcagctcaaactactacagcgaggagagaatctacgatgccttcgtcgccatggtcaataagcttcggttctctgaatacgacatcatggggcagacgctactccgtctggaatccgccgagctgaagctaaagcagaaaaacacggccgcaagggagctcagccggaacattgcagatctgaacgccaagttggtgatggtggagcagctccatgcaaagggatacctcaaggacgaggtccacaaggcccaggtgcaggagatcaacgaccaactgcgccggctgaagcgggagcgccaatgtgaattctcctcgggcattacccaaatgatagaggaactgacgcggctgaaaaagctgctggaagagctcgaggaaccactggaccgcttcgatgagaagctgtttactgagatcgttcagaccatcagtatcagccgccgggatgaaatgacagtcaccctcatcggcgggctgagattcacagaaatgctctgacagagaggaacctcgccatgaagaagatacgctatatcccatacggttacaccatgagaaatggaaggacagtcatcgcacaggatgaagctgcggtcatccgcgagatattcagcgcctacatcaacggcgcatccctccaaagtattgccgagctgctgactgagaggaagatcccctacagtgagagaacggatgtgtgggataaagctcgtatcgcacgaatcatcggaaacgccaaatacattggcgatggggaatatgacccgatcattgaggaagaacagtatgaggaggcggctgccgtgaaaacagcccgccagcggaacaccttcgagaaaaatctggaggggatcgacctgcttcgggatctggtccgatgtgcggagtgcggcgcccctatgcggcgaagggtgagcagcaagcaccggattcgggagagttgggattgcaccaatcctgattgcggtcagcgcatccggatctccgatacacacctgttggaaaaggtgacaatcctgatgaaccgcatcatcgccaatagctatctgctcatcccccgccccaaaaagcgaaaagagctgtcggcggaagcccagcgaatcaaccgggaaattgatgccgagctggagcgggatgaccccagcgatgcactgattatcgtcaaaacaattgaaatggcagagcggctctatgctgagagcgatacccatctgcagatcgccgcatccatcgcccgaaagcgggtaagtctgatgactccccaggaggaattcagcccggcctactttagtgacatcgccgcctacctgacgcttggcagcggaggaaaggtgatcctacataccaaaaccgatgtcgagatcggagatgaagaaaatgaatgtaaccaagatacccaagaaaacaatatcggttattgagccaaaacgctctctgatcgtcaacagggagcagtatcatcagcggcgggttgctgcctactgccgggtatccaccgacagcgaggagcagctcacatcctataccaaccagaaaaaggtatataccgagatgattgccgctaagcccgaatgggagttcgccggactctacgcagatgagggcatctccgggacacgtgcagataagcgcccccagttccagaagatgatcaacgactgcttgtctgggaaaatcgactatatcatcacgaaatccgtttcccgcttcgcccgtaatacagtggactgcctggaccatgtccgaatgctcagggcaagagggattggcatctacttcgaggagcaaaatatagacacactgcaaatcgacagcgaactctatctggtcatctacgcagggttcgcacagtctgaatccgaaagcatcagcaagaatgtcacctggacttttcgtaagcgatttcaggagggcaagcccatattcaactataagtgccttctgggataccgcaagggtgcagacggagaaccggagatcgtcccggaggaggcatccatcgtggagaggatctttaatatgtacctgtcaggtgaaaccatcaaccggatctcaaccaaactcagagaagaaaatctccagataccaggaaaacgattctccttctctgcgagcatgattaagggtattctccggaatgaacgatactgcggggacagcatccttcaaaagacggtcacaattgactgtattggcaaggttcgccgcaaaaacaccggtgaggcacccatgtactatgtacagaatagccatgttggtatcatcagccgagagctctttcacaaaacgcaggaagaactcgccaggcggatgagccgggagccaaattccaccaaaacggctaccacagccaccggaaaatactcccggtacgcactatccaatgtgatgatctgcgccgaatgcggaagtcgatataagcgcgtgacctggacatcccgaggaaaaaagcgagttgtctggcgctgcatcagccgcttagactatggaaagcgctactgcaaaacctcgctcacggtagatgagaccgccctccacgccgctattgttcgggcaatcaaccgattcaacgaggaagacgagtccacttatatggcactcatgcgggcaaccattggtgaagcaatcggtctaaccggaggcacagatgagatcgacctgctccggcgaaaaatagatgggctgaatcggaaaatggtatctcttatcaatgagagcgtggaaagcggagagggtatcgagagtcacgaagctgaattcaaagaactttccgataccattgaactcctgcaaggacggattcagaaactcgaagaagcacttgcttccgatcaggtgaatgacagccgaatccttcaactacagcagatcatcgccgaccgagcatccaaaaagatggagtacgacgataccatcgtccaccaaatgattgagtgtgtgaaggtgtatcccgacgggagactggacattatcttcggaggagggtaccttatcgaagaacacctggaaaaagaaaatttataacttcaaatataattgacataatcgctgaaataatataatataatttatgttaggaggcgattgtgcatggcaaaaaaagctgcggtcatcatgccgcaaacacgggagatcctggcacagatgggtgagcagatccgcctggcccgcctgcgcaggaagttgagcctggaattggtagcagagcgtgccgggatcagccgagccactcttatatccattgagaaaggcacccctacggtatccatcggctcctatgccgctgtgctgcacgcattaaacaatatggacagcgacctgctgcttattgcaaaagatgatgaattcggcaggaagctgcaagatctggcgctgcccaccagacggcgggcgcccaagaaaggagagtagcccatggcgcaggacgaaaagaccatctatgtatatgaaaattggcgtggagaggcacccactctgctggggcggctgcgctgcggcttcgtccgcggacaggagaccttttcctttgagtatgatccggcctggctgtcatccgccgagagttccttctctctggacccggatctggctctctaccgcgggcggcagtatgtgccgctgaacaagcagctctttggcctgttttccgactcctgtccggatcgctgggggcgtctgctgatgaagcgcaaggaggccatcgacgctcgcaaagaggaccgcaagccccgtaagctcaccgagagcgacttcctgttgggggtctacgatgaatcccgtatgggtgcgctgcggttcagcttggaagaagggggcgaatttctttcgaacgataaagcgtttgcgacgcctccatgggtaaaccttcggacgctggaaaacgcctctatcgctttcgagaatgatgagagcggcctgaatgaaaaatggctgcgtgagcttctggcccccggctcctccttgggaggcgcaagacccaaagctacggtgcaggccacagatggcgccttgtggattgccaagttcccttccaagcatgatgaatataacagcggcgcgtgggagaaggtcgtccatgacctggcacggctctgcggactggatgttccggaatccaaattggagacgttctccaagaccggcagtacctttctcgtcaagcgatttgaccgaaacggcagccgccgcatccacttcgcctccgccatgaccctgctgggcaagaccgatggagcctctgcagcggacggaagcagctatctggatctggcggcgttcatccgggccaacggggcatcaccccggcaggatctggtcgagctgtggaagcggatcgtgttcagcatggcggtatccaatactgacgaccacctgcgcaaccatggtttccttctgacacccaccggctggcggctggcccctctctatgatgtgaacccagtcccctcgggggaccggctttccctcaatgtgagtgagtatgataacaccattgacttggaactggctctggaagtagccgattatttcggcctggcccctcaggaagcggaacaggctgcagaggaggtctgcaaaacagtatccggacactgggaacagttggccgggcagtatggtctcagccgaggagcgatagagtatatgcgccctgccttttcccttccatgataagatcacaaacggacgattcctggtggaaccgtccgtttgcttattctttggcgactccctcaaaagagtcctcgccctcatcctcgtccatatccgtatcaatgtccagtccttcattgttccccacattcttctcgtagagcttggtccatttgagcggatatttgcatttgcggttataggccagaagcatcgcctcagcatagcccatagaaccggggcgtcgttccttggctgttctcgaaagcagcttgaccgacatttcccccactttttccttaaaggtctcatctttcagggcatcgccgaacgtgtagaccaatctggcgattccgttgagcatattggcagacagcgaattcatatcgccctcccaggtgcctacgcagagtctgagtgttcgatcaagtacatggtaaccgaaccgctcatatatattttcaagcgtggagacagcacagacaacgccatagtttctgacctggccaatggaaagagaataagactctaccagatctttgatcataagctgttcctgattcccggcttccacatttgccataaacacttcatagggacggagcggtttgacaaacttcatctggttggcgaagatatctgcctcgtgctcgtagttcagatcatcgtatatcatgcaccagactggcgtttcacgagagccagaggccagggcgacgatctccaccgtgtgctggccattgaagacatagttgaccccatttcgacggcttaccttcacggggttgatctgatacagatcaaagtgtgccgcagcattcagcacatgctgttcggaaatattcctctggtactcctgattggatacgaggttcttgatgggaatctgttcgaagtgaacattgggaacaaacatactataatcttccattaggattccacctcaattgcattgagcatttcctggatttttccttctaattcagtcaacgccgccaagaggttttgtcttgcagcaggtgagatcgcttccaaatgtgccatggactttgtccggtcgatggagctcatccaggaggggatcgtaagagtaagtccagcaacttccgcatccgggtcataggcgggcatcgtcttgattgccggctgttctgccgccgctgtaccgggcttggcagaagcgtcggaataaaggcatcgtctcgattcactgtaacgagcaaacgcatagggattttttccgatttttttactaagtactttcaattcttcgggttccatttctgatagagcaacgatattttcgaaagaaatcttatatgccccggaaagaatgtgcggaacaagctcaggagcattttgttcaatggtatctaatgctgcactgtatttcgcatatttctgtacggttgcgccggacacatgatacttccttcccagccgggctgctgttcgccggccactctcttcatctattgggcggcctctccccacagtaatgttggggttcggacggtactgattatagccattcctatttcgctgtactttcttttccgcttcatattgtttcccaatcagatatttcctggtttcttctgagatgttgcggcgcccaagttggttcgcacagatccaggcgatggcagcatctctgcttggaaaatccagctccttgactccataaggaatgcgcattttattgcatatttcatagcgattatgaccgtcgacgatggtatcattccatgcgatgatatcttcccggcatccttccatgaccagattcagctccagttgccggtattcctcccggcgaagtggacgaatcaagtttttgaattccggatcgatgttaagctgcctaaatgctttctctgtcatgtagcctcctgcgttccagctgtttgacggttttgagggaaaaatatgcgacccggttgacttgatcgatctcaccggtcagctggtaattaaatctcaggtcaaagccacccagcagttcggaaaagtttttaataaggatcgtactatagaattctatagactgctgggatgtgtttgacatccgaaccttgtttgcggtcccgcctgaaataggtttgtccgatccgagaacggcgatatacagttcttcagggtttaccaggaattgcacatacgcaggattcttcaagagacgaatcgtttgcctgtggattcgaatccggtttcgcgcagggtccagcgttaagtaagcctgcaattgattttcatgattcatgtccttgtcctcccaaaacggacttactaccagtatcagaggcagcctcgtctgactgctctgatgcagcaggagctatgttatcgcgcaacccatatacagcatatccttcaaaaatgtctacctgcatagatttctggtgttcccggaacgggagtccaaactgcgtcttccagccctccggaaacacgggagttcgagaagacttgggcttctggccgtctttttgcacccgctgatacacttcggtcgctgtgagatcaaatgcgatgagccactcatccttggcatggattatccgcccgaggagtttatatcgatagtccagattccagtccatcagtgaaaacactttggcgaaaaaaatcttgcaggtaatctgtttcggtttacgtctgccggagccgttggtgcaccaggcgcaggcatcccgatcttccgcccgacagggacggatcgccaagatcctgctctcctgattgaccaatacctgcacataatcaacttgtgggaagcggttcaggcaggcggtatttacataaaatttgtaattgttgaaagttacagacggctcattaatatgggcgaagaactcacggcgtaccacttggtagccatcgtagttaaagtcaccggccatctccaggacctcatcactactgctgtttgcgggagaagctgccagttccgctttttttaattcagcagacggaacaatatccaaatgcccgtcctccagggaacgaagcattccggcgattacaccgccggtattttcccgactttcttcgaacatttaggattcctccttcccgtgctgaccgagttcctgacagatatagtcacgcagcacgtcaaatcctgtcacgcggagtttctgcccggtttcatacaactggccctccatgcggattttccagtcttcctcactctgatcgcagacgggcgggaaagactgttggtggaggtaatattgcttgccaaaagagccgatccactcctccgggactgcccgcacccgtttgccggagacagaaaggggctgtacaggctcctttgcctgttccgtgctttttgaaccggaaagcaggtacgatttaataaacgcttccgcatcattgacatcaaaaatatacgcagattcagtttcagtttgaaacagcgctccggcgatccggtattttaaatccggactccagccgaataactgaaaaagcgtttctacataggccgcaccggcgatatccctgggctgatactttccgtctgacagcttggaaaacacgactgcgttgcggctgcttttcgccgctgtgcggacggcgaacttcatctccacagggttgaccagcagctccacatggttgtctttcccaaaagaccgaacacatgtggtgctgaacttgattctcttatcttgaaacagtacatagggacggtgataattatcaaagaattcactgcgggcgatttcaaagcctctcatatcaaaatctcccggaaccaatgtgatgctcgagggcagggatgcatccgcctgctgctcatcgggcggatggatactggcggatgcttggtaataatccgccggcttaaatccagcccagcggggattgatggtcacgaaccctctgagcaggccgctgtcgatcacccgcagctccgggaggatggagcggttgccatacttggagttgttcagaagatgctgaaccgcaatgaaatcatctctggaaacaatgccctcgtggtggttccggtaaaggctctggggtctgtccccccgattctttctggccttgtggttcagatagttgggggtgaaggtcttccgggtcagtacatccccgcaatgccgctcattgcgaaggacctggacaatggagttggatgtccacttgacatttcccagataagtctttcggcccagctcggtgagcgccgccgcaatgtcggaggtggaatatccatacagatacatatagaagatgagttttaccgtgggggcttcatccgggttgacgaccaggtttccatctgcgtcgtgagaataccccagcagtttgggcgtcaatggcagacctccgtccagccgcatccgcaaggaggtttccatgctccggctgcggatgtgagactcctcctgagccatggtggcctgaaacgaaagcgccatctgggaatcgtctttgagggagaagatacattcgctctcgaagaacactccgacgggactgggcagctccgcaagcattcgcaccatgctgatacagtccaccacatttcgggcaaagcgagacacgcttttggtaatgatcatatcgattttcccgctgcggcaatcggcgatcatgctgttgaactcgtcccgatgagccagagaagttccgctaatcccctcatccgcatagattttgaccaatgtccagttgggatgatgcacaacaaaatcttcatagtatttcttttgcagctcataggaggaagtctgctggacattgtctgtggagacacgggcatacacggcgacccgctgccttatatcattatcgtaatagtcgatgggctttttagccggaatgaattcatagttctccgggtcaacttttgtgttgatacgccggcggacccgttctttccgttccgcaagctgtttgcgtgtggacttgtcaatcatgcagcatttccctccggggtttgtcatcagggagtatcttccaaccgggatctggcaaaaagtaggggtcgtgtagatcctcctggtaataggaagccagcgtataaatatcctccgaaacgaagtaaacgcccactggctttgggagtgctgccaagaggcgcgtacagaaagagagctcggagagcttcttcgagatattgcttgctttctgggtaatgatcagattgaccttttcctcgtagcagtcttgaaggagccttgaccactccggagcgttctccatattgggcgcagtgctgccctcgtccacatagaaaccgacaaacttccagtttgggcagagagccagtgtatcaagaaattgctttttatgagctgagagatagtcctcatagcgggtctggttgaagtagcggatgtataccgccacacggtaatgtgttttgggaagcgggcgttcccgcttgatttcctttaaccaggcacgatgttccgctaaaagggtgtttcgttccgtctccctttccagcaggaaatcaaatgagggcataacttcctgctctgactctctattttgaacggccagatctgacatatttgctccccctgtgttatttctcttccaggccattatataatctgcagactaataacaaaatcgaccaaaagtcaacaccttgacttctggtcgatagatgagaaaaaaagaagcgagccggcaattccagctcgcaatttttcaggtattgtcatcccgtctggccatagtggatttcaactcacgaacaatcttcaggatggaatccagctccttgggagagcagtcggccagcagctcgtcaaactcgctctggtataggcttctcacctccggcacatcgggccgaagaagggaatcagcagacacttgcagggcttcgatgattcggataaaggtttccaacttcatgctcgtcttgcctttttcgatattgctgacatggggcagcgagatattggcctttgcagcaagatcggcctggctcatccggcgattgatccgcgcatctcgaatacgggagccgaccaactggctctcggtcaaatcatgttccgtcatcggcttcccccctcaaatatattctccagattatctatttctaagagtatatcaacttggggtgaaattgatataaggtcgagttgatgatataatctaaacgctataataagactgcaaaattttttggaggtcttattatgagcctgaactacaaagtcattggaaaacacatccgtgaagtccgtcagcgcaaccacctttcgcaagcgatgctctctgaactggtggataaaacgccatcttacatcagctacatagagagcgggatcaagagcatgagccttgacacctttgtgcttatcgccaatgctttgggcgtatctcccgaccggcttttgatggagcaaatcatcagcactgaacggtgcgccagcgaagaaatcgccctgctcctttcggattgcagtacctatgagatgatgattctcctggatgttataaaatcgctgaaagcctccttgaaagagcatcaaggcagatacggtaaaccagataactttgattttaccgtctgaacctgagaaagcaatcaaccggaagtcacgagcattgactgccggtcgatctatgccagtaaaggtggatatatttttggaacagtggatatgtttttggaaagtcccggatatgggtcttccgagttggtataatgagaaaagaaaggtggaatgaccaatgatctattacacgggtgatatccacggagacccctatgaggtcatacagttttgcgacagcaagaagctgacagagcaggatactctggttctgcttggagatgtaggagcgaactactaccgaaaccggcgagacacagagatgaagagagttcttgccgccgtaaagccgacgatgctctgcatccacggcaaccatgagatccggccggccagcatcccttcctatcgcacgaagcagtggaacggcgggacagtctgggtagaggaagcctttccccgcctgctgtttgctatggatggtgagatctttgatctggaaggtctccgacacttggtcatcggcggagcttacagcgtggacaaattctaccggctggccagaggttacggctggtggccggatgagcagccttcccaggagatcaaggacaaggttatccagacgctggacgcctgcgggtggcaggtagataccgtcctctcccacacctgtccctatccgtatgagcctcgcgaggcctttcttccgatgatcgaccagagtaccgtggacgactctaccgagaaatggctggaggagatcgagcggaaactcaaatacgaccactggttctgtggacactggcatattgacaagcatatcgaccggatgcacttcctcttccacagcgtggaggctgcgccgcagctcttgacgggaggggacacattatgacagaggaagaaagaccggaggccaaggagcaggaggcgtgctttgccgcaatccgtgagatcgtccaggagattttccgcctaatggacgccgcatatcagcaatacagccgtttggtagagcaggtgttgaacggcaggatcactgaggagcgggagatcgagcgaatcatggacgggcttgtggacttcggagatgatccgaggctccttgaactgtacaaaaccctctgccgccatgtctattacaaataccccgatcttgtgggagagcacactgccctcttccggctccagtttgaggaaacggaggatggggatacggatactgaggaggtggaaacatgaaagcgccggagatcaagcactacatcaactggctgggtcgggtggaataccgaaacatcaactgctccttcacctatgacgagacatcctatgcggccatcgaccggatcttccgccttctccaccggctggagccaggcccggagaacacaagctgggaactatggctccgtgcggagcgaggtaccattgaagacttcggcagctttgagaagctgcgggcggacggccaggtggagagctttgaggagtttgaaacctggtggcattccgagttcccggaggaggcagcgtggttccactttgccgccggcgaggatcaggagatcggataccgggcggtattcctgggccatcgccatgtgctggaggtggacagccgcaaagagcgcgccttcccctatgacatcgccccattcaccgcctggctggagggtgcggtacgagacgccgttcagatggtggagaccggctcttatcaggaactggtggagcgggagctgcccatctggcatcgaaccggaactgtcctgcgccgggatctgtggagcgtattccctcagtggaaggaggagttcttccagaacatctcccagcaggaggtggaggagtttctcacctcggcggaggggtatcctttgggaaataacaagcggctcccatccgtgactgcaaacgaattctatcacttctgtgcccttggctatcgggctatgggatacaccggaacggagaaatcggaaaaagagcagtatgccctccacgccgatgggcgggatgagggactgtccgagctggacggagattcccccgaagcctttgcccggtggttgaaggagcgtccccgcaccggccacccttgggaggtatgccggggcggcaacagcacccacatcgactgcttcgtacagcaggatgagcatggctactatctggtagtggccggtcttgcagagacccggacgattgagacgatccacttcttcctggcgcttcatcgggcaggcgttcccgtatgtatccgaaacgcagaggaactgaaggcccgcctgaccggagcagagtccatcggcatcgtgccggagggagtctttcccgcctactgtcacgaccggtttccgggagaaagcatcgtcgacttcatgaatctgccttgggagcaccgggaagagcttgtaaaatactgccgatggcagccggtcccggttccccggctgaagaaggaagatgaaagcccatgattttctttacctccgacctgcatctcggccacgaaaactgcatccgcctttgcaaccgccccttttccagtatcgaggagatggacgaaaccctcatcgaaaactggaaccgcaagatcacaggaaaggataccgtctatatcctcggcgaccttatctaccgcaaccaaaagccgccggaggaatacctgcggcggctgcggggaaagaaacatctcctccttggcaatcatgacaggggatggatcaggagttgtcagacggaacagttctttgaaagcgtcaataacctgctgtatgtcgcagacgggaagcggcagtacaccctctgccactaccccatgatgtcctggccacacatcatgcgctgctacatggtctttggccacatccacggcaataccgatgcggattactggccgctcatccaggcaaacgagaggatgctgaatgccggagtggatgtcaatcacttcgagccagtcacctttgaggagatggaggccaacaatcttctgtataaaggtcaggcgaaacccgagcttgaggtgcagccgtgagacctcaaaagggcttttatgaggcggctcctgtggccagttccatcgcacggcaggactggacgcacataatggagcgagccgagcggagcggcctctctctccagtcccaaaaaggaagcgccggggtgctgttctccgtgagaatcctcgctcccattttagatggagggctgcggcatatcgttctggcggcgatccagtacagtctggggcggcacacctatatgcccggcatagctgcagaatttacctgccggaacctgagccgtctggatgcggctgcccgttccgccgccgcagcaaagatcagcgaacatttgagccgatatggagagcaggagccatatccgcaagtgtggcacggcttaagccgagtgcttacatctggcaaaatcaaagaagacgataggaggaaagaaaggatgccgattttacagcctctggaaagcatggaacgcatctcacgccaggcactggcagatgacctggatgccgtgctggaacggataagccgtgaggatatcgggctggtgatcaccgacgaaggcaaagacgacttggttctctgccctgcctcctggttcaatcttgactatgtggatgatttttcctgcgtcatcaacagcgccctccgctatgccatgcgcagcgaagatgaggagagtgcggcggtcgtccagtatcttcgtcgccactaccagttgttcgatgaaaagacgctgtcggtggctgtcgccgatctggagcgggaactgaaccagccgatagcgcccctcaagcagccgcaggtctggaaggaactccaggagctgttccggcagcggctggacgagttgcggaaggaagcttcggaaggcgaggaaacgcaccatggatgaaaagcgatatgagctcgtggaaatccaagtagatgcggaacttctggagcaactggaagcggtaatcgccccgatggggctgacgccagaaatgttggctgtgaagttcttcgagttctgcgtcgatcccgcgacccaggaactggccatctccttgcttctgaaatggaaagccgaacaggaagcggagggggagaatctgggagggggactttaatgctgtccaaggaaaccttctgtgaagccctgcgaaagattcaagcgcaaaaggatcgagatgaacagttcagtaaggcactcaccctgatgggagacggacatttcgtatttgagggcggagcgccgcttcttgccgccttgctggatgtactaaaggaagcggtcaacgaccagtacgactatatcagctggtggctttacgatgccgccccagactatgaagtctggaccgatgatgaaaaaactaagtggtgcctgaaggaaccggaagccctgtatgatttcatccgggatgaatgtcagggctgagtgttagcgtctccccaaattcgttcaaggaggtcaaatcagatgtctaagtgctgcctatactgccgggtagatggagcgtctacggaaagcaactgtctcgccataaaccagcagctcaccgcactccgaagcctcgccggccagcttgggttttcgatttccgcagagatgctccaatatgagagcggcttggacgcaaaccgacagagcattcgaacgctgatccgtgatgcacgacatggagtctatgaccgggtgctggtgatgaacggcgaccgtctggctcgtgacgccgaaggtttggcggcgattggagaaaagttgaccgcagcaggagtccggttctattgcccagatggcgaaattgatctggcccccgcatattctcatggttatttccgggtggcaacgatggaacagaccatgtgattgggaaaagttcccgtcccacctctcttccacggccaaagaaaatgcggtataataaaggaaccacatacaccagaccgggaaagttgctcattccggcaggaaggagatgttgccatgagttcattagaggaaaagaaaagtgagcttgagagggtccttggggtattccagaactacattgaaggctctgaattgctcgatgtggtctattcgaaaaagttcgggtatgttctgcttggcctgcctgcggcggattccattgatgactccgatgtaacacgactggaagatcccgaaacattggtgaaagaggtctatcagaatctcgcatacgactttatggagcaggaaggacacagcgaggattacacggaagccaccaatctggaaaagcgagctatgcgggaatggatgaaagagtacacggatcagctgccggaatacaactacctgctggacgaactccttggatgacgtgtccgatgaagcaggcgcttccctcagtcaatctttcgacatggataaagcggacatcttttttggtcgaacactaaaatggcccatcacacagagaatctgccgatgctctgcttaaaaaagggcaaaaaaataaggccaatgcctcgcaaagcccatgaattcagggatttccggggatatctcaattggtcttacactccacattgtgcgaccaaaaaagatatcgcaccggaaaaccccgaagccacaacggtttcggggttttttcgcatccaattttgactgcgcaaaaaaagatatcttttcaggcatccccccattggtgaggacttgaactaaattccggcagttgttcccccgttttccgccgttgttttcagaattattccgctcacagcaaaaaatattttgttaaatttttgtgaacaaagtggtttgtactaaaatgtggtacaaaccacttccctggcacatcatggccgtcactctttttggagtggcggccttttttgttttccggcatataaactatgtaccaataggttaccgctcattggagggaacattcatggatcgagaaccgtattttaaggaactttgcatcgcacttgcgcgagaaggattcaccctgcagtcggagcaggacggccttctcccagtgaactggaacaaccttccgctttgcagagtcacagatgcaggaggaattcgctactggcaggagaatgtagcagcgccagatcgagaacaggcccttggacgggctacgcatttggctggcatggtgcgagagtacatgaccttattggaacaggctcctcccttgcaggctcagagcttgactggcaactactatctgctggctgacttcaacggaaccgtgctggcagctcatcccacccggcttggcatccatttcgttacttgggactggaacttcgatcacacagctctcaaccaaggaaaatactttcaggcagactatgaagatgccaagcagaatttcgccattcgctctggcctcattcctgagcagaaaatttttgatcaggagcagttgattgaaatttaccagtgctgctccgacaccctggatgctggattggatttgacctacgaacaggaacagcgtatcaaaagcgttcaggagcagatcttgaacggaacacccaatgttcaggagcacatcaccgaacaggggcagcataccatagctcctcaaagtcaggagctgacaatgtaatacactgagcgccggagttttagaagtaagactccggcgcttttccatttcaccgaaaggagaaaattgcctatgacacgctattttatgagagatactccgctgtatcagatggagcagatgatgacaccacctaatttcaggccaagaggtcatggtctgcatccgtccagatttcactaccaggccaaagatgtggaatgccggtactgcaccaaccatgaacaggaccgcctctgccccctgtgcgaatgcatttgcttgagggatcgaatcgacgcaggcacgatcagtcttgcagagatactccaagactgtctttgcggcaagctgaagatgaggctttggagacggctcacagcggaaatattctcttatccgctgcaattcttccgcaccgacaaacaccgtagccgttggatgcaatggaaagaacgatatcaccaactgtctcggaaaaatcaggcagcgttgttccttctgacggcttacgatgatatctggttcagagtgatctggaagatcagcgatgatggctttgattttggttctgtccatttggccggcatccaatcggaagtgtacagtgtttatcaggcggccaaggccatctccaccggcagccacaatatcactcttgccgatctcgcctcccccgaattggtcacagatgaggcgttccgactgattatctgcgctctgcttctggccaagtatggggatgcgattttgcattttgaaagaaaggaaggtgaagaaacacaatgacaaccgcagttctaagcaatgccgatcacccagaattcggtgtcgtgacaatcccactccctatccccagagaacagtacgaccactgcgtttcaatgctggaagcattggagatcggcgatgcctcagcagctgactgtcgtttggatgatctgtgggatgcatggccggtattgaactgtctgcaaggcatgaaagtcaacctggatgagctggactaccttgtaaaacgcctggatggctttgatgtgaaagaaatctcgcagtttcaggcaatggctgaaaagctcaatctcacaagcatgaaagacctcatcaatctgagcttcagctgccagcaggtaactgtaatttcggatttttctgacctggcggcagttggtcgtgaccactacatgaacatccacggcggatgtgcccgcacagaagaactggagcagctggacggagaggaaaccgccatcctgctgattgagagcaacgagggaatcatcacccgatatggagtggtctacgacaacggcatgcagctttcgcaactctatgacggaaaacatctgccctgctatcactacgaagctgatatgactgccgttgggctatgctctcagaaggagccggaggacagtaaaaatgtcacctggatctacctccctgcatcccatgggcaaattgagcgtgccatgcagcgttccggcattatcgatccaaaggatatgcgtctctggatagccgacagctcatttccagaagaagtggatgtagcattggacttccggtgcgataacatctacgaactcaatgagctggcactggttgcgtgtaagctctctcgtgatgactgcatcaaactgggggctgctgtgagcatggcccgaccggaagatgccagccagatacgccgcttggcagaaaaccttgacttgtttgaattcgcccccggcgcacatacccctgcagaatacggaaaatacatgatccagaaatccggccattttgagtatgactccaatctggatgatttctatgactacgagcggtatggacggcaacacatggattttgaggcgggcttatttaccagtcgaggctacattgcctatgttggcacgataagtttggaggaattgatggcggatgatcctgcggaagcctatcggcgagagcaggactttcaaatgggaggtctttcctgatgccccgcacaaccgacctgcttcaagtaaagctggtggcgcacactctcctcgatgtgcagatccaagaaacagctctctccccggtaatcgtcagccaccccttcacaaactctgggatctctgcacttcggaatgaggatgggagtctctccatggtcgacctgatcaacaatttggatgactgcacaaggtggcgcagaaaggttggggaacagatcgacagtgccgaaaatgtccatcagatcttcgtactgctcaacccgccttattatctgacttttattaagtttaccgcctctgctctctcggagcaggatttgggacagctcttatgcaccgcctggacccagggggagtgccccaatcaggactgcaatgtgagcaaacgagaactggtggccatgttccgatccgtaccgccggagtccctgatggatgaggaggagcgagccgcacaccaggcattggaggatacggtgacggtctaccggggtgttacccactataacgccaaaaatatcagggcgctgtcctggacactggaccggaaaacggcggactggttcgcccaccgcttcggtgaggagggaacggtatatgaggcacagattcggaaggagcatatcctggccctgttcaccggcaggagcgaaagcgaggttatcgtagacccgcagcatttggaacagattgtggagtccccggcaccacaattcgatatgcagatgagctaatcattccaaggaggaatatgaatgaaaaagaaaatagtgatcactctggcgtctgtggcagcggtaggtgccgctgttgcgggctatctccatttttccggaagaacgccttttggtcatagctatttccgctgagctgtggtattgttccgcatgaggaggtgaagcaaatggccatttcattaacggaacagttggagagtgacatcaaagcatatcttcacaagatttttgggacatatctctcctgtcttgatgaaagatttgctgtagatatcaaagatgaagtcatcagctcatcagatttcaattatggattttacaacgatgctgacatctccatcgcattccaacgagtaaccctggggaggatgggacatccagaatggaaaatttacaattcctgtatggatacggaggcgaacaccatgaagcagaatgcaaaagtaaatacaccgattcatattaggcccgcttctcctgaggaagcgggcctcttttattcagaacttgaggagaacgaggacaaaacaataggcgctgttggccgggtcacctatgccagtggtgaacagatgaaatttacggatgcctcaacgttcctgcagtccattcgaaaggagctcccctatatggccactaccggcttccgctacgagctcctgaccgatgacccggagatccgcaaagcggtagatgacatcctactgggctttgccggagatgaaaacccaaggcgagcctataattatggtctgacagaaaagggcatcaaaggcatgcagaacgctgccgatccaacactgccccatacctacacatggttcgtgattaccgattgcaacacctccagagaacatatcttccgggatctgacctttgaggaggccatccgcacctatcaggacagcgaccgaccggagaagcggattggtgtcaccaaggacggaattgccacggtggatttagtacgctgcttggacggggagcagcaattcttcactgaccacttgaaattggacagcttcaaggacgacacagaggtcaccgctgcggcagaaacgctccgattggagttggatcagaatacgccccaacagggcatggcaatgggaggattatcatgagagaaatttcaagagagtggctggacttcctgcgggaccagtaccccgagggaagccgcattcagctgacggagatgggaagcgaccatcaccccattcctcctgggagcaaaggaattctggatcatatcgatgatctcggacacttccatgtgcggtggaacaatggccagatccttgatgtggtcattggagaggatcgctttaccgttctaacgcctgagtccaccacgctgaagctgtatatgcccctgaccgctgatctctatacccgcaacgagtacggtgagatggaagatgatagtgctctgctggatggtagatcgttgagagtctatgaaggggacatcctcaaggccttgatcaacaatcgtacaccggaagaatccgagagcggcatcatgcactggtatggtgaggatgacagcgtcaaccagaaggtcaaatccgcagtattcaccgtcgaggatcggaacggtcagctctggggggttgccgaatgccgtgtggtcggcaccctcacaccggaggagctgaccaccctgaaagagtatatctccggtcaggcatcggacggctggggcgaaggctttgagcagcaggatatctgcatcggtgatgatgaactctatgtccatctgtggaacttcgacaattggagcattcagaccgaagacgagcgattcgctcccaaacttgcagagggcctgccggagatgtgcttctccaccctgaaatccaccggcgaactcatctgcatcaagagaggcgaaaccggatactacccctctgactgggacaccggcgacaaggagaaaaatgtagaactggcagaccagctgaacgaacagctgggggtcaatatgtggcagcggcaggccatggaggtaggcagtatgcacggctgggatgtccccggcgctgaccccgccaagtaccaggaggactatggccatcagatgggagggatgacccttggatgacaagttgttcagcgtctatctgacccctgcagactacggcaaactgtcctacgccaaattggagcttcccgccagtccatgggcgctgttggatgcgctggacaaggtgcggtttacggaggaagaatccttgtatctggagatcacagattaccatgattttgaggagctgcactcctgccttacctgttcatcgatgagtctgttggagttgaacgacctggccaagcgtatctctgacctgaatgagacgcaacgcactgcctttgaaggactggtgcgggtggaactccagaagcaggagcccgtcacgctgaaacgccttcgggacctggcggcaagcacggactgctgccatgtggtggaatcggtcgtgtcggatggacagttgggacgattttatgcagagaatggttttatgccggaagtggaaggaatcccagatgcggcatttgaactcctggactttgaaaagattggcaagatggcgcgcacaggcgaaggtggagtatatgtgccaagcgggatctccgcgctgggcggttacgtagtccagcactcggacttgaaaacagctccggaaatcacccagtgccagcctgccgagcctgactatacgatgcatctccggctgacggcacaccacaacgaacatcctttcttcggggtcgatgtgacagatttgaaacttcccgcagaagacagtgttctggagatggcggtacgctgcctgggacacgttgactggggcgaagtagaatgtacctgtctcgactgcaaagtccctcagcttgcggagctggtcaccagtgcagtccctttcgaaaccattgaacggttgggagatatgcttgctcaaatgcctgccaaaagtatgccaacctacaaagcgctcatcgaagcgactaagtgccagaatatcgaggacgctctaagtctggcggagcagcttgaggaacacatcctttctccgaggattgcttctcctgaagatgctgcgacagagaaactggccattgcacttacaaaagaggatgcccagataatccgtcctcatatcaatcttcacacctatgggcaggcactcctggcctcccgcaacagtattcaaaccgagtatggtctaattgaacggagggatgggcagcccattcagactgtcgaccagcaggaagcggagccgcagatgggtgggatgaaccttggataagactgggggcgtagaggtgacctccaacaacacaggccccaaatggtgtaagcacagcacttttatgtggaaaggaggggctctcgattctaaagcaaacgatcacagcgcctgaacaagtggatctgacatccatagactactcggatatccgttggcatcatggcgtattctactgcaacagcagcggctccggtcggggcaagacataccatccttggtcaggggcaaagaccaatattggtgaaatcgaggaaaaagtatggtgtcagatcgccgaggcactgatcaaccgaaagggtgaatccgctctgcttcattgccttattgagtgggaaacggaacacaactatgtccacacatccagagaggagataaaaaaagaggctctgcgtctgcacgtggatcggctatttgacaacccacgctgggtccacttcgtcccatttaaccggcgatatcgcccagagattgtgaaatcagcacatcttgtcatggtggtcaacgagtgttgcaacacacctggcgaggttacacaggagcagattgatcacgcttcaaatggtatgatcgcctgcccatgctgtgggaggtggagccttttccaccatgtggaacagcctgagtgcgaaaatatgaacgaaggcgaaagcggaatggagatgatatattgaacactcaacagtctgacctcttcgacttgctggacggccttgaaatgaccaaatcccagcacgactggctggaacggcgattcgaaaacatgacagtcaaagaaaacctgctgtttcggggtgccatgcagttcgagcgcccccagatgactgccgatgtgatgctgattgccaatcagctggatcactacgacctgttctacggcgctggggacgatgcccaacttggcaaatttgtcatggagcagatccagcgtccctcctctcaggcccgtgcattccttgacccggagaaagtgggggcagcttaccgtcagaaaggtgggaacaccttctgcgatgggcacttcatcaaggtcaactcactgatcgatcctttcctggacggtgacccgacgctgaatcctgataaaggtgactacggtatcagggtcaagctggcaagccgctccaatatggaaggtgtgtggattggattcccggacaccgacgagtacatggataccgcacatccggacgaacttctcctggcgctggacgcactggaggtggagtctttgactgagtgtatcgccgtggatgtggactgctgcctcccgcagctggagaacatcctctcccagtatgattctgcggcggaactgatccgtcatgccatcgacttcggctatgtctggggtgagcaagggcaaggagaaccccattggctggataagtggcaggctgtcatggagctggaggactgccatcgtctggattatgctctggatctggcgcagaacctccattgctacaacttcatgccgcgggacatggaactggctgaatacggcaaaacgctggcgaaacaggacggcgtctaccccaaggatgaactgctcgcctcctgctttgatgcggagggttatgccgaacagaggatgcggtccatgggtctgtccgccgctgagcacggtttcgtatcctggaatggtactgagctggtctttgagtacagtcagccggatgtggagcctaccatgaccatgtgagaaacctacgcacagaccagacttcgccggaacggaggtgataatacaagtaaaatcaaatatcttgaaagctgcaggggccgttacccgaatcgggacaaacggcccctgatttctttgcgctcttttcgggtaacacccccggaaaggagcctgcatgatcacgacaacgaataatcccatcgcccagtacctgaggatctatcacacaggagtgcgaagcgtcatatccagccgtgagctggaggccgcttttcagatccgcgggcccgacctgcgccggttgatcaacagcctgcgcggagagagcattcccatctgcagttctgattccggctattactacgccgaaactgaggaggaattgcaaggaaccatccggcagctccggagccggatcaagaagatcgcccatgcggagcgaggtctctccaaggcattggagcaattcactgacagcgggcagatatcgctgccgttggatggcggtgatgccgattgaaaagcttcatcccctgggtgggcggaaaaagtaagctgctgtggctgatccgcaagctgtctccttcgcggtattcccgatttattgatgtgttcggcggcagcggaacggtgaccctgagccgtcccatccagccgggatgtatggaggtttacaacgacttcaacagtgacctaaccaacctgttctgttgtgtcaagaacaggaccatggcactgcttcaggagctgggctttctgccgctgaacacccgtgacgatttcaatgtgctgtataagttcttctctaaagaagaattcaccgatgactatttgaaggaggaactggagctgacggagcggtatctggaaccaccggatgccgaaaccatccgaaggatgatgctggaacgggcacctcgcggtgatgtgcggcgggccgccgactttttcaagctgattcgatacagcttcagcggcggcgccaagtcctttgcaggaaaatcctgcgacatccgccgtttcttctatctgatttgggagtgctcccgcaggctggcagatgtcgtcatcgagaataaggactgcgtggagatcgtccgccagtacgaccggccagacgcatttctctatttcgatccgccctactacgatgccgaggactgttacgcggcggtgtttccaaaagcagatcatcagcgtctccacgatgcccttctggaatgcaagggatatgtcatggtgtcctacaattactgccccttcattgtggagctgtataaggaattctacatcttctacacgacacgccccaacagtatgtcccagacggccggaagcgaatatgaggagatcgtcatcaccaactacgacccccggcgccacaattccgcaaggcattggcagctcaatcttttcaacctgactgcagcggatgaggaggaagggaaatataccctgatccatgaaccaacaacagaactcagacagaaaacggaggaatgaatatgacttttatcaagtacaccaatgacggcaaggccgtcatccagcccgcagccctgatcttaagcggcctggacagagaggatgcgctggagatgcataccctggaaaacgccattgttttgttcaagcaggagatggaacctgcggagaaagttgccgccatgacaaccctgctgcggctgacccacagcctgtcggcggatatgctggccgactgggaggatcatgaggaggacgaggatatgtgcgacggctgtcatggctgtgatgaggacacactccccatccccgccgaggcctttgcggatgccggtattctgtacgacaacctccgtgtagtcagcgtggacggtgctgttctggtggtgtccgatgaccgcaagaccgcatggagcgatgcgctgaccaaggcgatccttgaaagcgagaaagccgatgactaaggatcacgcctatctctacctcggttccatctccgaggccaagcggcaaaacgaggtggccctctggcgggcaagccacctggagaacactgcctgcaagcaggccatcgaggaggccattcgcagggattttgatggtatgcacctggaccgtgactgcgccagaagtgtcatcgacaagttcggattcaagcgtgtagggtgggtactgtccgccacacttcagcagaagcactatgatgggcggttcagcccgcaaaacaaaacatgggctgcatccacctttatccctcccagcgaccgcaactatgaatttgcggtagaaagccaccctgccgtgttggacggcttcgtcaaagcattccgtgaagcgcaggcggagctgaagctgtttgaccgatcccaatgcgatgatatgactacccaagacctggaaggcaaggtgctggtcatgagtcccttcacgctgaaagagtcctactgggcgccggaaaatcagctctggctggcaaccggcggctttggctgtgtccccaccgctgcaggcagagcagtatatgccacctgccttggtgatggagagcaagtacgatggaaccgcagcgacttcattggcattctccgggaggagcatctgcccgactgggccagggagcgtttggagcagctccagcaggagtctcccagcactcctgaaatgaaccaaccatctatgtaaagaaaggagatcagttaccatggcaacgacgaagaaaaagcagcaggagccctctacgccccaagtggaagcgcggatcgaccgtctggtggatggagacttcaaaaccaaggctttcgccagcgccacaatcggcggcgcatttgccatccacggaatccgggtcatcgaatccgacaagggccgtttcatctcaatgccccaggagtcctacaaaaagaatggggaaaccaagtacagcgacaccttccatgccatcaccaccgacgctcgcaccgctttggtggatgcggtcaacagcgcttacgagcagaagctccaggagcaacaggaacagcaggagcagcaggaacagcggagcgagatgcccgaacaggccatgagccagcagatgtaacggatatggccggaagacctgctaatgaaagtcaagtaggaatttcaagatttcaagttagaaaaaaggccacacgaagccagaccgctgagcgctccaaaattgaaacggcggtcggccagagaggtgttcagtatgagatcagatccgcgccagtgtgtttagataagcagttaccgaggcgtagtagatacgcaggaacttgttggcagaagccatcatgtagaccttgtaaggctttccttcggaacgctttttgtccatgaattggtacacgggttcgtccaaaggggcgctttgcagataaatgcccatcacaaggaacaaagttctgcgcagagcggcggaaccccgtttggagatgctgcggctgtgtatgtccatttggccagactggcagggaggtgcgtcaatgccggcaaaggcaaccaaagcctttttggagtggaaccggcgcacatcgccaatttcagccatgagctgcggaccgagcgtagaaccaacgccgaacatttccatgaccacgggatattcgggcaaggcagcggccaaagactgcatctcctgtttgagtgcggcgagtgcagcagcggttgccttaagctgagcaattgcctgttgtaccaagagcttggttgtctcatttcggggcataacgccaatgcagctttgcgctttggaatgaatttcaaacgccttctcctgactgaaatagtacccatgttttctgcaccatttcaggtatctggcagaaaaagatttcaggggcaatgttgaaacgcactggcaatgccagaaggtcgagacgaaatccacccatttctcacttccatcggcacggggagagctattgaacagtcgattgacctccgggaatacggcatccagcaaggaaatcaggttgtttttcaacatggtctgtaccttggaatattgctggtactgccggtagcagtttttcaaaagtagccgggtatcttcctccgggacatacctgggcagcgtaagccagtggtcaagcccgtagttggccagcttcacagcgtccttcttgtctgtcttggctcgtcttaaactgttgttcccgtagtcatgcaccagcattgcattgactacggagacataaagccctgcatcgtggagcagccaagccactggtgtatggtaattgcccgtggattccatgaccacacgggtctcgccgtcgagacttttgagcagctttgccaactcgcttagttcactggcggtgtgctgcacttcaaagggtgaaatcaccacctctccgaaggggcgcatgacggcgatcatgctttttcctttggaaacatcgatgccaacgcagttcattcacattcctccaatatcaagaatctgcaaccggaatccatcttttctcgctgccgattcaatctattgtgtgacgcgaactccccggcatccggtggttcaacctgctcaaatcgaacgctgcaacaagaggatgactgacagtctttccggcggacatagaagcccaaggaggtgatggtcagccagttgctcctctcattgtagcttaggcacgagatggagggaaagccggactggctgcccggctttcctgtccaaatatattgtaataggaggtgatgaatcctgattcgtttcacagtcgataaccgaaaccgtctgatcttctatgacaatatggtgggctatgtaaaagacagcaccgctgttgtggatgagatgtttcagaccgatgagctgtcccgttatctggccagaatgaacctgactccccagtgggaggagggcgtgtttgaccgcctgactgccggcgaggtccccagtgaggaactgggtcagccgcagaaaggctgccgtatctggcagctccgaaaagatgtggatgtcaccatgcgtttcatcggatatgaggatctggtcaaaaagttcggagaaccggatgcaggcaactacacgcaggtattcgagggggatctgggtaccaatgatctggagcggatctatgccatctgcagggataatccccctcctgaatatcaggggtaccgaatggcgctgtccgatgtagtggagctgtatgatgcttccggcagcgaattctattactgcgaccggatcgggttccgccccatccggtttgaccacagccaggagcagacagaatgtatcgaaatgaccatgtaggccggacgatgggtaatcgctcggcttttgctttgccccaccgaggccgaggccctcccgagataagatatctatgaccgaacctgcgtcatcaaaccatccacaaacatccaaaattcatttatttataaggaggaacttattttatgaagaagctgttcaagaacatcgccaacaccgccaagactaccgccgccaactgcaagacttccatcgccaccttccacagccgggccatcagcaacaacgccggtgaaggctatatcgataccgccgtcaaggtgctgatcgccgttgtcctgggcgccctggtgctggccggtctgtatgctgtgctcaatgacaccgtcatgcccaccgtcacccagcgcattcaggagatgttcgactacgcgggctgatgaactgggggcaggcactggtcttttgcggcgggcttgcctatgccgctgtggatgacctgagatccagaacagtccatgatatcgtctgcatcataattgcactggcggggctgatcactatcagccccgcctcccttttgggggcgctgctggcgatggccccgttctacctctgtgcaggtctcggcctgatgggcggaggcgactggcggctgtcggccgctgctggctttgttctgggctttgaccgagtaatgaccggcttgtgttttatggccgctgcgcttctttgcactttctttgccatgcgggcaatcccggcactgcggaagcgcacggcagcaaaacagccgctggtcccgtatattgcagtggcttttatccccgcatattttttgtaaggaggcttttatgaaaatttttcgcaaccgcaccgtggccggtgtgctgtgtatccttctggcgctcctcatctgctttggagtaacgcccctgttcagccgcagcgccagtgagaaggctgagatcgtccgagttgccgccgacatcaaggagggcgccgagatcaccgccgagatggtacagaccgtggaggtgggcgcctataacctgccgtccggcatcatgacagagaaagacgaagtcattggcaaattcgccaccgcggacctgaaggtgggcgattacattcttgacagcaagctctcctatgagcccgccgctgagaacgcctatctgtacaatctggatggcagcaaacaggccatttcagtcaccatcaagagctttgccaccggcctgtccggcaagctggaaagcggtgacatcgtctccgtccttgtggccgactacaagggtatgggcgaaaccgtgatcccgcctgagctgcagtatgttgaggtcatctccgttaccgcatcctccggctacgatgccaacaccggcgaggctgttgaggacgaaaaggaacttccctctaccgttaccctcctggtgactactgagcaggccaaggttctggccggactggagcaggaaagcgaattgcacctggctctggtctaccgtggcgcccctgagaacgccgatgagtttattgcagcgcaggacgctctgatcgaggaactgtacgccgaaccggaggctgagacagcggagagcgccgagaatgcggagagtgctgaaactgtagaaagtgagggcgccgagaatgccgcggagagcgaggcggctggggaatgaatttcatcaagggaagtctgtttcggcgaaacactgagccggatgaaatggaacctgttgtggagtccggcggcggtattctcgccgtctggggaagtcctgggtgcggaaaaactgtgactgcagtgaagatcacaaagcatctggcatcccagaagaaaaatgtagtgcttctgctctgcgatatgactgcccccatgatgccctgcatctgtccgccctccgagctggagtgtgacaaatctttaggcagtatctttgcggcccagcgtatctccgttaatctcatcaaacacaacctgaccacccacaaaaagctgtcctatctgaccatgctggggctgcgaaaaggtgaaaacgagtacacctatgcggcttgtaccaagcaacaggccgaagaactcatccgcggtctgcgtgagatcgcctcctatgtggtcatcgattgctccagctacatcgccaatgacatcctctctgccgtggcgcttatggaggctgacagcgtcctccggctggccaactgcgacctgaagtccatcggttacctgtccagccagctcccgctcctccgggaactgcactgggatgaggacaagcagtataaggctgcatccaatgtcaaaccccttcaggcggctgaccgcatcggtcaggttctgggcagcgtcgccttccagcttccctattctcaggaattggaggagcagtatctggaaggtgtgcttctgaacgacctcgccatgaaggacagcaaggcctttcgccgggagatcgagaaaatctgcaaggaggtattttgatgcttggcgacagaagaagcaactcattatttgcctccgctgaacccgtctccgttccggagataacgccggagcaggctgaggtgcatgacatcgcctttgaggaggataccggtcgatccatctttgcggaaagccaggtcgcgcccaaggcaagcgatatcttctttgcccccatggataaggggatgccttttgcagaggttctcagccaggtacagtcctatctctccggtacctatgccaccctgatcacagaggatggtgatgaggcaaaagggcagatgaaacgccgcattgcccggtatctgcaggataaccgcatggctgttgacggcatgacgcagggagaattggtggccgcactctatacggaaatggctgagtacggctttctcaccaagtatatctttgctgagggcattgaggagatcgacgtcaattcctggcgagatatcgagatccagtactccgatggccgcaccgtcaagctggaggaacactttgactcgccggaccatgcggccaatgtcatccgccgtatgctgcagaactccggcaaggtgctggacaatgccagccccatcatcacctcccgtctggccaaaaatatccgtgtttcggtcatcaagaccccggtgctggacgaggatgcgggcgtcgcggcctccatccgaatcgtcaatcccaagcatctgaccaaggaggactttgttggcagcggaacagcaacggaagaaatgctggactttctgtccgcctgcctgcgctatggcgtgtccatctgtgtggctggcgccaccagctccggtaaaaccaccgtggcaggctggctcctgtccaccattcctgaccgaaagcggatcttcaccatcgaagacggttcccgtgagcttcagctcatccgggagcaggacggcagggtggtcaactccgtcgtccacacccaaacccgcgacagcgagaacgtgcggcagcgcatcgaccagatcgcactgctggacatcgcccttcgtttcaatcccgacatcatcgctgtgggtgagatgcgcggcccggaggccaatgcggctcaggaagccgcccgtgtcggtgtggctgttctcaccaccatccactccagttccagcgagggcacctaccggcgcatggtgtccctgtgcaagcgggccgtggatacccccgatgatacgctcatgggctatgtcactgaggcgtatcccattgtggtctactgccgccagctggagaacaaacagcgccgcatcaccaatatctccgaatgtgagatcctgccggatggaagccgcaagctccataagctctacgaatacaacatcaccgagaaccgtttggagggtgaccgatttatcattgaaggacaccaccaaaagtgcgaggagatgtccgagagcctgcagcggaggttcatcgaaaatggcatggctcgcagtgaactggagcaattcattcaaagagaggaggcgaccgaatgacagcgattcagctgattgcctgtgtgggtatgatcgccgggctttttatggtgctggggatctctcccgcagaaatgagcgacagcatcttctcccgactgacagcggcccccggcagcatccgggcagatatcaatgaaacaaccaagcgaaaaaaggccggttttttccgtagggagatcaccgaggcgcaggcagtattggctgcatctgggcgtgaggggaaatttcccatggtgtgcatggcatccctggtgctgtttgcccttggcgcctgcattgccattctcgccgggaacgccttcctggttcccgtgctggcggtgggctttatgctgctcccattctggtatgtcaagctgacagccggaggctttaagaaggatgtggctgcggagctggaaacagcactgtcggtcattaccaccgcatacctgagaaccgagaacttccagcaggccgtagaggaaaacatccggtatctgcattatccggtgcaggaggtgttccagcggtttctcacctgcatcaagcacattgacccggacatggatgccgcactgcacgacttgaaatatgccatcgacaacgaggtgtggcaggagtggtgcgaggcggtttccgcctgccagacagaccgcagcctaaagagtacgctgacccccatcgtcagcaagctgtcggatatgcgggtcgtcaacggggagttggaaaacctggtctacggcccccgcaaagagttcgtcactatggcggtactggtgctgatcaatatcccgttggttcgatttatcaatacggactggtatcacactttggtggatactatccccggccagatggtcattgccatctgcatcgccgctgtattcgtgtcctttgcctttgtagtaaagctgacacagcccatcgagtatcggaggtgaggacatgggcgcacttttatttctgttcgggatcgcactggccgccggactgtattttatccttgccgacctgctgaagatcccccggctggccacagaacgcgcgctcatctctgctggacggcgagagcgaagcctggtcaaatctctggaagcactgatcctcggctgggcactgaagctggccccgctgatccgtctggatgagtacaagtaccggtggctggaaaccaagctaacagcggcagggctggatatgactccgcaggtctatacggcctattctcttttgaagccctgcctgattctgcttggtatcatcccgtgcctgctgatccttcccatcctgagcccccttatcgtggtgctggccgtgctgacctggtttaaggagagccgccgtgctgatgagctggtgaaggccagaatggagctgatcgagggcgagctgccccgattcgttgccaccatccaccaggaactggcggccagccgggatgtgctgcgaattctggagaactataaaaaacacgccggacctgacttcagccgggaactggatgtactgacagcagatatgcggtcctcctcctatgaagcagcgctcattcgattcgaggccagaatgggttcggccattgtttcggatattgtccgcggcctcatcgggatcttgcgtggagatgatgggcggatgtacttccagatgctgtcccacgatctgaaggcgatggaactgcagcgtctcaaagccaaagcagcgaagatcccgcctaaaatccgggttttcagctttatgatgctcatgtgcttcatgatgacctacattgtcattatcgtatatcagatcgtcaactccctggggagcctgttctaaaggaggtcgccatgaaaaagttactgaaacggcgctccggcgaaggctatatcgatgtgtgcgttctggtggtgtgcgccatgttggtgctggcactggtagtgcgtgtgcttccggtctatatcaccaagcagcagctggacacctatgctgtggagctggtgcgcgaggcagaaatcgccggccgggttgggacggaaactacccgccgtgcggcagcacttaccgacagcacagggctcgacccggatatccgctggtctaccaccggacgcatccagctcaacgatgaggtctctgtgaccctgacgctggaaacagatatcggcctcttcggagggcttggttcattccccatcacactgactgcggaagccacaggaaagtcggaggtgtactggaagtgaaaaaacatttctttcgccgtcgctccggcgagggcacccccttgattttggccattgttttggtcttactgatgttgttttgcgctgttgcggaattctgccggatatggatcatcgcccagggcgtaaaggaggcgtctcagcaggcagtgatctccaccaccaacgacaactacgacgatgtctatcacgccgtgcgcgaaggctacgctgccggatggtatccagacggcacaggccgctgggacgagagcatcgacatgggggatgtatatggtcagctttctgaaaccctgggcttagaaaatacggcacagggctatcagaaattagcaaacggccaggtggagtacaccatatccgagttgtccgtagaggtcataaacaacggccttagctccggagagagcgagggatacaccgccagtgtggagattcgcttggaggttccagtacgctttctcggaaaccttcttccctccgccagcatgacattgcacacagaggccaaatatatccccctcttttgaaaaggcttctcctattcaatagacttctgtcaggaaatgtggtattgtccacttaaagaagaaaactgttcaaggaggaatgcgctatgacagaaaagacgaagaaaatcatccttatctccatcggctgcctgctctgtttggcggttgcggtcggaatcgccactcggttcagtggcaacgctgcgatcccctccggtgtggtctccgatgatccggcacaaagcggtgatccggttgatgtaaatatcaacagcgacgatcagaacgatatgaacatccaggcggagataccggatgaatccaaagaagatccggcacagggtgctgactccagcggtctggagcagtcgatccaggccgatccggtcaaaccggagcagcccgaaaagcctgaggctccctctgggaccaccactctgccggaagatcacgatgggtcagatgtaccggaggaggaacgcaagactgaggatgaggagcctcccacctatgagaagccgcccgcaaatccccctgccgaatcggagcctgctgccggaagcaccaacagctccggtcaggtctatgtacccggcttcggttatgtggagaacagtggcgggaacaccggcattcaggacaatgagatgtacgaaaacggcaacaaaatcggcgagatgggcggcgggaattaactgcttactcgctacaaggcgcagtcagaaatgactgcgtcttcttttttgcaaaaaaatgaaaggaggtcatcaatgaagcgaattctcgcactcgttctctctgtcgtcctgacgctgggtattgcagtgcctgcccacgccgttggtgacgacaatattgatggcggcggcggaaacatgggcgatggaacatccagcagctattggaacccaggtatggacggtgtccgtgtatctgtaatcgatgcagacagccacgctgtggtcggcaatgtaatcgatctgaccaataagacacccagttcgggaattattcactttggcaaggtcagcaagctgtcctataacgctggacggggcctctctcctgtggtgggcaattaccgctatatcaacccctcgcaaagcctgccccgcattatttccaccggcagctatccggccagcattgatgcgattcgcagctattttaccgacgagcaggtcatccgcgccattgctggctatgtaggcatggactttgacaccttgatctgtggtgactataagctggccatcgagccaattgcgtatctggtctacagcggagccaactatgctatgactgcgacagaggccgccctctatgacaagactgtctccggagatctgcggtattggatgggctctctcacgcatcaaaatctccccttggctattttcttggaagaagccgaccttggatatcccgcatggggtggcagcaccaccagcaaggtcagcaacgaccaaatcatctcttcgctgggtatcggcatcgtccgtttcaatgatgagctggaaccaccggatgtcgatgagtttgactacgaataccgggtagacaccgatgtgatcacttccgtggaggtatccggcgggcagtctgacccggacaatccggtcacagtacagtttgtgatcgagggcagcacctacaccgtcagcaatgtttactaccctgacggtgacagccagctggtctgggtaaagtggcacacgccggatgaaccatgtatctgcaccattcaggtcagagtgattgggggcggcacagcccaaagcgccatcactgccaatatcgtggacctggatggaaacgatcctcccaatccagtagccgatgaccgaaacgatgactttacccttgtgagtatcccagagaaagcagaagtgacctcagcctcctggggcatctggtctccctggtggcaggagtattgggtgtgggtagaaaattgggaaaagtgctggcatacggatcgctggactgacagtgagggaaaatcccatacagatcactggtatcactgggtggacaacggctggtgggaggatcagggctggtgggagtttgactacaacagctactccgccagcctgtcggcttctatggacattactccagacaacatggcgccgacagcgagcgccacgactgcaaaaagcggttacggcattcagcaagctgtgaccgccaatgtcagcacgacccagagttccgctgtgacggctgcgcaaaatgctgtgacctatttcccggagttcaactacgaagggttctggcggctcctgaatcgaagcgtcagcggcaaacgctccagcttcgccttcaagaataatccctacagcacttataacaggccgacccacttcacccccatctggtatccggatggaagctatacgccatacacctggctccttgactgctggacaccggcaggaatgctgtccatgaacctcacagattccattcagatctcgggcgatctctgggaagactggcacatcgcccccacaaattgacaacatacaatggaggttattatatgcgtaatttcaactgcaagcgcctgatcgttatgatgatcgtagtcctggcgatggtctgcctgacggcgactacagcctttgccgcaggaaccggggatgtggccggcgcggtggagagcacctggaccactgcatccgcccagatcaaaacggtcgttgataatgtggtgtttcccgctatcgacctgatccttgcggtgttcttctttgccaaacttggcaccgcttattttgagtatcggaagtccggtcagtttgagtgggcggctccggccatcctctttgcctgcctggtgtttactctgacagctcccatgtatctctgggacattgtgggcatctaaggagggcattatgaactttttcgagcaagaacttcgcaaaattgttgctcccaaatacccggatgccacctatgtaggacgggcctgctatgtgcgcctgagcgagatgaatcgggcgaaaatcgaattcatcacaagcatcgtggcaaaccagtaccatgctcttcgccttaccattctgaaccgaagtgaagggcaggtagatattctgcttctcaagctttccgatattctcgggaaaaagcagaccaataatccgaacttccgagatggggtaagtcctcatatctgggatgactgcggaaaagcagagtggtatgtctaccatcccaacagccgggactaccagcagctcacggatgcagtgtccgcttatttggaggtgtttcaggagcagacccagactgctgacccccaatggcagcagtctatgtaagtaagtgacccaggggccgtaccagctgtacggcccctggccctttatcccaagcagttggtgcggcctcccccgaaaagaggtgaaccaactattgttcatttgggattttgttgccgatgctgttctcggtcaaatcgttgactggatctacggtcaggtcatgggcttcctcggaaacttctttgccgcgatgggaaacatgggcgtcgagttgttcgagatgagctgggtgcagagtatcgtgctgttcttttcgtacctggcttgggcgctctacggtacaggactggtggtagcctgctttgaatgcgggatcgaatactcctccggcagagggaatgtcaaggagatcgccctcaacgccatcaagggctttatggcggttagcctgtttaccgtagtgccggttcggctttatgagctctccgtcacgctgcaggccagtctcacagcgggaattaccggatatgggacctccgtaggcggagtcgcaaccgagatcgtcgacagcctcagcggtattgactccctcacaggtatggcatccggctcatactttgggattgcatccatcaccagcccaatcatgcttttattctgcatcatcctgatggcctatgcagtgataaaggttttctttgcaaacttgaagcgcggcggtatcctgctgattcaaattgcggtaggcagcctctatatgttcagcgtgccccgtggttatacagatggattcatccagtggtgcaagcagatcatcggcctgtgcctgaccgctttcctgcagtccaccattttgatagccggattgatggtatttaaagataacgcacttcttggccttggcctgatgctgtctgccggtgagatcccccgtatcgctggcgcttttggcctggatactaccacaagggcgaatattatgtctgcggtctacacggcccaggctgcggtcagcactacaaggaccatcgttcaggcggtcgccaaatgagaaggctgaccttgggcagcctgtttgacgggatcgggggattcccactggccgccattcacaacggcatcattcctgtgtgggccagtgaaattgaagcgttccccatagaggtgacacggcttcgattccctgatatggtccatgtgggagatatcacacagcttgatggtgcggagctgccgccggtggacatcatctgcggcggctctccctgtcaggatttgtctgtggccggaaaccgtgccggtctctccggtgcgcgctccggcctgtttatggaacaggtcagacttgtaaaggagatgagaaatgcagaacgattacgaaacagatcagctctcgatatacgacctcgattcatggtgtgggaaaatgtgccaggagccttctccagcggtgatcccaagggagaggatttccggatcgtcctcgaggagatcgtccgaattaaagtcggtggtgtttcagtccctcgacctggcaccgggcgctgggaatctgctgggcgaatcgtattgggaactgatttctccctggcgtggcgatgcattgacgctcaatactggggtgtcccccagagaagaaaaagaatcttccttgtcgcagattttgcaggacgatccgccggacaaatactatttgaccaggaaagcctgcctgggtatcctgcgccgggcccttgaacgtgggaaagagctccccaaaaagctcaaacgggcgctggagatccaatccggcgtcgctccaccggacggtggtgtgaccaatctggaagcgtaccatatcaaccagagggatgaaggcatcaacctgcacggagtgtccggcgccctgatggccaccaacaatatgcaaatgcagacctttgtcacacagccagacaagggtgatgtggaagggtttgatgggtataacggtgacttgaccggcgatgttgcggcaacgctcggtgtaaactgcggaatgtccacggggcgaaacggcctgctccagccgattgcgtttgcggcaaatcagagagatgaagtccgggatctgcatgatgtggcaggagccttgggcgcccaaccgggaatgaagcagcaaaccttcattgcggagggagtggtggcgaagggcaatggggattgttttctgacgccggagcgccacacatcgctgagcgccgggggcggtcaggccggacaaggctacccctgcgtcctgactgccggtttctctgccggggccggagcgtctgccggaagcattggttatggtgaagagctcgctcccacgctaaagggcagcgctggtgggagctgtatgccctcggttttgtgtctcaatgaccagggcggcagcgtcatggaatgcagtgaaaatgtgacaggtacactccgagcccaggaacacggacaccagccgctggtctatgagaaccatggcatcgactcccgctacaccggcccccaccgtgtcgcgcctactatgtccgcacggtatggtaccggcggcaataatgtgccattggtggagcaggagccggtgttttgcatcaccggcaacgccattgaccggcagccccaaaatggtgggaacggcattggctatcaggcggacatctcctataccttgactgccaccgatcatcatgcggtattcagcaggcagcgggtggatgtattcaaggacggtgaagtagtcagcacccagagtgcccgtcagcacaaggacgctacggatcttgttctgcaaggagcaagccggccaaagctgattcgcagactgaccccactggagtgtgagcgcctccagggcttcccggacaattggacagccatcccaaacgcctcggactcagcgcgctacaaagcactgggcaatagtgttgccattccatgcgtggactatgttcttttcggcatcgctctggtactgatggcatcctaagcacacttcgattctctttaatttgtccagtgaatggctattatctgcttatttccttttagaaacgaacaagacgagaggccagcccaaacaggccagtctctcgtctatacttaactcaacaaattgctttttctcacaaacagcaaagctgtcatgcatgtattcacggtcagtttactgcgtggtgtattttagaaatacatccatcagctccctgttgatgagatactcgcaggtttcaccgccgtcgcaggtcaccgtctcagattcctcagtagcattgctccactggaactccgttcctcctaccaccggcattagtgtcaggtgattgggaaccgcattatacaactcgcagtagcaccagccgatgttctgttccgtgagcatttgcagaactgtgtcgtggtaggcaaccaccacatcattggcccaattcacattggcgccgaagataccaaactcactgaccatgaagcctacaccgtattgagcggcgatgtcctgataaggctggacgtccacacggtagatttcggtgccgtcaatcatccggccctcgctgttggtgtaggtgccgttatcccggacaatcagaggaaggggctcgctgcggtcagggtaatcggcattgtcgtgaggtaccatgaccacctcgcccatggcaccgctgaccaggatggtatcgattttggcgtagccgccctcagaaacctggatttgcaccacggaagtcccctggggcagggtcaccgtatgaagttgctcaaaatactgaaaagtgccgtcctccattggaatgccgccagagagcactactgtttccaccggtgccccatcggcacggatcgaaatttccgtaccctccatcccgtcccagacatggagagacagctctgcatcagagagatcgccctgaatcaccagcggtacggccccgtcttgtaccatgcccatggggaaccaaggctggggccaggtgggtatagcatggggattctcctgagagtactcaaagccagttgtggcaatgtactgggggtaataggggtggcaaccaatgccaactcccagagaagcgaccgtctccacccagtctacattggggttccccggaaaagcgtggagcagaacacgctgggcatccgccatcctgatagaggagaccagctcgctcagcttgccttctgcataggagaaatcgtcctcctccccaggctggatttcgttgctgaggtcaaaggtcaggtatcgacttggaattcctgcgtaccgtcgtgccagcatagtccagtagtcctgcgccatggcccactcggcgtcgttggcagcaatggagtcatctgttttatcattgcctccttcatccagataaaaactcatggcgatctggatgtggacgccatattcaataccccaggcaatgagttgatccaggtcccgtagctcgttttcgttgatcagcctggcgttttccggatagtctggaaaccggagtgtggagaagctgaaaaagattcgggcaaaattgaaaccgttgtcggccaggaacttgatgtccgtctcccggaagtcggtgcagaaattgctgccgccgtcattcttgctgctgccaagaccggcgcccttccactctgaaggcagttgaacctgggttacctccggcagatcggtatctgcgctgagcagctcatcggtgagaatcgtcttatcataggttccaatctcggagagctgcacatacacgccctctggctcaagcgtggctggactcacttctcccagccgcaggacggcgcagatggcctcctcccgagtcagtgggtcctgaaggtgagcagactttccttcgaaatcgtagggataaatggcttggccgctgacctgggagatcagcaccgcgcaggtggtgaggccaccccacatataattgccaccgcaccattcaaagcctgtctcctcccagccggagaatagtggatagtcccaggtgggcgcatcattgttgctgtccagttgctccataacggcgtcgatatccagatggtagaagtcctccggtgcggtcgtccctaagagagccatggcgtaggctgtggccaagatgccatcctcccgccgcatttcctcatcggactcggcggcttgggagatgctcccctcccattctcccagacgagtttcatcccagatgcagatgagattcgtcagcatctgacagtactgttggaaagtaatgaccgtaccatagtctccctggatttcctccggcaccagtccatgagaaatagcacggttaatttcatctgccactccatctgcgctctggcctgtttctgcgggcgtgcccatagaactgtccggagtagttctccctgcacaagcgacaagggaagcaagcattgtacctacaagcaatatcgcaatcagttgtttcatacgcaagtctcctttgtggcaagtggaatactgataagcagattatacattgtcatcccagatgcttcaaggcgctgttttctccagctctttattttcaccagaagattactttatgttaacttacaggcatttctggaaaatcaaatcattttattacacttgcttcgattatgcttgcttctttgttagattctgtgaatagctatttgtcattggatacagtatgctttgcttacaaaaaaacggaaaggagaacgctccatggaagcgaaaaagaatctctgtgcagtgattcccgcagatcttcatgcaaaagtcattgccgagaaagagcagttagcgctgaataccctgggcgaatatgtggaactggtactcaaagaacacttcgaaggaggaagaacgatcatggcagcaacgaaaactctggcgtttcagatctctgaggaactggaccagcggctgaagaacttcatcgccgccgaaaagcatcgcggtcggaagatcagccagaaggagttcgtcatcgggctcatcgagcaggcgctggccgaatatgaggcgcaaaacctgaccgaagaagcaaccgaagaataagatatcgcacagacgccggggaatgtaccccggcgttttttcttggaggtgaactatcttgtatatctatcctgataatctgactgccaaagcgatgctgtggctttgggaactcaaggatatcggagtcattggcgtgggcctgttgctctctgtcctggcactctcccagactggaatttttattccgctggtcctgacagcggtctatgccttcctcagcatccgctttgacggtaccagcattctggactttattcgatatgcggtggccttcctgatcaccaagcaacaattctatgattggagaatgtgatatgaactacaacgaaaccatgttcagttctgcacctcttcccattggtgaggatgcaggatatgaagaaaaggatctgtccgcttctctcacgcttcggtggagccagaaacgccggcgctgggagtgtgacgatgcatatttttggcacgagccgcaaggcaagtggtgctgccgcagtgagaacggaagatactatcatggcttccgcagtctgcggaccctgctgaaaagctatgtgggtgggcgcttgtgtgaaagcttctgctgctacagcgcaaggaatgtccgggcaaaatactggttcagccagtatcccaagacggtgacctgccgtgtcaccatccactgcaccggccttttcccgatgtgcctttccgaaggagggatcgagggatgaacagaaagaaaaaagataagtccgcccagtctacccagcagcttatggggatcgacagcgtcaaagactactgcatcgccactcgcatgggcgacctggtattcttcatcatcaagcccaccaacatcagcgtcctgccggactccagcatcagcgccagaatctacgctctgctgaatgtggtcaagggtcaggctgagatcgaaatgctcgcgctcaactccaaggaatcctttgagcggaacaagaccttctaccaggagcggcacaactgtgaggagcttcctgccatacgcaagcttctggagcaggacagcacgcacctggaccgcattcaggtcctgatggcctccagccgggagttttatatcattattcggctgcggaaggaaaaggagacggatgtgtttccgtacctcagccgcatcgagcagagcatcaatgacaacggatttaccacccggcgagctgccgagcaggatctcaagcggatgctgggcgtctacttcgagcagaatgtgaccaccgagcagtacgaggacttcgacggtgaccgctgggtcattgtgggcgaataaaaggagggcagccatggcaaagaaacgagtaacttccacacccgtgagccgcgaggagacgaacatcaagtcttttcttgacatgatcgcaccttccgtggtcagcttcatgccggatcattatatctgcggaagcacctaccgctgcgtctgggcgcttcgcgagtatcctaccagcacggacgagcaggccatccttcgccatctgggcgaaaaggatgggatcactctgcggatctatacccggcaggtcacaccggcagaggaaaagcgcatcatccagaacgcggccaacaaaaaccgtatgaacagctccaataccaatgacctgcagcagacgatcaccgccgagagcaacctgcaggatgtggccacactggtggccaccatgcaccgcaatcgagagccattgctccactgcgcggtctatatcgagctgactgcctcggactacaacaccctcaagctgctccagaccgatgtattgacggaactggtacgaagcaaattgaatgttgacaagcttctactccgccagcagcagggcttccgctgtgtcaatcccagcggtcacaatgccttcggtgtccaattcgagcgagtgctgcccgcctccagcgtggcaaacctctatcccttcaactactccggcaagctggaccccaaagggttttacattggaaaagacaaatacggcagcaacatcctggtggacttcgaccagcgggacgaggacaagacctctgccaacatcctgatcctgggcaactctggtcagggcaaatcctacctcatgaagctgctcatcctgaacctactggagtccggcaaagccatcatcaccctggatgccgaacacgaacagcaggaaatgtgcgaagcggtgggcggctgctttgccgaccttatggccggacagtacatcatcaatgtactggaacccaagtgctgggatgatggtggtgaccccaacgcaaccgatgcgccggaggcctttcgcaaaagcaccctgctggcccagcacatctccttcctgaaggacttcttccgagcctataaggatttcagcgacgcacatatcgataccattgagatcatgctgtccaagctgtatcagaagttcggcatcaccgagcgcaccaacttcagccggatgcgtccggaggactatcccattctctccgacctttacgacctcatcgagcaggaattcaaaaactacgatgccggtcagcaccagctctataccgaaaaactcctacaagaggtgcttctgggcctgcactccatgtgcaagggagccgacgctcagttcttcaatggacacaccaacatcacctccagccgctttctggtgttcggagtgaaagggatgctcagtgcggcaaaaaatgtacgcaacgccatgctcttcaacgtgctgtccttcatgtccgacaaacttctgaccgtgggcaataccgtggcagctctggacgagctgtatatctggctgtccaatcccaccgccatcgagtacatccgcaactgcctgaaacgtgtgagaaagaaggaatccgccatgcttctggccagtcagaatctggaggacttcgaccaggagggcgtccgtgagatgacaaaacccctgttcagcatccctcctcaccagttcctgttcaacgccggttccatcgacaagcgttcctacatggatatgcttcagctggaggagtcggagtacaacctcatcaagtttccccagcggggtgtctgtctgtataagtgcggcaatgaacgatacctgctggaggttcacgctccggcctacaaagcgaagctcttcggatcggcaggtggtcgctgatggctctttctgctgccgctgtggcgaaagctgccgctatgctcctcaccaatgaaaagacccgaaaaggtgtgggctggattctggtggcaatcttttcgccggtcattctattgatcgctcttctctgcgccattggctccggcggcgcagaacacaacaactattcggtggaggcgtgcttctacgggggtgagttttccagcgatgttcctgcggaatttcagtatcacattgaggagatgcgctcggctttttctcttctggattcggcggtgtcctctgtcaacgaacagatggacagcagcaacggccttgaccctatccgtgtcaaggccgttttttatgccctctgctttggggcggacgctccatccgcgagtgctgcagacagctttgtggagtgcttctacaccacagaaacccggacacgaactgtggaagtaactctggaggatggaaccacaagtacagaggaagaagcatataccgtcgctgtaccagtctcgctgtaccaggcatacgccaatctggaggcgcacttaggcagaacgatcacaaaggatgataaaagcaacatcgaccacatctataccatgatcgcagggagcgctggaggcggcagttacgatggcgagtatctccgaggtggcggagccagcatcgacctggacatctccaccttcaccgatccctccactaagaatgcagcagaccttgcgatctatgccacccacgcttgggagtccggctggggttatgtctgggggacatacggcaatgtcctcactgactcgctcttcgcttacaagctggagcagtatccggacggcgtgggtacctacgcagatttcatccgggctaactggctgggcggccggacaacagactgtgtaggactgatcaaaggctatggctggctcgaccctgaaacattgaccatcggatatgctaccaatggtatgcctgacctgggcgccaaccagatgtactactctgcatcggtgtccggtcccattgaaaccatgccggacacccccggtctggctgtctggcatgacggacacattggtgtttatatcggtgacggttatgtgatcgaggccatgaacacgaaaaaaggagtggtgaaaacgaagctggagggccggggctggacgcactggctggagatcgaatacatcaactacgactgagaaaggatgtgcctatgaaacaagtgaatctgaccatcaccttcgatgaggagaagctctcggcgctcaagcgctacatgagcaagaaagagcttgacctggaccgtgagatgacggacgcgctggtgaagctctatgagaaatatgtgcccgctccggtgcgtgagtatatcgacgagagcgatgtgaccgctgctgcccccagcaagccccgccgcaattcgagaattaccacgccgaaacctgaagcggagccggagccggaggtggttcaatgaacagtaagaaggagctgaaaaagcggatcagtgcggattatgaacgccgcgtcaaacagtggatggcttccgacccttcgcagctgatcgatgctgccgaggagatcaccgcggcacggttgatccgggacaatattgaggatgccatcactgaggaggatgccaatttccttctggagctggatgaccctctggatgatttgacagcgcgctggatcgctgagaatgggctggaggcttcccatagtgaggaactgctccgctgcgtctggacgcttcgggaggagcagaccaatacagcagttccatgcacggttcatgccttcctgtctactcatccgggatctgtcttttctttgatgacgccctgcgggtttgtacccctgaccgcttctcaggccgaagggcttctgaacggccaaggggccgccgcacatccaggagtctccggcatagagatggcactctccgccgatgagatccttaagcagaccattcatagtgccaactacgccaacggtgtgtggcatcttctgaccgactttccggagatggaatacagcggtccggagatgggaggtatgcaatgaggagccgtgatatcacactctggctggacgagcgatggtacgacgctctgagcaaacacctgaaaggcgaaacgctggaggagcatctgcagaataccatcgatgagatgtgccgccagcttcctgagcaggagtatgaccgcatcaacgctgagatccagcaagagcagcaggacgatcagaaagcacgagaagctgcccgacgctttgcagtgttccatgtcacggaaggcggcagctccacctatctcctggctgaagaacatctggagttccttcaaactgcccgacgccttcgcagctatatccgcaaggcagacggtgatgcccctgcacatttcacaaaaatgttccctctcagagagaacttgtcccgcgagcagttcgaaagatatgtgtcggagcggctggacaacaccggccgggtggtgggtgcctacgacatcgaccttgacagcggcgatatggaagccgtcagcatcatggatggctggaagcggttcaaaatccgggatgtgagcaccgccgcctactttgccatgaagaaaggaaatgccgcgtcggatgaaaggtggcggatcttcctggaccgtctggaggagggagcgctcatccaggagccggaaccggaatacctcaccggcagccggcgactcagcgccgaggacatctccttcgccgaggacattattcagaatggcaacctgctggagttctacatggaagtatcgttcaatgcggacgaggtgttcgggaccaatgtctgcaccgcagagaatgatgactggctgaacatctacgccaactacgatctggaccgagcctgcgtctgcgacacgctggaagtattcctgcagtgcggcaatggcgatgagctggacttcaaatatcggctcagcccggaggaacaagctctgttccttcccaagatgaacacctactgtcaggagcattgggggcagagtttggaggagtgttgtgcggattatctggtagagcaaagtccggcatccccggagatgcagatgtagcgccgtgttgccccctgtgagccgctgtgtgcggctttcagcggctggccgaccgagtaccccgacccagagaagtatgcgggatttgggccgctttccgaggaagcgggaagccgacaaaagtgaagcaggagaaagagccggggacaagccgcccccggctctcccacttctgcccgcagtgcgggcagtttcaggctttttgcgccggggacaatggggagagcggaaatagctgttggaccctatgatgcggaaatcgcttactgttgcaggggttctcagcggtgacaccaggaaaaaaaggagtgaatgacctgatgactgaaaacagcaagatcaagaagggcttctggctctccgaggatctggacgaaaaaatcgacatctatctgcgcctcgataactgctccagtcggagcgagtttgttgagcaggcgctccggttttacatcggatatctgaacacgaagaacgccggcgcctttctgcccgaaacactctctgccatgatgaccggcacactggactactatgcaggacgcatcggctcgatcctgttcaagcaaggtgtggatctcaatgtgctgggacagatcatcgcctacgacaccgatatcgacgaaggcgaataccagcgtctgcgcggaaaagccatccgggatatgaagcacaccaacggacgcatctcgttcaaggatgcactggacttccagaagtcggtgtaactcatggtaaagctcgtacaaaaaagcggctacattcaatcagctaaagccggcgggtacatgaagtacatcgctacccgtgagggcgtggagatgctgaccggcaacggtcctgttaccaatagccagcaggagctgatccaaaagctgctccatgacttccctgatgctgcggagctgttcgagtacgaggactaccgcaagaccccgaccctgggaactgcctctgcatttatcaccatggcgctggatgcaaatctccatgagatgaactcggagagcggatacttgtcctacattgccacccgtcctcgtgtggagcgtcacggcgcacatggtctgttcagttctgcaacagcagtcgaccttgatgcggctatggctgaattgggggcccacgaagggaatgtgtggaccatcatctactccctgcgccgtgaagatgctgcccgtctggaatatgacaatgcagacgcatggcgcaccctgctcatgatgcactcacaggatctggccaaggccatgaaaatatctgcggatcacttccgctggtatgcagccttccacaatgaggggcatcacccgcacatccacatgatggtctggtcagatgatccgaaggaaggctttctgaccaaagacggcattgcggccatgcgctccaaactgaccaacacgatcttccgggatgagatgactcagatctatgaacggaaggatgttgcctacaaagagttggtcgaaacagcccaggacaccatgcgggagctgatccgcaagatgaatcatcagctctgcgacaatcccgtcattgaggagcagatgagtcaactggttcaggcactggaaaccaccaccgggaaaaagcaatacggctacctgaagaagccgctgaaagcactggtggatggcatcgtggatgagttggcccggcagccggaagtggcgcagtgctatgaaacctggaatcagatccgggatgagctgaacgagtgctacggcagccgcacaccgcgagagcatctcccgctttctcagcaaaaggagtttcgcagaatcaaaaacgatatcattcgggaggccgagagcatccgtctcggcctccccacttttgaagatgaagcaatggacgacgaacctgagccggaacaacgatcatcacatgaggaacagagttccaactgcatatatgaacaggctcgccggtatcgcgccgccaaagaggttctgcagaatgtctatgctctggatgaagaacacgcagaagcggttcgggagttggagcagctctgggcagagggatatacggtggcagcccaccaactgggtaagttctatcgggatgacctcgccactctgcgtgatcacgaaaaagcagagaagtggtttcgcctatccgcagagtccgggaacatcttctcagaatacgcccttggaaaattactgctttctcagaagcggacagaggaggcagtgcgctggctggacaaggccgcggagcatgggagccagtttgctcaataccgcatgggaaagctctacctcactggtggatctgtgcccaggaatgtggtaaaggctgtggagcatctgacttctgccgccaaacagggaaaccagttcgcacagtatacactgggtaaactgtacctcctgggccgggatgtgaagcaggatcgggagcaggccagagagtggtttacccgctccgctgcccagggtaaccagtatgctcaattcctcctcgaccgcttcgatcagttccgtgacccttccgtgatgctggcagcgaccaaactgctccaccacatgggcaggatcttccggaacaattctgttcctccccataacccggccggaatccgtattgattccaaacggcgcaggcgattgatggagaaacgcatggccatgggccataaggctgacgaccacgaggaacagctgtcgtatcagcagaccatgtaacaggagggatctatgtcgacttatattcactttacagaagaagaaaagcagcgagccgcctccgttgatttggaggagttcctgcgctgccatggtgaaaagcttcttgcctccggcagagagaaacggctggccagggatcacagcgtcactgtccgcggcaacgagtggtacgaccacgccgaagaacggggtggtcatgcagtcagctttgtgcagcgcttctataacctcagctaccccgaagcggtgaccatgctgttggggggcgaagcgggtaccatctacccatccgctgctgagcgggtggaggagccgcccaagccttttgttctgccgccgatccattccgatatgcgtagggtctatgcctatctggtcaagcaccgaaacattgaccgaagtgtggtaacccacttcgccagggaaaagcttctgtacgaagatgccgaataccacaatgcagtatttgtaggcacagacgaagaaggcatcccacgccacgcccacaagcggagtaccaacagctacggcaaagccttccggctcaatgtggagggttgtgatccccattacagctttcaccatataggcacagacgagagcctctatgtattcgaggcgcccattgatatgctctcctacatcacgctctgtccagaggattggcagcgccacagctatgtagcctgctgtggcacctctatcctgccggtaatgaagatgctggagagaatgccgcagatccacaccgtgctgctctgtctggacaacgacgaggctggccgcttggccaaccagcgcatgaaggcccagctggaagcgaactacacggtagaacggctcgttccggagaacaaggattggaacgatgacctgaccgccattagagaacaggaatgcgaggtgaaggtatcatgccagagttttgggtaaccatgttcaaacagctcggagaatcaaaagcggcgctcttgattctggccggcgctggaatgtttcttgtcattggaggccttgcggccctgtcccattgctacaccctgagcggcatcaagtccaggacagtgggcgatggccagcacggcaccgcaagatgggccactgcaaaggagatcaagcggacctatgcccatgtcccgttcagggtcagggagtggcgcagcggccacaactgccccgcagagcaggggctggtgctgggatgcaaagggaaaaagggggaactcaccgctctggtggacagcgacgatatccattgtctcatgatcggtgcgtctggtatcggcaagaccgctttctttctgtatcccaacctggaatatgcctgtgccagcggcatgagctggctggcgctggacagcaaaggcgacctcgcccgcaattacggaaccattgccaaggagtgctatgggtacaatgtctccgttatcgacctgcgaaaccccacccgctcggatggtaataatctgctgacgctggtcaaccgatacatggacatcgcccgtaaagaaccgaggaatctggcagctcgtgccaaggcagaaaaatacgccaagatcctgtccaagaccatcgtcaacccggacggcgatgagagcaatcgtggccagaacgccttcttctacgatgccgccgaaggtctgctcacctcggtcatcctgatgctggccgagtttcttcctcctgacaaggaccatccccaggagcgccgccatatcgtctccgtattcaagctggtgcaggatctgctggagccaagcggcatcaaaggcaagagccacttccagctcctgatggggaaattaccaccgaaccataaagcgcggtggtttgccggtgctgcactcaacagcgcagagcaggccatggcgtccgtcatgtccacggtactgtcccggctgaatgcctttctggacagtgagctggagcagatcctgtgcttcgacagcgccattgacgctgaacgattcgcctctgagaagtccgccatctttctgatccttccggaagaagatacgaccaaaaactttatggccggtctcatgatccagaacctgagccgggaactgtttgctgtggccgatgaaaacggcggcaagctgaaaaatcgggtggtattattttgcgatgaatttggcacgatgcccccgtttgatattctcccccttttctcagctggacgatctcgccggttaacgctcgtacccatcatccagtccttagcgcagcttgaaaaaaactatggaaaggagggctgcgagatcattcaggacaactgccaggacaccatcttcggcggcttcgcccccaacagccagactgcggaggtgctgtccaaagctctgggcagccgcaccgtcctctccggctccgtgagccggggcaagaacgatcccagccagagcctacagatgatggagcgagccttgctgacccctgatgaattgaaatccattcccaagggaagctttatcgtcatgaaaaccggcactcatcctatgcgaacccggcttcggctcttcctggattggggcattaagtttggagcgccatacaccgtgccggaacgagcgaaccgaactgtggactacgccaaccgtgtggatctggagcgcaatctcccgaaagctgataaagctgaggaagcagccgagcaccatgcttacgccgtatcgggatacggggggatgtcgcatgaccctgtgcaggaaaaagcaaaaaaatatggcaaaagcataaagtcgatggaaggagaaaatacatgagctactttggaaccatttatgctgataccgaactgccctccagagcgagggcagtttatatgtacctgcgagaccgcgcagatgctgaggggaaatgctggcccggcatcaagaccatcgcgtcagatatgaagctctccagaaccacagtcaagagggcgctccacgacctggaacagcacggttacttaaaaaaggcttaccgttatagaccaaacggaagcagcacctccaatctctatactgtgaaataaagaaaagtggtttgtaccaaaatgtagtacaaaccactttctaaaaatgcaaattatgagatctccacgtcaagggggaactgcgcccatttggtggacccaggggcggttcaatatggacctcccagaaggactcactctaactgagatttagtacagagaaaagaactatctctcactgcatgcctatacagtgtatcacaccgaaatctgcaatatgccttcaaccgtgtaatccaaacagtaagtaattctctatatacgcgacttttccttttcattttcaaagcatatgattgtgtctgtcacaccggtatgctatactaaaaaacaaagtaagcaatttgtcacaacagaaatgcgaggaatgttgctgtgagaaaaatttcctataaaagattgtgggttcagcttattgagagagatataagccggccgaccttaaagcgggatgtgaatctttcctctggaacgatgtgcaagctcaacaagggggaggatgtctccctctcggtcctcctgcgcatttgcgattatttgaactgcgatataggtgacatctgcgaagctgtgcgagaggactaattccttccatttttcgtacagtttttctgttttaatggggattatacttacacggaggttttaatatggccgataaaactacgagcaatattgggtttgaaaagcagatttgggatgccgcctgtgtgttgcggggaaatatcgatgcttctgagtacaagtctgttgttctgggattgatttttttaaaatatatctcggatcgatttgaggcaaagtatagggaactggttgatgaaggcgatggattcgaagaggacatcgatgagtacatctcggaaaacatctttttcgtgccagagaatgcccgctggggtgtcattgccagctcagcgcacacaccggaaatcggaacagtaattgatgaggcaatgcgcagtattgagaaggagaacaagcgcctcaaggatatcctccccaagaattttgcccggccggaactggacaagcgtcgcttaggggaagtggttgatctatttaccaacattcagatgattgagcacggggatagcaaggatatcctggggcgcacctacgaatactgcttatctaaatttgccgagcaggaaggtaagctggctggggagttttatactccctcctgtgtagtacgtactctggttgaagttttgcagccgttcaatggtcgagtttacgatccttgttgcggttctggcggtatgtttgtacagtccgcaaagtttgtagagaaccatggcggaaacatcaatcggatttccgtttttggtcaggactccaacccgaccacttggaaaatggcgcagatgaatcttgccatacgaggaattgaagccgacctcggcaagtttaatgcggacactttcttcaatgactgccacccgcagctcaaggcggatttcattatggcaaatccgcccttcaatctttccggttgggggcaggataaacttctggatgatgtccgctggcagtatggcactcccccggctgggaatgccaactttgcatggttgcagcacatgatctggcatctcgcaccgaacgggcggattggtatggtgcttgcgaatggctcactatcttctcagtctggcggtgagggcgagatccgaaagaacatcatcaacgctgaccttgtggactgtattgtcgctatgccgtcccagctcttctacacaacacagattccagtgtcgctctggttccttgccaagaacaaaaagcaaaagggcaagacgctgttcattgacgcacgaaagctcggcacgatggtcacacgaaagctgcgagagctgaccgacgcggacatccagaggattgcggacacctacaacgcatttgttgacggaactcttgaagatgaaaagggcttctgtgctgttgtacccactcaggatattgccaagcaggactacatcctcacgccaggacgctatgttggtatcgaggagcaggaagatgatggagagccatttgaggaaaagatgagccggttgacctctgaactgtccgagctgtttgcaaaatcccatgcacttgaggtcgaaatcaaggagagattgggggcgattggatatgaattataaaacctaccccatctctgatttgatagacgaaatagcaatggggccgtttggttcaaatataaaagtcgattgctttgttgataaaggcatccccgttctcaacggcagcaatcttgagggatttgaactgtcagagaagtccttccgctatgttaccgaggaaaaggctgattcactaaaaaaggccaacgcacataaaggtgatgttgtaattactcaccggggaacacttggacagattgtttacattcctcagactgcgcaaagggagcgatatgtaatctcgcaatctcagtttcgcgtcaagtgtaataagaagattttgccggagtattttgtttactactttcatacaccgattggacagcataaacttcttagcaatgcttcacaagtaggtgttcccgccttggcacgcccctcttcaacttttcagaagatcgagatagagatacctgatcttgaaacgcagaagaaggtggttaagctaatcggctctttgcagacgaagataacaacaaattccgagataaacgataatttagcagcttagagttggatggcggaaacatcaatttcgccgttcatcagcttcggcaaaagactatctcgcagctgtttgagcctgtcattttcaatggcattgcattttatctgttcaaacataggtgaaacaataccttggtactcggctatctcttcggcattaggtaaaaccagttcaaaagcaaaggtatcagagatggcgtagtcctttgcctactgcctgtcgatccagtaacatgactacacataaaatctgaaaacgaagcgctgtcaataaccgaatataagaaatccgtgatttcttgacttttggccttatagacaatgaactcagttgagcagacggcattttcagttaggcaataaggtttccagacgcgctttgttatcggattcagcttagaaatcataaagcaggagtcatcgacgataaacttgttgctcttaatcgcggtcgatggctcaaacacaggaaaatgcgcctcatcaaaagcagggatgctgtaatgctcaagtaacatttccggctgtttggctggattgaagctctttttggagatggttgccacatcgccgagccgtacaatgcgccagccaacgggtaatttgtcgcgatctactgtttcaaaccgctcgtggtatagcagctcggcttgccgcgctaaattatcgtttaccgcctcattaactctcatcagtggcgagagtcacttcaaaggaactgccactgttcatcgttctcttaaacacaaaggagaacgacgatgaaagaacaacttatccaagagatacagcgcaaaatgctgccgtatctcaataatgaacaactattacagttgggtaatgctttgactgagacgctacgaggtgtgagtgtaagttatgaagataccaccccaaagcaggaagaacgggatgccgtcgaagcgttcattactgccaagcgcattgagggttgctccgagaagaccttgaaatattaccggaagacgattgaatccatgctgtctgccatcgctaagaatgccagtcagataacaacggaagaccttcgcaaatacctgaccacctaccagacgcagcgcaggtccagcaaggtgacgattgacaacatccggcgcatactgtccagctttttctcatggcttgaggatgaagatttcatcctgaaaagtccagtacggcggattcacaaggtgaagacggcaaagttggtcaaagacacctacacggacgaggcgttagagctgatgcgggatagctgcacgactacaagggatttagcaatgattgacctactcgcttcctctggaatgcgtgttggagagatggtcatgctgaaccgagaggacatcgacttcaacgagcgggaatgtgttgtgatcggcaaaggcaacaaggagcgccttgtctacttcgatgcaaggacaaaaatccatttgcagaactacctcaacgagcgcacggatgcaaacccggcactgtttgtctcgctgaaagtcccgcacgaccggcttatgatcggcggtgtggaaacaaggcttcgagagctgggaaagcgattaaacctaccaaaggtacatccgcataaatttaggcggacattggcaacatcggccatagacaagggaatgcccatagagcaagtccagcagctcttagggcatcagaagatcgataccaccatgcactatgcgatggtgaagcaacaaaatgtgaagctggcgcacagaaaatacatcggataggatggtgaatatgaatagacattttctaagagatatagcagacatccagacgggaccttttgggagtcagcttcacaaagaggactatgtagatattggaacgcccattgtaacagtcgagcatttgggaaacagaattttcactgaacagaacctaccaaaagtatctgatgaggacaaggctcgcctatcaaagtatgtcttgaaagaaggagacattgtatttagtcgagttggatcagttgatagatgctcttatgtggatgacgcgcacgatggctggatgttctctggacggtgtttgagagtgcgtcctaacacagaagtagatccgctatatctctactactttttctgcttggaagatacaaaacaattcgtgaggaatatagcggtgggcgcgacaatgccgtcaatcaatacaaagttgcttggagaggttgaagtagtttacccatcacagagagaacagcagaaaattgtcgcattactttctgcattagatgacaaaattgaaatcaaccagaagataaacgataatttacagcagcaagcgcaagccatttatgcttcgatgttcgttgataatgctgaaccaacatggaaacaaggccatttgtctgatttcgtaatcgttagatatggcaaagaccataaaaagctggctgatggcatttatccagtatatggctcaggaggcattatgcgtcatgttgagcgccctttatatgataaggagtcagttcttataccaagaaaaggcactctgaacaatgtgatgtatgttaatcagcctttctggtctgttgatactatgttctacaccgaaatgcgactgcccgatgtggctaagttcgtatatcactttgtaaaagccaaagaccttgcagctatgaatgctggctctgctgttccaagcatgacaacagacatcctaaatgcaatggaaatcgccattcctcctgcaactgtccttgaagaatttgaatcgttggttgcacctatgtatagagccatgcagggaaacgatgctcaatcaaaaaaacttgccgacctgcgcaatgcattgttacccaagctgatgagcggcgagatcgatgtctctgacatccagctctaagccgctaaattatcgtttatcgcccttgtcgccaatcgagcgaccacttgccgcccagaacgcggtatgattagattagaaaatgggaggtatgtgcaatggatatacaagaaacaattagccgcgccagaaaagaatacaaggattatctgcgcgggaagcaccctgaatgggcagaaagcactctcagcacccatgtttctgatgccttctacctgtatcagaatactattgccctctccttctggaagtgctttgaaaacgacgagtcgatggcagcggcaaagcaggatatactcgaatatctgaaacatgatgtgatgtcagaacgcgccgaagaacgcacagccggttatttcaacgatctcaagatgctcaaagagttcctggacaccaaaggcggtgtgagagcctatgtggggccggagtacgattgcgaagtgaccgtttataagtatgcaaagatggcttatgatggggcgatttcttccgatgacgctgttgcggccatgtgcaaagaagttccgtttttcggggaaacatcccacaagcttatggtcatgctgtttgcgtccatgatggagggaacaaggtacacccgccggggcaatacggaaacgacgatctattacatcgtccatatcgggcaggactatggcaaggagcgcatgaccaatgccttaaaagcaacccatgaaaatataacctactactacgagcagaccggaaacaagtcgaacagcatccgccggggctgcacgaaagtaaccaaggacaacaatattgatatggatttcagcgagaaaatgtttgagggcattatcccgaaggaatcctctgatactgccctcacggtcgatgacaccgtcgtccggtattggctgtatgctgctggcgatggctcggtcaactgggaaaacgattatgctgagggcattatggctattggctgggatgacatgggcgatctcatgcagtacagctccaaggaagaaatgagagctaagatgcgggaagtctatggagggacaaactcgtataaaaatcaagttcatgcgacatggcagtttgcaaacgacattaaacccggcgacatcatcttcgtcaaaaaaggcagaaaagaaatcattggcagaggcgttgttgaaggtgagtatgtatatgattccacccgcgagcactactgtaacacccgcaccgtccgatggactgacaaagggttgtgggaacatcctgagcagttggcaatgaagaccctgaccgatgtaacgccttataccgattttgtgaagaagacgcaaagcctttttgacggagaaagcgcagatgttgctatccaagatgaggatgaagaagaacggacatacgatccatatactgccgacgatttcctgcatgatgtgttcatggatgaagaccgttacaacatcctcaaggctcttttgctgacaaaaaagaatgtgatccttcaaggcgcaccgggcgttggcaaaacttttgcggcaaagagactggcttattctatcatgggtgagaaagacacaaaccgtgttaagatggtgcagttccatcagagttacagctacgaagactttatcatgggcttccggcccacggaaacaggcttcgagttgaagaaaggcgttttctatgagttctgccgcaaggctgcagaggacgatcgcccctatttcttcatcattgacgagatcaaccggggcaacttgagcaaaattttcggcgagctgtttatgctcattgaaagcgataagcgaggagttgagttgcagcttctctatgcgtacgagcagttctccatcccaagcaatgtttacatcatcggcatgatgaatacagcagaccgtagccttgccatgctggattatgcgctgcgccgccgctttgcgttctttgagatgacaccggcgttcaactcatccggtttcagggcatacagggcgaagatcaacaatccgaagttcgaccgcctgattgccacggtggagcagcttaacgatgtaatcgcgagtgatgattcgctgggcgaaggattctgcgtcggccatagttatttctgtacgaacgccacagtcacagatgattggatgaagtccgtagtagagtttgagttgatcccgctgcttaaagaatattggtttgatgaagccgcgaaagtcaaggattggagccgtactctccgtgaggtggtcaaatgattcccattcgcaacatctactatatgctggcctatgcgttccaagttttgcacgagcaaggctataaggatgttgccgctgaggatttccgaaacaccgcagagctgctggccgctatcctatgcaaaggtgtgtctgttcagattaagcggggcttatgcagacagtacataactaaggaagaaccgctggcttctccaagaggaaagctggaaattggagaatccatcaaaacccaagtccttcgtaaaaaacagatcgtctgcacctatgacgagttttcggttaatgcctatacaaatcgcattatcaaaacgacaatggccgtcctgctccgtgcagatatttcaaaggcgaggaagaaggaaatccgcaagctgcttgtcttcttcgatggcgtagatactttggacgctcataacatcaactggaacatccaatatgaccgcaataatcagacctatcggatgatgattgaattatgccggtttgttctgaacggactgctgcaaacgaccgcagacggatctacccgtatcatggattatgcggatgacatgacaatggcaaagctgtatgagaaattcatactgggctactatcagcgggagcacccggacatccgtgcgtattccccacaaatcgcttggcaagtgacagatgggtgcagaacgcttctgcctaccatgcagtccgacatcgtgctttcaaacaaaagagccggaaagacgcttattatcgacgcaaagttctacacgcacaatatgcagatgaaagcaccctatatgacgcaaacgctccactcagggaatttgtaccagattttcacctatgtcaagaactgggatacagcgcccggagaaacggtagcagggatgcttctatacgccaagacagatgatgccgttcagccggatggagattaccagatgagcggcaatcagatcagcgtaaaaacgcttgatatgaactgcgagttcgctgtgatcgcaggacagcttgacacgattgcggaaagggttagatgataacacagcagatcgaacaagggagcaatggaaatggcaggatattacacagaatcaaattacgagaatgcagttctccaattactcaacgaagggctgggctacacctatgtctacggaccggatatagagcgtgattatcattccccgctctatgaggatgttttgttgcccgctttgcagcgcatcaatacgggcttgcctttggatgctatcaacgaggctgtttacaagctcaagaattttgagtccggctcactgctgcaaaagaacatgaccttttccgactatctgcaaaacggtatctctgtaaaatactttgtaaatggcgaggaacgctccaccctcgtctaccttgttgatttcaaaaatcccgccaataacgactttaccgttgctaaccagtggactttcatcgaaaattccgagaaacgccctgatgtcattctcttcatcaatggtcttccccttgtcgtagtagagctgaaatctccctcccgcgaagagacagacgcttccgacgcataccgccagctccgcaactatatgtacgagatcccctccatgtttatttacaatgaggtctgtgtcatgagcgacatgactacctcaaaggctggaaccatcacctccggtgaagaccgcttcatggagtggaaaacaacggatggcagctatgagaacacacagtacgcggcctttgacaccttctttgagggactgtttgagaagaaccgtttcctcgacatcctgaaaaactttatctgcttcaatgtggacggcgagaagacattcaaagtgcttgccgcctaccatcagtatttcgccgtcaagaaggcggttgcttccacccaaaaggcaaccgtcacggatggcaaaggcggcgtgttctggcacacgcagggcagcggaaaatcgttgtctatggtgttttatgctcactatctgcaagaagcattggaaagcccgacaatcgttgtgatcacagaccgcaatgacttggatgaccagctctacggccagttcgcccgctgcaaggacttcctgcgccaaacgccgcagcacgcccaaagccgaacccacctgaaagaactgcttgcaaaccgtcaggcaaacggcatcatcttcacaaccatgcagaaatttgaggaaagtgatgagcctctttctgatcgtcggaatatcatcgtcatggcggatgaggcacaccgcagccaatacggattaacggagaaggttgtagtccgtcagaaagaagatggtgaagtcgaggcaaagaccattatcggtaccgcccgtattatccgtgatagccttccgaacgctacatacatcggcttcaccggtactcccatctcttctaaagatcggagcacccgtgaggtgttcggtgattatatcgacatttatgatatgactcaggcagttgaggacggagcgaccagaccggtttactatgaaagccgcgtcatccatctcaagcttgatgaaaagacgctgcatcttattgacgatgagtatgacctgatggcagagaatgccgatccttatgttatcgaaaagagcaaaaaggaacttggccagatggaggcaattctgggggctgaccagacgatccgttctctggtagacgatattctcgaccattacgaaaactatcgcgccaatattctgaccgggaaggcgatgattgttgcctactcccgccccatcgccatgaagatatacaagcggattttggagcttcgtccagcttggacggaaaaggtcgcagttgtcatgacgcagggcaacaacgatcctgaagaatggcgtgaagtaatcggcaataaggctcacaaagaagatatggcgagaaagttcaaagacaacaactcgccgcttaaaattgctatcgttgtggatatgtggctaacgggctttgatgttccgtcccttgccacaatgtatgtctataagccgatggccggtcacaacctcatgcaggctatcgctcgtgtcaaccgcgttttcaaggacaaggaaggcggcttggttgttgactatgtgggtatcgctgccgccctgaaacaggccatgaatgactacacagcgcgggacaagaagaattacggcgacacggatgtcagcaaggctgcatatccgaagttccttgagaaactgtccgtgtgccgtgacctattctatggttataactacgataagttcatgaccggaaccgatcttgataaggcgaagacgattacaggtggcgtaaactttatccttggtaaaagcgttgcggaacaagaccttcctgacaaagagaaaacacagaatatctacatcaaggaggctttgctgctcaaacaggcactttcgctgtgcggtagcttggtggatgagaaaacacgacttgaagctgcattctttgaatcgctcagaacaatgattgttcgacttctgtccggaggaaccggcaagaagtttaccctcccggaagtgaatgagcggatcaatgagctgctgaaacacagcatcaagagcgagggcgtaatcaacctcttctcggatgtaaagacggagttttctctgttcgatccgaagtttcttgaagagattgccaatatgaaggagaaaaaccttgcggttgaactcttgaaaaagctgattgccgaacaggtgtcggtttaccgacgaaccaatatcgtcaaatcagagaagttttctgaacttattcagggtgcaatgaaccgctacctgaatggaatgctgacgaacgaggaagtgattcaggagcttttgaagctggcaaaagaaatcgctgatgcaaacgcggagggtgaaaagttgggattgaatgccgacgagcttgcattctacgatgctctgaccaagccgcaagcgatcaaagatttttacgaacacgatgaactaattgccattaccaaagagctgaccgatcttcttcgtaaaaaccggacgattgattggcagaagaaagaaagtgcaagagccggtatgcggcgtttggttaagcgattgctcaagaaacataaatacccgccggaggggatggacgatgccgtccagactgtcatgagtcagtgtgagatgtggacggacaatgtgatgaccgtctaagaatacagagcagacaacaattttacgatgctatgttcttaccagcgcataagaaaatgaggtcgaatatggatcattatttcggtttcaacacacctgaaagtcgaaaaaagcagagaaaagctgccctaacagaaatcggagaaaaagcaacgaattttttctgggatgtcgccccggaatacggctttgaaatgcgcgaagggcaacaagatatgtcctttgaaatagtggacgctctcatccacaaccaacattttgctgtcgaggccggtgttgggattggaaagtctttcggctacttggtgcctgtcctgctttataacaaaaagctaaataaaccggtgattgtcgctacctcaacgattgccctccaggaacagctctggaatgatgttcacgatgttatgtcccttctgaaaacaaatccagaggtcattcttgcaaagggccagacgcactatctttgccataagcgagcaaaggagcaccttgaaacggagaatgctgtcattccgaaagaacttgccgaaggcatagagcaaggcttccaagagcgcaagcagttcatggcaaccataccgcaaaatatctgggacaaagtaaatatccagcgttttagtatgcggaattgtggctcctgtgataagaaatgcctctattatgacatccgctctcaactaagatacactgatggaattgtgctgtgtaatcaggatttcttgactgcgcatctccgtcaactacggcgtggacaggacggtttgatcaaccgtgaagctgacctgatcgttgtggatgaggcacacaacttggatgataaggtgcgaagtgcaacaacggagcgcgtcagtcagggaaggattcttggtcttatcagaagcgcagccgatgaagttaagccctctgaccggcaaaatattctcaaagagaccgagacagcacagaaggcggtctactcattctttgactgcctcaaggtacagatgcagcagcaaatcaatacggcgcaacaggatatgcgctatgctgagcgcttcttctttgacgggagcgaggaatccttagcgcttttggaagcaatgatcgaagccgtcaagagtgtggctctcagcattcaggtctattccagcttcgagtataataatcggtcaacagcggcatcggatgagctggacgaattgagtgaaacccttgcggaaatgattgcagaagtggatgactaccttctctggatagaacgcaagggaagtcaatctgagcttgtctattgcccgaagaatacccgagagattaccaaccgtctgtattttagcggaagtgcccggacaattcttacctcagcaacgctgacgaatgcgacggagggaagccttgaagaacagtatgcctatttcatcagcaataccggatttccaacagatgagcatggctgtctctcagagccgaagccctctccttatccttatgacgagcactccatgatttattactgcgacgatctgccgcatcccaccaaagaacatgaggcattcatagaacagggagtgcagcggctactcgaagttcttgacatatccggcggcaaagccttggttctctttacggccaagaccgacatggaagaggtatattccatcctgagtcagaaggaattgccgtataaagttctgatgcagcagccgggttcatctcaggatcaagtgcttaacgagtttaaggaagataccaactcggtgctgctcggaaccggcgcatattgggaaggcatcagcattgagggtaagagcctatcgaatgtagtgattttccggttgccattccctgttcctgatcctattatcgagtacaaagcatctatcgcgaaagatccgctgatggatgtgcgcgtcccggaaatggtaatcaagctcaaacagggtattggcagattgatccgcaactttacggatacagggattgtctgcattattgaccgaagattgagagatgcgccagcagagagataccatgatattgcgtgggcatccctccccatcaaaaaccgcacaaaagaccttggagaacttagacgcttttacgagagccttccggctgcacacaacgaaacagaggggtaatctcacatggaagtccaagaggctgttggtgctgctatcgccaatgaagacaaaatcatatacaaggatagcacctacgagctggtctccaaggtggcctatctgatcggcgttcctcggcacatatttgaaaatgagcatgaagcgccccaaatggaagttttcgagcggctggaagcggataaggctgctcgtattatccggcatctgagcatcatccgaactgccattgagcgaaacttccggcacatcaacagcgcaatgaggatcgattaccgaacaatcctttccatgccagagtatgtgccagcagacagtctgcatcagctgagtgcggacgggatcaactttataaagaaatccagcacaaagctcgtccaccatgttatcgagatcaaccggctgatttcggaccgaatcaacaactgtaagaaactgtttcctctctggattagctgggactatatcaaggacctgtttatcatgcccaacggcttgaaggaggaagggaccagacaggctgcttacctctattacgccaatcgctcctattacccctatcaggtgtatatcaactgggtgccgcaggatgaaggcaatgtcctctataatgacaagaaatttgcggtgctgctgtatcaatggcacaatgactacttccgcgagttcagcaaagtctctgatgtcagcagctatgtcaaaggcagcatctatgagtacatcgaaggcagcgagaagacggttgtagtggtggactgcgaaaactccgatccgtacaagctatgcgctgttttgagaaaccttgactataaatacacgcagaagatttcgagcatcattctctttgatgacattcatactgcctctgcgtggcgtatcctcgaagattttaccaagataccggtggagcatattctgattgagcgggtcaaagaaagcaaatcccttgtagacatcaagctgactgcacgagcctgtcaggaacactatatcaacaaggtggattctttcatcatcgtttccagcgactctgactactggggactgatttcctcgctgccggacgctcgctttctgatgatgattgagcacgaaaaaagcggcccggatttgaaggctgcactggtcaataccggtatcttctactgctacatagatgacttttaatccgggaatgctgacgaactgaaatttggcgcacttattaaagagatgtaccggtatatagacagcgcagtccatctaaatgtcaatgaaatgttctcagccgctctaaaagcgacccgcattgagatgagcgacgcggagaaaaaacaattcatggcgcagcatatacgaaccatgcagatgtccattgcgccggatggcgaagtcgttatagaatttatattaaattttcaaaatatagttgtatatttttttctgtgcagttattatataaatactattttatgattctgttctttatagggggggaagatatggcacgaaaagcctattctgaagaagatagagtgcaagtgcggaatgccctgatgaccaccatgattcagtgtatcgcggatcggggattgattcacagcagtattgatgttctgtgcagaaaagtagggatctccaagaccttcttctacagttttttctcatccaaagaagaactggtgctctacgccctgcgataccaacagcccaagctgctggattatgccagatccctaatggaggaccccggactcagttggcgggcgggagtggaaacctttctgaaaaactgctgttatggagctaaaagcggagttgccgttttgtccattgaggaggagcagcaagtacgccactgcctttccgaggagaattttcaggcgttccggcgggatcagattattttttatgggaagctgctttccatctttagcctccctgtggacagtattgatccccggctgtttggcaatctggccctcagcatgatgatggtacacaaagccattccagacaccatgccatttctattcccagaggtggcggaggatatggtggacttccaggtcagggctctggtggacgagatggagcgggtaaaagagcatgtgcggtaggtgaaagcaaatggatagagatgagtacccatgtccaaacggacgggaaagacagcagaatatcgtcagacacagagccttgggatacaggtcttggttctgtgcggccttttcgcgccctgcgtcagcctgtccaagtggcagggtgtcgcagggcgtttttctatcatctgaaaggagtcgaaaaatatgagtctgaaatatacctgtcccggctgtgggacccctttgggctatgacggattgtgctggaaatgcaagtgtgagcaagagcgaaaaactgcattggcctggacgccggaacagattgctgcaaagcagaaaaacctgatccagaacatccatcggcttgctgatatggaggaccccgaatgcaccgacttctggcagctgctgggttaccgggacgccatcaccccggaaatccagcgggcggcgctggccgcaggggtgttctggccctgtgagatctattatcacgctcccgctgatgtgggggagggcctgatccacgcgctgctgtccacagaggattccagtgaagcgtccaacctgatgtgctgccttgctttccagggcgatggccgggcactggaaacgctgttggaactggagaatcatccccgctcctggcgcaagaagctctatgtagacccgtccatttacgcccagtgcggcggctggacctttaataaaaagggacaacggacccaactcaacttcgatacctgcttttccttcgtcaagggagcccccggtgaagtgtcccccgttcgcatcgggcgggcacgggaggacacctgtccccactgcggcgggcggatggcggacatgctggtgctggacggccgggacgagcggctgaagtttctggggctggacggcattctgaccgccacctgctgtcccaactgcgtgggctttctgaaaggccccgctttcaaccgctttactctggacggcggcgtagaggtctttccctcagagctctttgacggggcgggaaagatggactgctatgtccggccggaggactacaggtcccttaccgaaaatcccttcgtgctgggcggtgcgccagtgcccctgttctatggcgccgcctgtgacgatgtgaacaccgttggcggctttgccaactgggttcaggactgggaatacaccgcctgcccccactgcggaaagcccatgaaatatctggcccagatccagtgggatactttgatggacggcacagagggcacactctacatcgagttctgccctgactgccagatcgtatccatgcagcaccagcagacctgataggaggaaatcgctatgaatttgccaaagttcaacagtgcggacgggcgctgttactggatgaagcccgaggtacaggaagaactgcaaccgctctttgaccagtgtatccaggatgccattgacgggagaatcacgcggcttgatgattcccactggccgccggtagtggtcagcagtcaaggtgcaccctttgaggtgtggcaactgcttagggcatggaccgaaatacagcgggccgagaccctggatgcggaaaaggccatcgccttcagcgaaaacctgcgccgccagagccgctggggtgaaattgaccaccatctacttgatatgctgaaacgggagctacaagagaagtattttgttgcaacaggcgatgaagatgatcgcttctgggatcgggagtattccttgaaaccaggcatccgtgcagagcagatcccggagccgctgctgcgtttcgcctgctatgtggcggtgagctataaagtgtatggcttggactttcagtatctggacgccaattacctctttggattggtggagaaagtccgtcctgatatggtgaaaaagctccgggaacacgggaccggcaggctgccgctctctctgcaaaagaggaaaacagagcacttcaccgcatcggccaacgatgcctttgctgtgatccgtattactgccagggacaacacagaggaatgctgccacgaagtgctggactacctgtgtgagattctggagcaggaggactttccccgcagctatgcggtggagttcaaagggccggaaaagagctatcttcccatcacaggactgcccaaaaagggagtaaaccagctctttgcctgtgccgtgcagtaccctggcctccaccccctgatggaacggtacgcccggcttgccatgcggcaatatgagcagtacaccaatctcagcgatgagcagtgcgcgctccccggaagttttgccgtgttcgccctgggaatgctggggcaagaatggtggcaactggtatgggattatctcgatctctgcgatgatgagcactcccacttacaggaaaaattcctccgggagtatgtgaaacagttcggatttaccgctgataccgtccctgtatttgtccgtggggtgctgtccatgcagaacatgaagtattccaaggactatgccgcgtggatggcaaacgcagaaagcctggacgctctgctggaggcaaaaatccacctgtccgagatcgttccaagcggtttttcctctgacgaggatgacgatgatgacgagggcgaggaacccgccgaagaaacagaagccagcccggaggaagtgctgcaatacgcatgggaaacggtctgctatgtgatctggggcaaagccagcgccaagggtggtcagaaagtggtggaagcagctccggaggaactgagagaaaggtatcaggaaatttttcaatagactataaggaggactcggatgagtgaagtaagctattcaaatgtacctcccatgatggctgccatcaaaagtggtgacatagaggcgattcgttccctgcttcacgcagggcattctcccaatgagccacaatgctatcaggtaatgattggagattggccgcgggatgacgaagcctttccgctggaattggctgtactggaaaatcggatggacatggtacagctcctgatcgaatgcggagcagatttgacccataacccggaagaattgctttgtggttccctgcgcagtcaagacctaaccctgttttcctttttggtagatgtgggagtcagaatccccgcaacgcaaagggatatatgcaggctgtttctccacttggtggatcgggatgagcctaatgtactccccattttgaaaaggatgggcatggatttgaaacaatacggcggtgaagccctgcgcagtatggcgagccatggaaatcagctgctggtggagtatctgattcaaaacggggcggacatcaactatcacaagccagatatggtgtttccctacgcttcgactcctgtcactgaagcggcacggcacaacgatttttctatggtgcgctggctggtggagcagggggccgacatcaccatcccggataaatacggcgaccggccctacaccgtggcggtgcagaacaaaaatcaggaaatggccgcctacttaaaagccctggagccggagggctggcataacgaacaggaaaaggtgcgtcagctcatgccttacaagctgcctgccaagctggtggaatatttgaaaaccggccccctgcgcctggaatttccggagcgggagctggtgaaatgggcggagctttacccctacatggatgtgcaggagatgacctggaaacgaaaaaagctgctctcccttatggcgaaaatggacaattacagcgactatttgctgctgtggagtcccagagataagaaactctggtatctggacatcgagcatgaggagtttcatccgttagccagatgggaggaatttatcgctgaccccggaaaatatctcaatggaatgatcgagggcgagtttgaggaataaggggagaacgcaatatgactatggaacaactgccccccaagggggtcaagcgagaacaggccattttggagttgggcaaggctgaagccaacggcgaactgcttctccagcttgtgaatatggaaaagggcaagtgcaagacggctgctcagaaggctctggcgcagctggagtatgcccccgccgccccactgtgggccaagctggtcaagggtaaatggatgggcagccatatcatggcggacgcctgttccgactgcgtgtcggagcagatcgccccggccatcttaaagaccctctcccggctgctggacgagggggacacaaagcccctggaaatcgaacagttgaacttctgtctccatctgatgatggggaaagcctcgctcaaaatgctggaggtctaccgcttcctggcagaaaacgcccagcggctcgcccggcttaaacgcgcgcctgtttatccggatgacgactgcacctcttggtggattacggacggacttcgcatttgggatgccacacccagggaaaaagagaaaattcccgctgtggtgctgaccgcctccctgatccgcaacccggatgagcggctgcaggcattggcggatgagctgaacgaacgctgcggcggcagctggctgatcccggtctttatgaaggcgattctcacccagcccaaggagcaggtgtatgagacctattcgccccttttggggactccaaaggcgagctatctgttgaacgccctggggctgctggattaccgcagctatccggaggactgggcctttgaacgctcgggtcccgacgggctgcgcgccctgattttctggggtgattacagctatgggacctatgacacaaggtttacgattgaacgctatgtggagctggatgagcggtggctctttgctctggcaaaagacccggagggcaaaaagcccgcggtgacatggcagacctataaccggggcggtgtgctatacgggagctacgacgaaatgctcatcagcctgctgccccgcaaagtggagaacccagaactcaggcgcgccctgcgggactacttccgtattcgcagcgaaaaagtgagcgtggaagaaagtattactgtttacaaagacgctgctgagcggtttggcggtgagtgagaaaaaaatatcaagaaggcaagtgcctgaactgtgaactacgaagaaaggaagacacaaaatgaaaacctttgatcccgattacaaactgctggacgagatgtatcaggatgattactatccagtttttctggtagacaaggtaaaggacgaactccagaaggtcatcgacctgctggagagcggcgaaaccgacaccgaagtggtgcaggaaaagctggacgaagcagtttgcggcatcaatgacctccaggacgaattttacgagaacaacagtgagattgaaacggtagcccgggactgcatcggcgtcactgtagactacattttgaagtggtttggcattccgattgacatggaggaggctatccgggaacgggactggtgacttttatgaaaatggagccctctttttgcacggcggtcttttggcgtggcggagaaaagattgatctaaatggacaaaaaccagatgcggtacggtgtctgtctgtgacgggagagcggaaggtgaatctgtccttcctgcgagattatcccaatctggaggaactgaccctgatggaaaagtgtgagggtgtagaagttctctccgagctaaagcagcttcatacactgtccctatggctgtcggcccctgtttcctgggacaatgtttctctccccggcctgcgtgttctccacctgcgtggagaaaagaatggcgacatcaccccacttctcaccagcattacctatctccatttggaggaaatgcggaaaacggaagatcttgcccctttcctgactccggcgacccggcttcagaaactctatctccagtcactcccagctgtgcaggaactaccggctctggatgggcttccttccctttatgccctgaaactctatgaactgcataaactaaacgatttgtccgccctctcccacagccatttgcgctgctttgccgcctctctgatcggggataaactctccgcccaggcgctggcagatgctgtgatggcgattcccaatctggaggcagccgcgctccagctggcggatcgctccgagcggcgctatggcggcatccaaaaagcctttgccgccgctgggaaatcctcattgctgcgggaggaaatcagtgctttgaccacatggctgtcgctatgatgtaggaaatgggaaaaggagaaactacctatggcagagttcaaacaaatcatagatgatgcgctggacattctgaaatttgacggagccgtacaggacactctggcggaactgcgagaaaaatggggcgcgcaggtcccggcgctgctggatgaacgctttgatgccgttggcgttcagtatatgaagctatcccatgaaaaaggggcggcggcattggggcaggagctgtctgccttcggctgggcgctgtataacctggatgatgaggacgagtatctgtttgccttgatcccagaggaagaacgcagcgaatgggaacgctactgcaaaaagcaggggcaatattgccacctgatgaaacagcaagggcgaaaatggggcgaccatgccaaggagcaggaccctggaaagctaatgccctgcgaggaatacatacttcaggatgagtacgattatttcttcaattccgtagcgggtgattttgcggcgggcgaatggaaaaaccaggatgcagaagaatggaaaaacggctgtgtggccgatctgcgccagcgtccgccccaggtgacccgcgcccacagcttgccgcaccttgggtgcctcacttattccgcagaaaatggactctatgccacgtccagggccgctggcagcgggactattggccgagcattattgagcaagaatccagccacgcttaactgggccgaaccgtcccccattggatatgacggtccaccccagaccctgtgctgggctgaccattccctctgggtgggtgatcccaccaacgctacacggattgaactgacagaccggggcgcctgcaaggatgtgaaaaactggactctgccggaagatggatggagcaccaaataccattgcggcattacgacagacggtctgggccgggtctacttttccaacgagtggtacaaggggcagatttaccgctgggaaaacggcaaggtaacaaaacacaccttctctctggatggatacgaccatctctccgaggccgttcccgttcccggcacaggccgcattaccatgatccacgccgtcagcggcaaggggcggatggaagaatgcctgctggaactggacatggacaccgggcggtgccgcatcgcccccctgcccggaatgggcgaggggctgaaactgcgctggtttaccggggactggctgctggtgcagggaaacggcgcaatcctctccgatgactttgctcagctcatcaataggaacacccgtgaggtgctgcgtatccgtccgggaatgttcggcggggagaaaatgcagcacattggaatactcaccgatggcacggtggtcatcgtcacccggcgggatagggttgggccggtgtttcgttatcccatcgacttctgggacttcctgcggacggcaaacaagcccaaaaagctggaatggcgggagtacaaagaagtgtacccgaatctgcccatctttctaccgcccaagaccacggagcgaaaaattgttcttaagaaagacagcctgaccattctgggggcggtatttacaccgccgtttaccctgtcgcggctggcggaaaagctagggcctgcccgcattgtcttacaaaatggaacacggaaaagccccatgactggccaggagagcccttatacccaggcacttgctttgtgggacgagcttggactacagggctggttggacgaagatgagcagaccatcaaaaccattggtgtccgggtagcggcacagggagagtatgcggtccggcagacatttgacggagcggtttggatcgggtccaaggactaccgagaggccagctggaaggatttcgccggatttgcccataccctcaaattaggcggctttaccgtctatacccgcttgccgggtcctgttccagaggagcaatcagcgcagaaagcaaagctggaggccctctccgccatggtacagatcagctggaaagagccagagaataaggcggcgaaagcgcagaaatacgagttatccaagccgactgaaccagtgctcacctttaccagcttcaacttcaagctggcggttatggaagtcctgatgtacgagaaaggcttactggctcctaaactggatgcccatgagttttccagagagtatagccgacgcaagatcgacattgacgcggaagggtatgaacctattccggagattcggaagtggctggagaaataccctgtcccggcgcggctggctccagagattacagagatcgagatggatggcggcagcgagatttatacccaactctgtccgttctgggatggcgaggatggagcctttgatcttaataccattacggaggcggaactgcgccagttccccaatctcaaacatattaccctcatgtcctccaagccggaacaggtgctgcccgttctggaacggtgcggtatcaaggtagacttgctgtgaggtgcgctgctatgaacgaaaaactatttcgcccacaatttgataccttgaaactggccgataagctctggcttatgcagacgctggcgactcgttatcatttgacattcaaggaactatacgccttttcccgctggggacaaagctgcaccaccggcctatttgaaaaaggtggccgggagtttgtctttgtcccgggcgataccgtgattcttggctgggagagttttgtccaaggaatggacaaggccaaccaagaggaactggcggatatttttgcggaaatcgaatatgagggctctgcggaggaatttctcaggcagggcatgaccccagtacgccaggtgaccatcgcccccatgttcgtgggcagaaaactggaggaaattggctgggaaagcgtacccatgaacgatccacgcatcaccgcccaccccgactggctggagaacttgcagaagtgggcgggccagaacagccagagctttgaaatacacgaaactgtccgctttgaacgcaatggtgatagctggcgagcgtggctgtgccatccaatgacctacccggaatttcagcggtccctgttgtgggagctggcagccagccttcccacgccggatgagtgggcctatctgtgcgggggcggatgccgcaccctgtttccctggggggatggactggaccacaagatgaaactgcaccactttgaaaacggggaagatcagggtaagccatacgacatggagcagcccaacttctttggcctgtctatcgcctacgacccctataagcgggagttggtagacgggaaaacattgaccacctgcggcggcgacggcggctgcaatgtctgcggtggcatgggtcctttgcttggatatttaccctgttcccctcactgtaaaccggaggttcgggaggataatgagattcacaatgactatgactttttccgtcctgttatccgggtgcagacatccgggtggagaatagtatcacccgaaaatgagaggtgatattgatgaaaagccgattggagcaattattggacgagctattaagacaaattgatatacctgcgatggagcaagccatgtccaagcagtataagagccagatccgcagacgctgggaacttccggcagactattggatgctgttggagcgctgctgtggactgcgaaccgtgtggagcaatgatacctatgaggccctggaactgtggggactggatacccttgtgaagggccaggagggatacgcctataatcctgtggaacaaaaggtaattaaaaattgggacgagcatcttgtggtgattgcgtctgatgctggtgatccatactgcctggacctgcgacggaacgatacagccgtgttctgggcagaacatggcgccggaacttgggactttcagcctgcctttgattgtttggaagattttctcgaaagcgttttggatgtacccaaaacgcaggaatatgaaacagcatatccctatcactacatccgcctgattgtaaccgggatttccgacaccaaaaaggctctggtgtttctaaaacagcattttggcgacagcagctttcagcagacaaaagacaggctgaaagaactgccgctcttgatctattccggtcttgataccggaaccgccccgctggaaaactctcttgaccgctggggattgatgtacgaaaagcagcagatttcgttggaaaagtttctggaaaatcaagcatatatccgcaatctgtaaggtcgaagctgcgttgtgcaggtgcgattcatcggcattggagcccgctaaagacaatccaaatgagcaaagtacacaatgatgtgatttttggaggaagtcatgatcaaagcaattatgaaaatccataccacttcttcttcggttacatttgtatgtggcgatgttgctattattggaaacggtgagtttcgggcttcatcaggaaaagtggatggctttatcctgtatgccgacactttacagtatgaaaacggggcgaagctctcacgggatgaacaggaaaatttgaagtgcctgtatcagcactttgtattgaaccgtgaagatttcatagactgggatatttgaaaagagatttccccatgaaatgttagcagattgagcacaggagtaaggaggaaagctatggaatggccaaaacgggcgcggacagcggattgggaaaatggtgtcctggccttagatagagagaaacaatttgaagtcccgaagctgaccgcagagatcatggagcggttggccggttacaccctggtgggcttccatgtgaaagggtatccggtgacggatgaactgcttgccccctttgccgggcataaaagtatggtcaacttcggcgtggagaacggcgccctcaccgacgcctgtttcccctttttttccgccatgcccaagctgcgctatctgctgctgaccgggaatgccgggatcgacggaagcggcttgtccgccctgcaaagctgtaagctggatctactggcccttgaccacaccaggctggaggatgccggtctgcttcgagcagcctccatccccaaactctcccacatctggatcgaccacactgctgttacttatgatggactactggctgtcgccggcaacaactacatccatccggtggcccatgtgcaatttaccaaggagcagatggaacacttctcccagctccagcgggaaaaggccaaaaagcccgtccagctggatgagcaggcagcgtcggaatgccgcaatgtgttgtccgctttctttgccgaaatgacagaatgggagcagtacatggatcaggttgggtttgaagatgccgaggctgtgccccgcctgctggcgatctgggagaagtatgtgagcgaaaagccccgtctgggctaccggcctctggccctctcatacagcgcccagggcacctacaacggggaagaattccttgacgcggaacagatcactaagaacaagctctacatctacaccagagagaaaaataccagctttgaccgccgctttctcatgaagcgcgtgggcgagggttggatgattgacgcggtgcaggagcggctggacggctggcaacggacaggattgtaagggaggcataatggatgatatataggtttacggaagtattaaacgatcttgttaattattttctccttggtgacattttgttgctggaggactggaagcaggcaaatcatctttcagatgatttaacgatggagtttaccacaaacgaaagcggcgacagggtatttgacgaaggaattgtaatcccaatggccggtattgaaaactatccctataccatattgttcaatctctctggtgatagaccggagctgtgcaaagaaagaaaccgattgcaacttagaaaaagtggctattccctcaaagtagatcataatatgctgatgctttttacatggccaatattggaacagtttacgcctgaaaaggtgaaagatctgatttcttactatagagtgcataagaagccgatgattgagcttgcaaatggctggtatcatatcgagattttgggtggagaaaccttgcaggatggggactatgaacctacatttgagtttgtgatacaaccagccacaaatgaagaagtcaccataaatgcagatatgaattttagctttgaaattacaagctctgcttattagtgaaacctatccctaccgaagatggaaaaggagattatgatatggatttattgaaacaatgccagcaatggtttgaacaggatgaagcgcagaaggtaatcgacaccctggaagcgattcctgccgaggagcgcaccccggaactggacagtgagctggccaaggcatatattgccgttgcacatataggagaacgggagccttttgaaaaggcgctggaacttctggctccccatgaggagcattttgccgaagatcactgctggaattatcggatcgcttccgcttattattttctggatgaggaaggtcccgccctgcgttactttgaaaaggccctgaaagcccgccccggagacaaagatacccaagagtacatagacgattgccgccgtcgtttgtccctgccccgctttgaaaagaacttccgtgaaaggacgcaggaaggatgggcagccttttctcagattgaggcagaactgcgtcaaatcatagaaactgacgaaacgcaccagcgcggcgaagaactggttgaaaaatgcgggaatgcgctcaaaacggccctgcgtgatacttcttttgagctgggcttcaatggcgaaaagtatgaattgatcctcagtccagagggccttcgctcccgcctgttcccgttggtgtacttccagaagcaggccccagaatcggtgcttgagcattggaatatctgggtaggccgccagccctgtgaggggttcgagctgcgggctggagagatcgaagttcgggctgatgatgtgcagatgtgggcagaggaaacagaggatcatcaggtaagtctggtcctttactgtgaaaagctgacgccgatcttgaaagaggacacagacaaggtctggtgggcactctctatgctggtggatcaaaccatcggagaagtttccgctatcgcctttgttgctgggtttgatgtttatgctcagccgaaagacgaaccggccaagctgctttctgaactgccggagttgctgcaaagcatgggactttctctctggcgggatggcagcgactacctggaaaacagttatcttgcctatgaactggaaccggtggaggacccggaggctgactggcggctggatgtttatactggaagctgccgcctgccggtgctcatcaacgactacctgactgcccgcagtgatatggtggatgagtaccacaaggatggcattgccgctggattcctcctgtacccgctgtccggttttaccggtgaggaacgagtgaaagctattctggatttccgggataacctgcgggatgccatcctacgggatgcaggagaggaagccgtgaccttcctgggtggggccactggtctgtattgtgggtatctggattttatcgcctgggatctgcccgctgtactaacagcggcacaggcattctttgagggaagcgacctgccctatgctcacttccacgcatttcggcgggatgtgggcggtgtgccgctactggacgagaaagaaccggagcctgatattcatgaggaaactggctccctgctctcgacagaggatattgaaatactggagtcctttgacgaaggaactgccgcttactttgggaaaatgctcgactggctggagaattttatcaaaagcggcgtagaagaaggacgattcagcgaaaaacaggctcaccaggatttacagattgccctctggtatgcctttgcctgccttaacctggacgattacatccactactaccgcgctgcggaatggatgaaggattcggagaaaaacgccacgggctgcgctacctggtactaccggtattctgtggcgttgatgtattgcggcaggctggaagaagcactggaatatgcggagcggggcgctctggaggagccggactacccctggatctggctccatctgggcaagctacgggcgcattttggcgataaatccggtgcgctggatgccgtcaagcaaggattaaaactggaaccgggagattatgagttcctgaccttaaaaaaagagatcaaagccggagccaccctggaacagatggaatatcattggatcaatcccgatgctgaccaaacgctccagcggggactggacgagaatgcggatgataaacaatgcgccatagcctgcattcgggtggacgaagcgggacttgccgaattttatgaactgttccacccagagcggtatagctataagaaaaattccccctgctgtgaattccaatacccggtgaaggaacatcttgtggagctttccttccgtatgaacgaagctggactctccaagatgggaaccgactggctgcggcagctcaaggaacggctggacagcggtgaatggctaacccacacccctgaaggagaaccagagggcattctaacaggtgtgtttgtggaccagacccgccgcattggtcttgtctatcaacagccgggagacgatcagtattttcagattttcctgaacccggacggcacgaaggcggatgccttctggtcctcaagaaaaaacagcgagccggaggtttattcggaggatgagatgtctgcgatagagcagcacatcaaaaacacctttggtgagtttgagaatgtgttccatgagctggtttcccctgacatccatgtggacatctgcgttgttcctccctctgatgagcgggactattacacactggtaacgatgggcatgggtgctcaccggatgaatgtgccggaggaactggcggaatacaagctggagcgagcagagctggccatcgctctgccaccggattggaaactggatgaggaatccctgaaggatgagcggtggtactggccgattggtctcttgaaagtgttggcacgcctgcctatttccaacgatacctggctgggctttggccacacaatggataagcaatcgccgtttgcagaggatacggaactctgcgccgcacttctggtaggtccgcaggatgttgtctggaacggaggtgaagtctgcactttgccgagcggcgaggaggtcaacttctatcaggtgatcccgctctatcggaatgagatggagtataagatggagcatgatgcggacgctctgcttaaaaaaatggcaggcatcagttttgtggttaatcccacccgccagaatgccatcaccagaggaacgcttgcagaggaagaattcaccggcgatatggacgatgccgcatggcacctggaatccattcaggaaaagggcttgccggtgaatgagatcaatgcctacaaccacatggcaatctatctgcgctggtgcatagagcatgatctgatgagcgcggaatttatggagcggtactgggagcaggtgcagccgtttatggcagatctgagccgcgccgatctgcgtggctttatccgggaccagctgaaaggacagctctttggggcgctgttcaacaaggagggcgcagcctttgctggatattactatggcgaggcggatagcccgtacttccccagcgacattgataactatgctttggagtatttcggttcagagcaatattattccgataagttccaggatgaagcctatctgttcatcccatttgatgaaaactattatcaggctatggcaaaagtcatggaaaagcggttcgccaactggcagggacagagtttcgatgaggccagtctggagccttcagaccttgcggaagccatgatggaatatctggactgtgaatgtacctatttcccctcaatgacggatgatgaccccatcatgtcggcatataactatgccaaacgggaaagtgtcaaagagggctttgtgccggttctgattaaggcggatgacgaaatcctgtgggaatgcctgattatgaattctgacccggacagcgatggcgaggacgactttgctttcgacccggacaaagtcgccgaataccggaagaaaatgctctccgcccctgtcgagaacagtaaggcagtcctggaggaaatgattgggcagcgcaaggaagaagccgaggatgacgatatggactgggatgaggaaatcctgggcgagatggagggcggatatgataaccgtcgtttttcaagctactggaattccgataataatatgacctatcctctcattctggctaaaatccccgtgaagaatccttgggagatttttgcctatctgccctttggtggctggaatgaatgtcctaacacgccagagttaatggcagttgcgaaatactggtttgaacagcatggggcggtgcccgctgccatgagccacgacgagttggagttcctgctcccggctcccgtttccgaggagaaggctatggatgcagcagtggaactgtatggcttctgtcccgatgtgattgaccaggggccggaggacgccaccgtgggcgctctggccgatgtgctgcggcagtccactgtttggtacttctggtgggattgacgggaggctactcaaatgacaacacagttgtatcttcaaaaagcagaaatgcagttatcaagaggacttgaggaaaaagccctggaaagtttgttgtcggcgcttgcctgtcaaaacagagataccgtcagcgaaactcaaacgcgctgccttttgggtgaatatcagttcgtccatcagcagtatgttcaggcgcaggagcagtttagctggatttctgaccgggctgagcagctggaacatgactatgatgacctactcaatgaggagattcgtgaagctgaggtgctgttagggatcatgcagagatttggattatgttctgagcgatgaagaaggaggtattgtcccaaaagtgttgcgtgatggacttgtgttcaaagatgaggatggtcaggtcatattcaaccagtacagcttctgcgaactggtgaagcacctgctggtggagctggtggggatctcttatgaggaagcctcccagatagtggaacgctcaccgttggcagcgccagtggacaatgccatggatgtggcgatattcagccatgacctgccttattactgggctatgttttcctactatgggaacggttattggtggggggacaagggtattccagcgcagccagaggatatggatgcctatttcgctttagaaaagcaaatcatggaaaaacaccacttaaaagagccttttgagtgggagtgaaaggacggattcagtgggatacgatgtgagttttcacccgatttcaccagaggaaatgcgggaatggtattttactcccttaacctggatacagcagggacaggaggaaaaagtgctggcccttgccgcgcagtatgggatggaggatttctatgccgaaaaatatctgaataccttgcgggttggggctgaaacggaagctgacgagctgtttgacaaaagccacggcttctatattgcagtaatccaaggttttttccgagattattattacaccagaggtagtgccttttcgttcctggtggaacaaaagccagaatatgcgcggtacttcacctcatgggaacaaatcactcctgtttcctttccaaaccccatgcagaaccgaatcatcgaaaactattgctccggtgtatatctgtctccagatcaagttatacaacttctcaaagacatggagcaggacccaaaagtccttgacgatctggaggggctttggagcaatggacagattgctgtgctgaaaaaagcactttctgctgctgcaaagtcaggagtcggtctgttggaggccactgaagtggtagagcccaaccccatcagcccgaatgagagcacaagctactctaacctgtaccactgtgatcgggacggggtatatctctacatagatgccgtcagtggtcaattagcggatgcgattgggaaaaacgaaggatagattctctctatgaaaatgtgtgggcatctgtgggaagaaccaaaataggcagctacccacaatattgattatcgcagaaaagctcaccgtttcggtgagcttttctgcaatatttcataatttttttattgctaccactggttgccgaattgacataggtggggtggtagagtggctaccacagaaaaaatagaatgaaagtgaggaggttcactatgaagttacccgaaaagattcaaagggaacgaaaaaagatgggactgtcccaggagaaactcgcagaaaaaataggagtatcaaggcaggccatcacaaaatgggagaacggcttggcatcccctgaactggaaaaaatcgtctcattaagtgaatgttttaaggtatctactgactatttgttaaaggacaatattaccgagccgaccccaccacaagaatctgcattgaaaggaaacaagcgaatgtcatggagaacgtggcttggaggaagtttgtttggaatatcggcgctgattatatttgtattatggcgactttctgttcgttttcctatttcgggaatgaccggaaacggtgtccatttaaccggatttagtggctttcttggctttcatggaattttacatgaaagctatgtaatagttgcgattggaataatcggtttgatacttgtgattactgactttatccgcataaaaaagaataatcgctgatgaccggacaatgcagagttgatcttaaactgaataggtttatttcggctcggcagcattgacctgtcggtagaaatacatatatttgaattaagaaagggagtgatgctgccggtgtgccgtccgtttgtatggacaggagtctgatgcactatgcaatacctcaagaagcgcattatgctgttccgctgtctttacgcaccacgacacacggcttacaagacaaagaaaatcatctttatatggaagtatggtggccgggagtattgttctaaaagcgaaaagcctccacctgccaaaagatgctttttctgcggactttttaataaacgacttggagcggtcgaatttgtactgagttacagattcggccgctttttgatttgttctcgactacttggtcactggtgtcgagcaccaccacttccgatttgttttccacaaaaaacaaatcggaggtaacagaggtgcaaaattatcgcaaaagcgactatgcgataaacaaaaacagcccaaatatcgtttatcgctttcataacgaaatcatagaaatcacactggaggattatctgaaggagaatcctgacaaaacggaacatgactttgcagagctgaaagccctgtccgatcaaatttactatgagcaggatcgggcagagagcgcccagacccgcaaggatgtttcgatccacggtttggaggaaacggagcattgtgccactcgcgctctggatgaagaatgggaagaacgagttgttgacatacagaaccgcaagtatgcctggaaagccctggagcagctttttacagtgggcgctttgaccgaggttcagaaacggcgattccggcttcatgtttttcagggactctctacccggcagatcggtcgcatggaagggacaagccatcaagccgttgccaagtccataaacctggcgattgccaaacttaaaaaatattttgcggcacagggttgacacccctgcggtttcaggacgataggtgaaaggcattctttcgagtgttcttctttcacctgtaccttgacaaccgcatactcattcatcagtaacatcccccctttccagctcgaagagctaaagccgattcaggggccgcgccatgatatacggacatgatgagcagatcccacctgattatcataattggtcttgcatacaatcctgtcctgtatgagcgagtaacggcagcctgtaaaaaccgggcagcacccggcgcggccatgaccggaaaggggcataatggtactcctgtccagccacagccctgcttaagatcagagtagtccataacatttggaaaccatctggttgcaggatcacgcaatgggggcagctcggagagatcctcggaggggtgagattcccgtgggccggttcgctgccggtcactgatgacttcccaatatgtgcggggtgtcaaggacaaatggcacataacaagaaaacaaatcggattttatatttcgccggaaatggggcaggtcttatggcctgccccgttttccggcttacttaatattcaggaggtcagtttatgcgaaaggctatccggcgtggcgatctgttctatgcagacctgaacccggtggtcggctccgagcaaggcggcatccgccctgtccttgttatccaaaatgatgtggggaatcactttagtcctaccgttgttgcagcagccatcaccagcagaaaagcgaagaacagtctgcctacccatatcctacttgagaatgtgccggggcttgcgcctacctctctgcttctgttggaacaactgcggacaatagaccggaagcggctccgtggttacattgggcgtatcagtaaagaaaaaatgctggaggtagatgcagccctggcaatcagcatcggcataggataccccaacgaaagactaactattaaaagtcaagcctgaaatgaatggattagcaaaaaattttagacggttcaaaaagagtatagcaaagctgacgtccgtttggacgcctgcttaaacttatgcaagagaaaagattaagcgacgctgttgtacggttgccgggatttctccatggcatagatcaaccgaaccaactttttggcggcgtgggaaagtgcgacgttgtaatgcttgccttctgcccgttttttagccaggtaggcctcgaaggttgaatcccaaaggcagacatatttagttgcgttgtaaagagcgtagcgcaagtatttggagcctcgcttctccatgtgtgagtacgtgccagacagcgaaagctgcccagattgataagtagacggcgacatgccggcataagcaagaatcttatccggtgaatcgaaacgcgagaaatcgccaatctcagccaggatcatagcgcccatgcggaaaccaattccggggatagttgtaatgggagactgcatttcttccattatggtctggatggcggattcaatgtcctcgatctcggtattcagttcccggatcaggcggatcgtatgctgcaattcaagagacttggcaggcataacagagccaacagaacatctggcggcatcccgaagttccgtggccatatctcgtccgtagcggcctttggatgcatcgtttaagagtgcctttaggtgagttagatgagctctggcaatctgtttggccccaggaaactcgctgagaagggcatacacggaagccatatgaagtgttggaaccagcttttccaactcaggaaacagaatggtgaccaatcgggaaactgactgcttcagctttgctcgctcctttactttgtcgaacctgtatcttgtgagtgattttagttcttcgttgtggtatgctgtgtctgtgtaggacttgaggtccacatcagacatgagcatagctgcaatggttcgcgcatcgacacggtctgtcttcgttttgcggaggctgaggctctttcggtaaaggttggtgtgcagaggattgataacaaaggtgtgcagacctttgtcaagcagaaatccgagaatgttgtagctgtaatgtccagttgcctcaagtcctacttttattttatcttccggacgggcacagcgatgaatggtctgcagaagggtgtcaaatccctctgcattgtttgggatggtgaatacatctgccaggacttcgccttccgagctgaggatgaagcagtcgtgcttgtccttagcaacgtcaatacccacacaaatcatgaaaatacccccagtatgtttacttgatgctggttccacagggctctttacgcttgtaaccttgttccacataaaccgtctggcggtatctaactgattaacaaactggtaaagggctgtggttggagcctttcgtgaaccgtcatgcggtaggagaacgcaaccaatccacagcatcccttacagtgtagcacagcccttggagaggggctctaataactactactctataatacaaggaggactcacaatgtatgaaaatgacggcggcctactctctcccagagatgcctaccgattgatgttaaaagactacccggatgtgatggacattggtcaaatgtgtgaggcgcttggcgtcagtacaaaaaccgggtacaagttacttaaagatgggaaaattgagtaccttaaaattggacgggcttaccgcatccccaaagcccacattcttcgttatttgaaaatcacctgctccacttttgcggagtagcaggctatggtgtcgatcttcaccggatagacgcagaaagttaacaattctgacgcggatttacctggagttttgttctgtccgatgatacaataaaggtgtcattggtaggtgaactcaataccgcaaaaggaggaacagatcagtatgccagcggtacacctgcaagaaaacagcaaactaatctccggccatgtggccgagaaaaaagggtatctctattgggttctaaaccttaccgatgaaaacggtaagagaaagcccaaatggattcccacccataagaaagtcaagggcaataagacctgggcaaacaatatgcttcccaccatccgaaaagaatggacggaaaagctgcttcaggaggctacggcctcacagcagtcggcttctccgtctggcccgtcatccgcagcgatttcctttgtggatttcctgtaccagtggcttgagtacaagtacaagtctgctaccggacgggtgatggacagcaagcccattgaactctcgacctattcgggatacgaacaacagcttaacaaccccatcgccccgtatttccgagagcatcctgtcgccctttgtgaccttaccaaacaagatattctcgctttttatgagaaagaattggaacgggtcaagccgaccaccgttaaacattaccacgctctgattcatggggcgttgaattatgcggttgacaaaaatctgattccaagcaatccggctgaccggattatcatttccaagcctgaacccttcaagggtgactactacctggattcggaagtcctgaatctgtttgaagttatcaaggggcataagatcgagctggtagttctactgactgctttttacggcctgcgccgcagtgaggttatcggtttgaaatggagtgcctttgacttcaaccataactgcttctccattcggcatacggtaacaacctgcaatgtaaagggagagcgggtcacgattaagaaggacaaggcaaagaacaaatccagtctgcggacttatccattgattccttttttgaaagaacggttgctggaggccaagaaacagcaggaagaaaatcgcaagctgtgcgggcgcgcctacaacaaagaatatctgggatatgtctgtgtcgatgtgattggcaatctcattaaacccaactatgtgtcctcgacctttgggaagttgcttgccaagaacaatttacggcacattcgtttccacgatcttcgccatacctgtgcctcgcttttgctggccaacggtgttccgatggaacaggtaaaagaatggctgggacacagtgagatttcaacaacggtggatatttacgggcatctgcaatatgccacgaaaaaacaatccgccgcagccattgagcaggacattgtggcgcccatgctgcaaaacctatcggcggtttctccataaaaaggaaagaggtctaccagcttttcgctggcagacctcatggcggagatggagagattcgaactctcgcgccggttttgagccgacctaccgcatttcgagtgcggacccttcaaccgcttgggtacatctccaaatttatgttatatccctggtcccgacccgccgaccaattcagccggtggaaatcgggaagaacaacaggatagaacaagcaacattattcaatttgaactcggctggaacccgcatggttccaagggtttcagccgtttggcactccgcataggaaacctgatttcgaatccggacccttcaaccacttgggtacacctccacagaacacagaccggtcccggtctgtcgcccagacgaaagaagccgcaggccgacggaggggcctctgtttcagatacacgccaaacgatccgggcggaagattcgcttattaaagataccaaaaaagcagagagaaatcaagaggggaggggaaagaaataaaaattgttccttctcagcctccgtgggattgacacgatgtgggaaaataaggtatgctaaaacaacagaacaaactagaaacgagggacaggaggggctgcggatggagatgcaggatatgctggctgaccggctcaagcagaagcgggcgctctctcacgcatccctggaggaatattcgaaggagctggggatcagcaagagcgcgctgcaaaaatacgaggccgggaccggaaatcctaccctagccacggtgcagacaatagcggaccaccttcacgagagcccggcccagctgctggggatgtacagcgaagaagagatggaggctgcgggcctgatgttccggaccctggagtggtccatggggctttcggaggggagccgcagggagctggcggtgctgttccgggaactgagccgtttcctgagcggcgagctgggaggggctcccgggcccccaaaagagcggaaggaagagcgatgacctctgggtgacgctcccctgccacggcaggacctgaacggaaaccgagaaaattggtgaactgctatccctcaatttttaccaggtcatagctggatttactgccgtcacctcgactggaggagctgcggcacgatacagcaggcaggtccatcatagatgagaggggggctgcttcgcggccccccttgatgatttcaacgtcaggcctggtcataccatcaatggagcgattttgacagtttcaaggagttttgaatcaatggtaagagtgcttttgtctgccacggcagtatcttgaaaagtcccgaaaaagcctgatgtaccaatgattatgcggctcgaaaaggtgcttactgcaccacgactacaccatttttgaaagagccttggatgacactaaaatttagcaaccgtgaaacagatggcgtgacaatttaaaaaccaagcaatgcaattaggtttggtacatttaaaaatgaaaccggttccatctttgagaaaactcagacggagccggttttgtattttttttgactgtttcctgtaattatgaacccgtcaagttcgtacctgactcctcattcgcaatattaggtaaacgtgttctccattctttgagccattttagagttttttcggctccaggatggagctgggcatatttagcaagcaggaacagctgccactttgctcgtatataagcgtaatgccacttatcgtatgcatagtttttcagttccggctccgctgcccgttcaaaggttctccaatccacaagtttccctaatatctgtttttctacctcacccccgtataactgctcggcgctggtcagatacagatcaacggccgttttcagatttctttcatatttggaatcaattaagtacttttgaataccctccacggctttttgaagcacagcgtcccggatggttgagtcttcaatatatcgggaaagatccagttgtaaactgcactgtgagcattgttcattgtcgtacaaccaaaacaacgccgtgttccgttcttgctccgaacagtgcaaaagatcggctgccaggagcgataacaattgttggtataactgctcccattgctccctcgcatcggcgtccaaggtatgtttcgtacgtgtaaagaaagtaatttgacttaaaaaataggcggtctgtaacgatcttttttgcggagttagttgcgccaaagtgtccaaaacctgcttgttggacagttttccatctctgaatagggaaaacatccattgcgcacacaagagttgggtatacaatagttttgacttcgaagcagacaggaaaagccgttctgaccagggataaaacgacatgtgagccgccaaaatatcgaacatcagcggtgatctactgttatccaatagcaaaaggaacgccgcaggatccaactttaacattaggcgatagcttccatgaaaccacccgttttcccgataccaaatatgtcctgcctgatcgaatagaatatcaaaacctgctctgcttactgttgcccgatcatgaagcaaggcccataacgtgtattccggcgcgttgatgcctctttggtcatgcaccatacgccgctctttttcttcggcaaaatcagaaaaccacattagaaactcatctgcagctccatctatattttttaaggtttctgcaacatcttcaattgaccatcgaaacacattcgagcatagctctcccaagactcggcaaacgccctctttatcctgtccccaatgattccatacttccgtaaccgctacagacaggttctcctttggaatcgtgtttctgccattctcacaatattctgtccccagccactctttcaaaggtgatggagataacttctttttatcttgggccgtcggtttcactgtagaatcatacagaacatcacaaataatgcgctcttttggcggtttcttttcttggagcttagcatcaaacatctgagtcaaatattcgcatacttccagagctacctcatgctccagcggtgcaatgacaaaggggtagttctgtcccatcttgttcaaagaattgctcaacagaaatccgtcaatatgttggtcattatggaaccgcagcaaataccgatcatgaaacaccggtttgttccctcgcctcaaattgcgcactgacagccggccatggagcaattttgcattgctaaacaggaatttttcatactctttgcaaatatcggatgctttccctgtatccgggtcagtcatcccaaggcaggtaataatgtcaagctgcagattcgtgcgtggtattctagtcaataatttttctgcagctgagactgaaaaatatggatctgcaagaatgactctgtccacagtactatccgccagatacttacgtatttttagaaaactatcaatttctccatcttttcctgtattcggaataaacgctcccaaacaacgtgttttccgataatcggttaaaagcctccttcctgtttccaatgaggtgtcaatttctgtgtgaaagctgcttttaactgaaaccgtacgatcggttgtaacccgatcaactttttctattttttcttcgatctctctttttcggttggaagctgactgaagtaatttctttgtccaagcatctctgacatgatacgaagacgagtcaaaattcatctccagatttactccaagcatcattgataaatcacgggcgaaaagcaactctccggtttcaccatcccatatctgtactactaccctgctcatagattccttggccgtgaactccacagaactctcctccgcaggcagcagttttgtctgattgatcagccaccgcttacgatgttctgcagcgcaatttaccaccaattctcgggaaaacacctctgttttttgaatcgttactttctttaattccaactccttatgtgtcaagatcttaaaacctgtgcccaatggagctgactgatagtgttcaaagtttccgaagcgatgcccctgcgaagaaaaatcaatgccgcattcctcttggcaccactgtattaagtcctggacatctcggtacagttccttaccatctgtcccaaatgaatggaggatttcctgaaatagtgcttccttttgcacattccacaattccttcagatatgcgtattccacaaccggaccatgctgccttgaatgcgtatcattgaccagtaccatgggcctgataactaattggggagatttcatcgttatcttcgccatagacagagtgctttcctgtgtgaggcttttctcaaagatttccgcttcatgaaaaggtaaaatggctgtaagaacactttggtgtttttttgatatctctctctgcttccatgtcaaaaaaggctggtttgttggggaactgaatccgtaaagaagaacttcccccccagcagtagaaaacaaaagtaatttaataaagcgattttctccttgcattttttcatctccgttctctttcggatagccatgtacaatactttctttctacgacattataacatagatctccatgacacccattactacatcctcccttccagaaacgaaattcaccattttttgagagccttgctatgacaatcccaatatggcagatttaagagaagcggaaatatctttctaatgtaaaatgttcccgctggcgctaacagacaaaaagatgccggggcagccttggaaaaggttgcctcggtatcttttcacatattttgtgctttatagttttcgccccatgtccacatggcgtccagaatgggcttcagactttttcccaaggctgtcaggctgtactccacccgcggcggaacttcggcatatactttgcggctaaccagccctttttcttccatatcccgcagctgggcggtgagaactttctgggaaacgctgccgatggactttttgagttctccgaaccgctttgttcccggcatgaggtcgcgcaggatcaggactttccatttatcaccaatcagcataagcgttgtttctaccggacaggcaggtaattctttcacttgctgcataataccactcctttccaatagtttctttttggtaactatagcacaataaagtgcttactttacaatagatacttacggaattattataatttcgcaagataaaaattgcaatccccaaaacccaaattccaatcaggaggtatttatgatgaatgacgtcgtaaagtttttgcaggaaaatcccgtgcagtatctggccacggttggccgtgatggtaaggccaagtgccgccccttcatgttttccggcgagatggacggcaagctatggttttgcaccaacaaccagaaggacgtctacaaggatatgcaggccaaccctaacatcgagatttctgtttccagcccggcttatgcgtggattcgtctgaacggcgaggccgttttcgagaataatatggccgccaaggagatgtgcatccggaaccccatcgtcaaggggcagtacggcgaggccaccaaccccatctttgaagtgttttatttgaaagatgtccatgcagtaatcgctgacttttccggcaatccgcccaaggagtacgacctgtaagtatcgtgcacacggttccccccggataaatctaggggaacctcttgattttgagaggcttcttatgcagacaaaagagtatctggaatacattgtggatcatatccactctaccgtttttgccaccgtggacagccaagggcggcccgtcacctgtgccatcgacctcatggactatgatgaaaacagcctctactttctgacagcaaagggcaagaacttttatgaccggctaaaagctaacgaaaatattgccttcaccgccatgaagggagaagataccctttcctgcgtggcggtgtccgtacagggcaaggcaaaggagatcgggccggacaggctgcccgacttgttccgtaaaaatccctatatggagaagatttatcctgatgtgcgctcccacagcgcgctcacagtattcaaaatttacgagggaaccggagaatggtttgacctctccaaacttcctattgaacgggccagcttctttttcggcggagcacaggcaaaagaaaccggctattttgtgacggacaaatgtattggctgcaagctgtgttattccaaatgtccgcagaagtgtatcgacatttcaagaaagcctgtggttattcggcaagaacactgtctgcattgcggaaattgctttgaaatatgccctgcaagggcaattgaacggagataagatgatgacgcaggacgagcgattgatttttctgctccgcgatctgctggcagaacgaaaagaatatgaagatatcccggtgccggattctctctcggaaaagcggcggcttttgcgcagcctgatgaatgtgcgtccgcccgtcccggtccgtgaggatttcttgcgggtgcaggacgcttaccttgtggatcgtctcgcggagcggggcatgacaaggctgaaagacctgacgccggtgcgtcccggcttatatctctggcagggagatatcactacgctggcagtggatgccatcgtcaacgcggccaacagccagatgctgggctgcttcgttccttgtcacggctgcatcgacaacgctatccacacctatgcaggggtgcagctccgcttggagtgtgcccgactcatgaccggacaggaggaagaacctaccggcaacgcaaaaatcacaaaagcttacaacctgccctgccgctatatactgcataccgtcggtccgataattagtggagccgtcacacaggcaaaccgggaactgctggccagctgctaccgcacctgtttggagctggcggcggaaactgggcttggcagcatagcgttctgctgtatctctaccggtgaattccattttcccaatgaactggccgcagaaatagccatacaaacggtgggagaattgcaacggcaaaccccagacaaaatcaaggtgatcttcaatgttttcaagaacagagactatgaaatctacaagcgcctgctgcgataatatcgcacggctcaaacaggaattggacacggcggatgcggtggtgatcggggccggttccgggctttccacttccgcggggtttacctataccggcgaacgctttcagaaatatttcggggactttattgcgaagtatggcttccgcgatatgtattcaggcggcttctatccctttgacagcctggaagaacattgggcgtattggagcaggtatatctatatcaatcgctatttggacgccccgaagccagtttatcaggagcttttgaaactggtgcaaggaaaggactattttgtgctgaccaccaatgtggatcattgtttccagaaggcaggatttgacaagccgcggttgttctatacccagggcgactacggcctgtggcagtgttccaggccctgccaccaaaagacctatgataacgaaaccattgtcaaaaagatggtggccgaacaaaaggatcgaaaaatctccagcgaactgataccctgctgtccagtctgcggcgcacccatgtccatgaatctgcgggcggatgatacctttgtggaggatgaaggctggcacaccgccgcccggcggtatgaggactttctccaccgccatgagggacagcatattctctttctggaattgggcgtaggcggcaatacaccggtcatcatcaaatatccgttttggagaatgacctatcaaaacgccaaggcaacttacgcatgtatcaatttgatggaggcatactgcccgaaagaaattcaaaagcaagcaatttgcatcggtggagacatagaaaatattttacaccaattatttccacacaggaaatagcaaagccagccgagccagtcaacggtcaagatgaacgggctgcgcccgccgttgacagccccgcccgccttggctggtaggcaatcaaggggcgacagcaaggtatgctgccgccccgcactcttattcagagaggggggaatttacatgaccgagattgaagcctatcaagagtatatccggtgcaggcacaacgccttttgtaaagcagttattcggtatgccgccatcgggaaaatcatacggctgcggcagaaataggaacgggaaatttcccttgactatctgacaaatgtgaagtttctccaatttgccgagccggagccggacgaggaatccccctttaccgtctgcggccaaaccatcctattgagcaacgccgcccttgccgacgcaatctctgctttgccggagcagacacgggaagaaatcctgcgctattactttctgcgccagccgcagcgcgtgatcggcgcgtgtattggccggtcatgcagcacagcggggcggcatatccagactgccttgtagaaactgcgggagaaaatggagaggtgccgccatgagtaaacttctcccctatgaaaccattgtcaaagcctgtgagggcgacccggaagctgtgaacgccgttctgctccactacgccggatatatccgctatttctccaaggtgaacggacaggtcaatgccgaggttgaggactatgtgaaacaacggttaattgactgtcaattcaagttccggcttgacgaaccgccggacaagccataaaaactgaataccagccgccaccagcgcggccagcgaaagcagtaagtcttgaaaaagatttactgcttttttgttgtctggctccgcttccagccattttgacccctgccggttgtagtagtaagtgaggggggaatttttctgccctggtgtttggcatttggagcatttacccgtagtagagagcaaagagaaaggctttctccagcaccgggtagaaaccactgcgcccggtgtcattttagcgaaggcgggcaggaataccctttgcaggattagtagtagcagaaaaggagaaatagattgcaaaagcggctcccgatgaacgagtagtaggcaaagggaaatttgaaaaaagcatttatataagccgggaaaaagtggcgaacggaagtgaggggaagtttgcagtcacggagagcaagtttctaccacggtgccaaaatccgcaattctgcggttttgcccctcgcgggaaacttgttggggagtgccttccccaaaccctgcttatcgtcctcgcggactgcatatcatttacttccgcgccagcgcgaaagttcattcattccgtcgctcgtcctctccccacgcaacccgcttcgctgggcttgcgcgggggccccatgagcgccgcccacgaaaggaggtcacactatgcgaaagaaatacaacacaccccaccgcagccgcgttgtgaaaacccggctgtccgaagaagaatacgccgacttcacagcgcggcttgcgccttatggtatcagccagtccgaatttctccggcaggcgatacggcgggcgaccatgcgccccgttgtccatgtgtcggcggtcaatacgaacttctttccgctgtcgggaagctgacagccgagtacggcaggatcggtggcagcctcaatcagattgcccggtatctgaacgagtacggcgtaccctaccatgcgctgtccggcgagatacgcgccaccatagccgaccttgccgcccacaagtatgaagtcctcaagaaagtaggtgacgtggttggcaacactcaagcatttaggctctaagaacgccgattacggagccgccgaagcctatctgacctttgagcatgacgagtttaccatgaagcccacccttgacgaacaggggcggctgatcccccgcaaggattaccgggtgtccacgctgaactgcggcgacgaagattttgccgttgcctatatgcgctccaatctccgctacaggaagaaccagcggcgggaagatgtgaaaagccatcactacatcatcagctttgacccacgggacgaggcacacaacggcttgaccgcagaccgggcgcaggcgttgggcgagaagttttgcgccgagcatttccccggacaccaagccctgatatgtaccacctggacggacataaccacagcggcaacattcatgtgtatatcgtcatcaacagccttcgggttgaggaagtcccgttcctaccctacatggacaggccagccgacacgaaagccgggtgcaagcaccgctgtaccgatgctgccttgcgctacttcaaatccgaagtcatggagatgtgccaccgggaggggatttaccaaattgacctcttgaacggcagcaagaaccgcgtcacagaaagagagtattgggcgcagaaaaagggacaggccgtgctggacaaacagaacgcccccatgtttgcggagggtatcacaccccggcagaccaagtttgaaacgaacaaggaaaagctgcggcggaccatacgcaaagcccttttcaccgctaccagctttgacgagttttcctctctgctgctgcgggagtgcgtgaccgtcaaggagagccgggggcggctttcctacctcacgccggacaggacaaagcccattaccgcccggaagctgggcgacgattttgaccgcgccaccgttcttacgcttttgaaacagaacgccgccagagcagccgaaacgcccaccatcccgcgcaccataaaagaccgtttgcaggccgccagagccgagatagccgcccccaaacaggacggtgtgcagcggcttgtggacatagccgccaagagagccgagggcaagggaaaaggctacgagcattgggcaaagatacacaatctgaaacaggcggcaaagacactgaatgtgtatcaagaatacggatttacttccccggagcagctggaagcggccatagacaccgcctatgcggaaatgtggcagactagcggcgaactgaaaacgctggaaaccaagctgcaagggaaaaaggagctgcagcggcaggtgttggtctacgcccagaccaagcccgcccgcgacggggtgaaagcgcagaaatcccccaaagcccgcgacgcataccggcaggcgcatgagagcgattttatcatagccgaagccgccgcccggtatttccgggagcatggcattaccaaactgcccgcccggaaagcgttgcaggccgagatcgagcagcttatttccccaaaagacagcctttacaacggctaccgggaacagaaacggcggttcaaggagttgcagacagtcaaacggaacatcgaccaaatcctgcgccgggaggaaccgaaccgcagaaaggagcagaaccatgagcgataacccgccccgcatggactaccgccagcaccggcgggcgcggcggctggtacatgagtgctgtaactacgacgatgggaactgcctgctattggacgacggggagccttgcgtgtgtgttcagagcatttcctattcctgctaaaatggggtccccacaaagtcattgactttgtggggagaggaggagcagcggaatgagtgagctttcccgccagcagggaagcgagggatatggagcttgcgacgacgaggttccgtgtggctgtcctgccccttgacggggagctgtccgcagcactcttgtaccggggaagccggaaacggtgcgcggtctgcggggcggctttcgcccccaaatccaaccggggaaagtactgtcccgactgcgccgccaaagtacgccgccgcaaggaagccgagcgacagcgcaaacgctaccaactttctacgcatttaagggttttcaaacccttgtaaatcaaggctttttacctaccctcaatagtggcttgatacatttctttttccctcagaaacggtgttctatatgcgtacaaatgccctaaatccacccaaagcaggaaccatgtcagataaccgaaaatattactacctgaagctgaaagagaattactttgacgaggacgctatcgtgctgctggagagtatgcaggacggcgtactctactccaacattctcttgaagctgtacttaaaatcgctgaaaaatggcgggaagctgcagcttgatgaaaatatcccctacaccgcgcagatgattgccaccattacccgccagcaagtcggcactgtagaacgggccttgcagatctttatgaaactgggggttgtggagccgctgcaaaacggcgcactgtatatgagcaacattgaactgatgatcggccagtcctctaccaagggggagcggaaacggcgggcaaggctgactttgcaggagcaaaaagccttgccaaaggccggggcggacaaatgttcaccatatcaagcggacatttgtccaccagagttagagatagagaaagagatagagatagaaaaagagagagcacgagagttagatacggggcaacccgcccgcgccgcctatggccggtatggaaatgtctttttgacccaatcggaactggacgggccgaaagctgatctgcccggaaaatgggactactacattgaccggctatcctgtcatatcgcgtccagcggcaggaagtatcacagccatgccgccacgatttacaaatgggcgcaggaggacgccaccaagaaaccctcgaaaaagggcatacccgactactcatgcaaggagggcgagagtttatgaagaacgaaatcaacgctgttttggaaaatatgaaggccaccacaccggagcggtcggactacaccagcgaggacggtttgctgcactgcggcaagtgccacaaaccaaaagaagcctacttcccggagggcaaggcattgtttaggcttgaccgccacccggcagagtgcgactgccagagagccgcccgtgaggagcgggaagccgccgaacagcggcgcaggcaccttgacaccgtggaggaactgaaacgctggggctttaccgaccccaccatacgggactggacttttgaaaacgacaacggcaggaacccgcagaccgaacttgcccgccggtatgtggagcatcgggaggatatgcgaaccgacaatatcggctgcctgttctggggcggtgtgggaaccggcaaaagctaccttgcgggctgtatcgcaaacgccctcatggagaaagaaatccctgtccacatgacgaactttgcccttatcctcaatgaccttgccgctagttttgaggggcacaacgagtacatttcccgtctttgccgctatccgctgctgatccttgacgacttcggcatggagcgcggcaccgagtacgggctggaacaggttttcaatgtgatagacagccgttaccgcagcggtaagccgctgatcgtcacgaccaacctcacgctggacgacctgcggaatccggaggacaccgcccattcccggatttatgaccggttactttctatgtgtgttccggtacgctttaccagcgataacttccggcaggaagccgcacaagctaagctggaacggctgaaaaagctaatgtgataaggaggcggtacgatgaaagaagttcccatctgggaaaagagcaatttgagtttggaggaagctgccgcctactccagcatcgggatcaataagctgcgcaatctcaccgatgaaaaggactgtcggtttgtattatgggtggggaataaacgcctgatcaagcgccgcctgtttgaccaattcatcgagcagatgtattccatctgaaatttgtggtgtgaaagactgcctgaatatggtacaatcaaagtgtcataccaaggctctttccattacggaaaggagtttgacaatgtccgaaaagcgcaaagaccataagggaagaatcctgcggacaggagagagccggagaaaagacctgatttatcaataccgctatacggatatccggggaaagcgccagacggtttattcctctgatttaagggaactgcgggaaaaagagaaagaaatccagaagcagcttgacgcgggaatcgactatgccgccggaaaaatcaccgccatagaactggtagagcggtatatcggcctaaagcagggcatccgctacaacacgaaggttggatacaattttgtgcggaatctgattcggcaagaagattttggataccgcccgatccgggatatcaaagtatccgatgcccaacagtggatcatgaagctgcacggcgacggaaagggagacagcaccatcaccagcgtgcggggcgttgtcaaactggcatttcaaatggcctgcaacgaggatatcatccgaaaaaatcccttcgacttcaagttggtggaggtcgttcccaatgactcgcagaagcgaatcaccatgacccaggagcagcaggaaatctggatgggttttattcggggtgacaagacctaccgcaagtattacgatgagtttgtagtcctgctggaaaccgggatgcgggtgagcgagttctgcggcctgaccaaaagcgatctggattttgagaaccgtcgtatccgggtggatcaccagctcgtccgggagcggggcagcaagtactatgtggagaaaacaaaaaccgaatgtggctgtcgttttattcccatgacggatacggtgtaccagagccttaaaaatatcctggctcgtcgcaagacactcaaagcagagatgatcgtcgacggatacaccggatttttgctgctggataaggacgacaagcccaaggtggcactgcacatcgaaaatgagatgcgctgggccatgaagaagtatcgcaagctgtacccggacaagcccctgccgcacattactccccatgtgttccgtcataccttttgcagcaacatggccaatgcgggtatggatatcaagaacttgcagtatgtgatgggccactccgatgtgggggtgacactgaatgtctacacccacgccagctttgaccgggcagccgaacagatggcaaaaatccttgcgttccccgctgtgacagcttgaaaaatcaggtcaaatccgcagttggtactacaccaattactacaccatttgccaatgaaattgcgtagatttacgcagatttgcgtgggcagcatggcaaccacaacgaaaagaaaaagcgccgaaaagccagtcatatcaatggtttgcaggcttatgaagggatatataagagatgaccaaaatactatttgtttgccacggcaatatatgcaggtcgcccatggcggagttcatgctgaaggacctggtcaaaaaacgcgggatggagagggactttctgatcgcctcctctgccaccagcgcggaggagatcggcaaccccgtccatccaggcacggcgagccggctggcccgggagggcatctccacagcggggaaatatgccgtgcagctgaagcggaccgactatgaccgttacgactattttctgggcatggatcaatggaacatccgcaatatgaagcggatcttggggggagatccggagaacaaggtgcacctgctgctggactttaccgggcggccgggggaggagatcgcagacccctggtacacgggagactttgaacgcacctatgcagatatcctggaggggtgcaccggcttcctccgacagctggaggggcaggggacatagactgcagcggaggacggccgtcccccgcgccatattagaagaaaagagaaagatggcggccccggatttccgaggccgtcatctttctcaggtattacgccttttcaaactcactcttgcccagaccacacacggggcagacccagtcggaggggacatcctcccagggcgtgccgggagccacgccgttgtcggggcctcccacggcagggtcatattcatagccgcaggggcagacatattgatccatcatgaccgctcctttctcagggacagaggatcagccaaagtagcacttcagcaggccctcgaacgccttgctgcggcgggcctcgtcccgggccgtctatcctcgccggatcagcaggccgttttgcgtcctatggaaatgcagtaattgcaagacttttgcctccgtctccattctaaataacaaacagccaacgcccaaagcaggcgttttcgggaaagtgctgcctttctatccacttttgggagacatatcatggataaactggatgatgcaggtgtttagtcactagcaaataagcattggatgttccaatacaccatcgcggtggatggcccaaagaaggatgtccgcaagagaaataacaagttcggcaatcctacgaagacagagacggaggcaattagagccagaaacaaatgctgctcatattccagatgggggccaaagacaatatcgaaacggcaaagtcggcatacaaggtattctcgtctaatggaaagcacttttcggtcaagtatgctccctatgctctgcattttatggaatatttgggctcggcgttggcttggaggtattctttcaaaagaagaagtcggttgcaaatgtagtaatttccgtagttgggtatagattttacctccttgtgcggggttcttataattataacatgccgacagaaaaaaggggtggtaaacacccctttgatcagttttacactttttcgagatcaatgatctttctgatatcgctaatctccaatgcggtggcaatcttacctaagtgttcaaaattgataacagttcgagtgcctctcacgatatcgcttattgttgattcccgtactcccgccatctcggcgagttttttctgtgttataccttcctcttcaagaagttctttaacacgaagtttgacacggtagctcataccagactaattccctccatgctcgaaagtaccatgtaggcataattccaaaggctggggtcttttccaaaaacagtaggcttgtcgcccaaagagccagccaaatccataacacttcttgtgagtccgactttgtgcttgttccaaacagcgatgggatctttgccgtccatccacttatacttgcctgaggtgatatcatactcgagaagaactctgaatgccgccagaatgggatagagaagaccatcgggaattttgtagtaaatatcactcatgcagaatttactcttgccgacggggctgccctctttgtagccagaataggactttcgaccgtacatacgaccattctcgttataagctacagcaaactcagtttcgatggcatcgtaaagatcaaacagatcgggaatgacattcacaaattttctgtagtgctcggggtcgtccaaatactcattcagcatggcctgtttgccagagtatgctttggtaggatgctccgcactgttatacttatcgatgttgaacatacaaatgatagaaacgatatcgcgcgcgtcgatcattttcagagcctttttggtatcggtgtcttttgtgatctgattctgcttaaaggaaattctattaaagaagggaagtccctcgaggccttccttgatgggatcgaacttctctctcagttctgccatagactttgcatcgactgcgatagaagtattacgagcttcagccagatcggcaatcattgcttcgacaccagtcattacttcaaactgaacatactgttccaggactttatccttgttctcaagaaggatcttgtaggtatgtccgccatcaatgttgccatggcagctttcatcctcgaaatcaatggttacttcctgcaagcggttatcataacgcactctctttgcggagagaatgatgcctctgttcttcaggtggaactggccgtcattactcagcagagactctgtgattgcatttgccacagtagagttgagtttctgatcgcgggggtttgtggacatgggaataccctcggggacatcgcaggtcttggcatagaaaatgtactttctcggagtttcgttgccaagaggatcatcaaacttcctaaaattgttgtcgctcaccttaattgtctttctaatcataattacctctttctgaagaccaggcttcgaattatgtgtacgaatgcatttgcatatcgcaatatcagaataacgaaatatcgatattttgtcaagggggtaaaattaaaaagtttggaaggaaggcggtaaaaggctttgtagaggtcgccatagaccttcttgaagccagtaatatcgaagtgattggagaggacagaagcccagtggatgatgtaagtccctgcggtcagtccctcaacctcacgcaccaaaatttcagcctagatagtgtcgcggatgtcgttggtcttggcttgagcttcttccattggggcttccatcttggaaaccactttgttcttgcaagttgttcaaaagaagtgaaaacttctcataagttatcagttttgctttatttttcaatattaggcgaaaaaccgcttaatataggtgcaattcaagaaagttgcacatgtgaaagtcaaaaaagtgtgatacggagaaaagttacacccaacttgcacacctgcgcggcggaagagcaaaaagagagggaaccggtttcccgattccctctcaaaaagtgcttgtttatccggttatcgattagccgaagtagcgcttcagcaggccctcgaaagccttgccgtggcgggcctcgtcccgggccatctcatgcacggtgtcatggatggcgtccaggccgttcttcttggcgcaggcggccagctcgaacttgccgttggtggcgccgtactcacagtccacacgccaagccaggttggccttagtgtcagccttcatgttggcctccaggtcctcgcccagcagctcagcaaacttggcggcgtgctcggcctcctcataggcggccttctcccagtacaggccgatctcgggatagccctcccggtgggccacgcgagccatgcacaggtacatgcccacctcggagcactcgccgttgaagttggccatgagctggtcaaagatgtacttcttgtcctcagcgctgatatcggggttgttcttcacagtcttggcatagatgccgaactcatgctcagcagccagcttcatctcgcccacctgctccacgaacttgtccttaggagccttgcagatggggcagaagtcgggcgcggtctcgccctcgtacacataaccgcaaacggaacagacaaactttttcatgacaatttttcctcctgttttattttattttggcaattttcacacgtgccgtagaagatgagcccatggcgctggaccaggaacccatattgcgcgctgacggtctgatccagatcgccgtcatccagcatgggatggggcagatccatcacagcgccgcagcaggtgcaaataaggtgactgtggggggcaatgcacccgtcgaaccgctcctgtcccttgacgacgccgatgctctggatcaggccctgctgttggaacaggactaggttgcgatagaccgtacccaggctcaggtcggggtgggtgggtttcagagtttgatagacccactcggcggaggggtggcagtcggtgctctggatcgcgttcaaaatggcctcccgttttctgctgtatcttgtggcgcgttccatagggccctccaaatagtaataattcttattacgggagaatcataccacagaaacagctgcttgtaaaggggaaactcaaaaaatccgaaaattcgcgagatttattattagattgtgcaaaggtcacagaccgacgcacagtctaatttttttatctaaactgacgcagaaagaaggtgaatccgtgggaaagcggtacaaagcgatcacttttgacgaccggaagacgatcgcgtccatgtatggcgccggagcggtcgccgtcgaaatcgccgaaaaggtcggcgtgtcgcgaacgtcaatctatgccgaattgaagcgcggccaggacggcgtcaccctggacaagaacttccggccggcctacgatccggccctggcccagaagcgggtccaggaaggacttcgccgccggggacgaaaggccgaagacatggaaaaggaggaaaccgaaaatgtctgatacctgtggacgctgtggccgtcgtctgaaaaatccggcctacatagaaatcggctacggccgaacgtgcgccgcgaagctggggattgcgattccccggaagcgcaaaccgaagggaccggcgccggaccgtgtcaccaccacggccgacccgcccgcggaaggaaggtgatcaccgtgaaatggaagatcaccgcccaggaaagaaacgccctggttgaagcacatctgggctgtatctggtggacgatcaacaaaaaccgccgcctgatcaccgccgccggcctggaagacgacgacgttttccaacagttagcgatccgcatgatccgcgcgatcgagaacttcgaccccgacaagggaaaagacctggaacagcacatcttcgcacagcttcaatatgaagtcctgaactgcaaggacgccgcgagggtgtacgggatcaagggcgccccgtatggagcgcggaacctggtcgtttcaatggacgccctgatcgaagacgggtgtcagttcgcgggggggggtggcttaaatgcctaaaatcaagaccgtgtgcggcgtgatcgccttcgtcttcttcttccttatgctggggaccgtcggggccatagaacaggaccaggtcgccctgggaaccggaacgatccgcgccttcgtgtttgaagccctgtgggctgtcttctgcaagctggccggggccttcgaccccatacctacccaggaaaggaggaagccgcatgaagtacaaggcgaagacgctgacgcctgtccaggttggacaagtcgtcaaggcgctgatccttatgggcgcgcagaaagtcaccgttgaagaagtcgaaaaggaccgtttcgtcgtcaccacaacaaccgaaacggccccttccaaaaaagcctaaacgcattgtaacacagaaaggagcgtttttcaatgccgaaactgaacttttatgataccgacgccgtgaaggcgtttgtcctgaacattctggtcgagaatgaagaacttcgccgggacctggacttctatcagcgccagtccgcgtccacctgggaggactacaagacccaaaaggcgcgcgcagacgccgccgaagcaaaggccgccgaactggaaaagctggccgacagcctggccgcagaacgtgacgcggccctggcccagaaagggggcgccgaataatgcagatcacgaacaccctgaaccttccggccccttttgtcagcctggccgaaagtgacgaatacccgatcgcccccaacgaataccgcgtcacgtcccttctgaaagggacccgcgaaacgattctggaacgccgccacgggacggagatcacgcgcgacgtgtccgacatggtctggttactgttcgggaccgccgttcacggaatcctggaacaccaccaggaaacggggacccagatcaaggaagaacggatcaaggtccccttcgacggctatgtcctgtccggcaagttcgacctgtatgacgacgcgacgaagatcgtcaccgactacaagaccgcttccgtctggaagatcatcttcggcgacttcgccgactggcgccgccagaccttgatctattgctatatgttacgccagattggcttcgacgcccagggcggcgagatcgtggccttcctgaaagatcacagcaagcgcgacgcgaaaatcaaacccgactacccgaagttcccggtccacaccgtgaagttcaccttcaccgacgccgacttcgccgaatgtgaagaatggcttcacaaacgcttcgccgagatcgcggccgccgagaagctggacgacgccgaccttccggtttgtaccccggacgaacgcttcaacagcggcgacaagttcgccgttatgaagaagggccggaagaccgcccttcgcgtcctggacagcaaggaagccgccgaacagtggaaggcggacaacggcggcgacttcatcgaaacccgcctgggcgaagacaagaaatgcgcggactactgttccgcctgtgagttctgttcgtattatcaggaaaggaaggtggcccagaatgacggcacagaaacaaaatgatcagggcgcggcgccggccgcccccctgggctgggacaacattccccttctgaccgccgccgacatcgaatgtcgggtccagagcgtcagccgggcgcggtccggtcaggtcggcgccgtcctgttgctttacaaggacgcgcgggtcgatatgcggattctggatcaggtcttcggccccggcaactgggcgcggacccatgaagtgatcaacgggaatctgttctgtaatatcgacatctgggacgcccagaagggcgtctgggtccggaaacaggacgtcggcgtcgagagcaacaccgaaaaggaaaagggccaggcgtccgacgccttcaaacgcgccggctttaacgtcgggatcggccgcgaactttacaccggccccttcatttacgtcgaactggccgacaacgagttttattccgagggacagcagaacggccggaaggaagtcctgaaatgctattcaaacacccggttcaccgttgcacacgtcgcctacaatgaccggcgggaaatctgtgaactggtgatcaccgaccggaccggcgccgtccggttcgacatgaagaacagggtccagggaccgcccaagacgggccaggaaggccagggaacggccggaaggcccaggacccagggaagaacccagaccgccgccaggggccagcagagcgcacagacgccgccccctggacagggagccgccggcggcgacgcgaagtgtccgatctgtggcggaccgattacgaaggccgaacaggactattcccttcgcaagtacggacgcgaagcctgtcggacctgtcaaaaggcattgtaaaagggggtggcaaatgtgccaagccgaattattaaggaatctatcaccaccagcgaatcgctgggcggcgtcagcgcggacgccgaacgccttttctggcgcctggtggtcaagtccgacgactacggcctgtattacgggaacccgaagattctgtcgtctatgtgcttcccgctgaaccccccgacggaaaagaagattcagtcctggctggccgaactggtcggtcagggcatggtcgggacctacacgtcggaggaagacgggaagcaatacctgaaacttctgtcctgggacaaacaccagcagacccgcgcgaagaaaagcaaatacccgcttccgaaatcgtttgatagcatttgcaaacaggcgaatggaaatcaaatgaaagcaaaagtccccgtaaacggaaacgaaagcgaaaacggaagcgagaaacgagaaacgggaacgcgcccaaccggggcgaagggtgagccgtcaggatttgaccgtttctgggccgcctatccccgccgcgtcgggaaacaggacgccctgaaagcctggggccagcttaacccggacgacgccctggtggaccagatcgtcgccggcgttgaacgctggaagacctgtgaacagtggacaaaggacgacggaaagttcatctgctacccggcgacgttccttcgtggccgccgctgggaggaagacgaccgtccggacgttcccccgtcccccggaagaccttctggaccgaagaactacgccggcgacgaagacttcttgggaagggggtgatcccgtgaaccctatcagcgaagttttacagaaaatggcgattccggtccagaatcagggcgactacacagacgccgaaggcttcctgtgctgtggggcctgtggggagcgaaaggaaatggacgtcaacgtcccgaccgatcttcgcccttccggcgtcatgcgggtccggcggaattgccgctgtgaacaggaacggcttgaagcccaggaaaaagcccaacgggaacaggattttcaaacccgcatggaacgccttcgccgcgacgggatcacggacccggcctatttgaaatacaccttcggccaggacgaccgccggaacccggaagtcagcgacgtctgtctgaaatacgtccagaactgggacgacatgaaggcggaaaacatcggaatcctgttctatggcgacgtcgggaccgggaagtccttcctggcctgttgtatcgcgaacgcccttctgggccgcctggtcagcgtcagcgtcaccaacttcccgcgaatcctgaacacgcttcaagggaccttcgacgacgaacgccagaagcggattgaccgccttcaacagtattcccttctggtgatcgacgacctgggggtcgagcgggacacggcgttttccgtcgaacaggtctacaacgtgatcgacaccagggccaggtcagggaagcccctgatcgtcacgacgaatctgtccatgaaggaccttcaaaacccgccgaccctggcccacaagcgaatctatgaccgcgtcctggaaatgtgtccgatccgactgaaactgaccggagaatcccggagagtaagcaacgcaaacgaccggaaggaaaaggcgcggcgccttctgggcctggaaggggcgtgactatgaggaagtacaaactgacgatccctgggattctcccagggctgaacgaatacatcgacgcggaacggtcctataagggcaagtacaaggccgcgtccatgaaaaagcaagcccagaacgtgatcggctacatggtaaagacccaacttcggggggtccgcttcacccgccccgtggtgatccattacctgtggatcgagccgagccgccggcgcgacaaggacaacgtcgcgtttgcgaagaagttcattcaggacgccctggtggaagccggcgtccttcggaatgacggttgggctgaaatcgagcatttcacagacgacttcgccgtggacccgaagaacccccgtgtcgaagtcacgatcgaagaatatgaaggaggaaaacacaatggtaaaagtaaaaattaaggacctggcgcccggcgccttcttcgacatcggccccgtgaaggtcaaggtcatggaacacttcgcggacgggaaaacccttctggcggccacggaaccgatcggaaaccggcccttcaccgtccggccgttcacctacaagcgccaggacccggaaccgaaccagaacgacttccggttcagcaccttgaaggacgatttgaacaccgacttcctggcggccgtggccgccggcggcgtgatcccggtcgaccggattctggacgcggcctgggacctgaccgccagcgacggcgtgaaccgttacggttatgtgacctgtaaagtcgctatgcttcccgaagccctggtccggaaatactacgacgccggcctgttagagatcgacgactgggaatggacgatcaccccgtacgccggcagcgcgagcaacgcgcggcttgtctacaccgacggcggtctgtactacggcaacgcctgggatggcggcaacggcgtccggccggctttattcgtggattctgaaatctgcctgtcgctggaacaggacgaagtcgatctgccgaatcaggcccttctgggtgagttcacttcaaaggaactggtcacggaagtccttcgccggatcgccgccggcgagaaggacccggacgaagacgaatgatcacgtccgacgccttaaaggccagggtcgaagaagaagtcgggactgacctgtgtcccgtcttcttcgacctggtcgaacagagagcgcggcggaagctgggctggatcaacggacgcgccggccgggcctacggcgaagacggctacggcgacgaatacctggtgatcctggcggtcgaagcggtccgggaaatggccttttcagcctggtgtgagatcaagagcgcggaaaacatggccgcaagggccgccggaaaggtggtggtcctgtgatcgtaaacgggaaagagatcgccagggtgtttcccaggaagacaaaagcaacaccggacgacgacctggccttcaccggcccccttccgaatcggatcaggcaaaccggcggcgggatcgacgaagtccatgttagcgtaacatttacctatgatataccgaaagctgaatcactggtcaggtcatgggaacggctgggcgtcccggtcaaaataggcggccccgccttcggagatcgaaacggggactttacacctggcctttacatgaagcctggatataccttcaccagtcgcggctgtcctaacaaatgttggttctgttctgtgtggaaagcctgtgacggccttcgagaattggagatcaaagacggctggaacgtctgcgacgacaatattcttgccacgtccgaagcccatttccgcgccgtttgcgatatgctgaaacggcaaccggaacggccaatcttcaccggcggaattgaagcgaagattctgaaaccctggcaagctgaacttttgaaggaagtcaagacaaaacgtctttattgcgcttatgatacgccggacgaccttgacccgctgatcgaagcgggaaaaaccttccggaacgccggattcacagtcgccagtcataccctgtgttgttacgtcctgatcggctatcatggcgacaccttcgagaaggcggaaaaacgtctgatccagacgatccaggccggcttcgtcccatacgctatgttataccgtgacaaggacggccaaacagacaaggcgtggcgcgactttcaacgtgaatggtgccgaccgatcatcgtcggcggaaaggtaaagcaatactggaaggaaggtgaaatcgaatgaacgatattgaaaacaaccgcgtgaaagcagaaaccgccctgatcgatcagatcaaggccaggatcgccttccacgccaacgaacaccggcagacctacgaagtcgggaagggcgtcatggactacctggcgcgggaccttctggccgatttccgggccgccggcggcgtccttctccccgtgaagccgaacgggacggtctatgtgatccaccgccggcgcgtcatgtcggcgacggtcatgttcgtcggggccggcgcggacggcctgacttcgttcagcgttcttcgcggacgcctggggacgacggcctggtcttccatgcagttcacggaaaacgacatcggtcagacggtcttcctgacggccgaggacgcacaggcgaagctggaggaacagacatgaaacagggaatcccgcgaaagtgctgtccgttgtgcggccagaaaatcgtcgtgtcggcgttgtatcaatattcccgcgactacgaaacgacaaaaagaggaaaagtgtccacgcgatatagaacggtcgactgtgggccgctggaagtggcaatcgcggcttgcaaaaatccggactgtgaagcaaggtgggaaagcgacaatttttccatagaagacgacaccttcatcgacttcaagtattccgaagggggcgacgactatgaataaaggcgtcacctgtcaggactgtgatcacttccgggcctgtctgttctgtggctatgaatcaagcaactgtgagattcacgggtccctggacgtggatcagcacgaacgacacccggacacgaccgccgcgacctgcccggacttcacgccgaaggtggaacacccgcccaggaagcccttcgacgccgtggtcgcccgaatcataaggaacggccgccgggggtatcgtccatgaaggaagaaaagttccttgatacgatccgacggaaaatgacagaccggccgaaaatctgcgcgacctgtggacacctggtccgcctgggcgggaccctgatcggctgtgacgcctgtgacaaactgatccttccggactatcccccgtatgacggaaacatgacgtgtccggactggaaagcatgaagaaggaggattcaccatgaatatttctgaaatcgtaacccgcgcccacgacaacgcggtaaaacatggattctgggacccggccccggagttcggaacggcgatcgccctgattcattccgaactatccgaggccctggaagaagcccgcgccggtcggcctgacctgtattttgttattccaacgaaacaggcggacggaaatgtcgttcctgaaatcaggcccgcctggtcggtcggagagcataagggcgaaaagcccgaaggcgtggccgtggaactggccgacgccgtgatcaggatcgcggacctgtgcggacacctgggaatcgacctggaagccgcgatcgccctgaaaatggagtataacgaaacccggccgttcaaacacgggaagaagttctgaaagggggcgccgacatgaagaacgacatcaaggacgccttttcggcgttcttcctgggagccgccggcgccgtggccgctgtggccttcctggcggcccctgggggccacggaatcgccggactggtgaactggcccgtcctggccctggcggccgtcctgggcgccgtgggggccttcctgtgggccaaacaggcgcgacacattcccggaccggcaaggggaaccgccctggaccgcctgggggcgatctacggcctgaaacgaaggaccaggaagaccttcacccttcccttcgcgacgatccgcgtcatggagcgggacaaggacttccgccgccggatcgcgagagccgtgacacgacacccccaggaaatcgggacatacatcttcgcacaggcgcggaaaggcgccccgtggtgaagacctgttccgtgtgcggccgccaggtgaaggtgacggtcgcctgtccatatcagcgaaacggcctggaaacctgtccggactgttgcgcgaagtgctaccagtcagagccgttcccctgtccggagtatgaaagtaggaaccgcgaaaggggtgacacattgaaggaaacaaagaccggcaaggtccccgccggcggcgaaagcgccgtgaagaaatgggccgaagtcctggacttgcccgaagaccaggcgatcccgtgtgtggtggcgtttgcttgccttcgctatcatgggaaatcatttgtccgcaaactggcgaccgggtccggaaggatcacgacatggcaatccctgaaaatcggggtggccctgttcttctggaagctggcccagaagcgggacccctggggcgaactgtaccagatcacgaagttcgcccagaaatggaaggaaggtgattcaatttgaacagtgtgaagctgtccgggcgcctgacgcgcgatccggaactgaaacagacgccggccggcgtccccgtggcgtccttcgccctggccgtggaccggaagttcaaccgggacgaagctgacttcattccgatcaccgcctggcggaagacggcggagttcgtggcgaagtatttccacaagggccagcgcgtgatcatatccgaaggccggatcagggtgacgccctacacggaccgcgacgggaacaaacggacccgcttcgaggtcgtggccgacgaagtagagttcggagaatccaggcgcgccccggaagaccaggaagccggaagcgtggccgccgaatacatgaccaacggacaatttgaagaactgggagaggaagaccccggcgatcttcccttctgacaccaggaaagggggtgaaacgacatggacgccaaacagaccaaacgggacagcgtggagaagaccaccggccgcgtttacgacatcttgaagaaccacgaccaggaaacccggacgatcgaagcccagatcgacgcagagcgcgccgccctggaagaagacctggccgaaatccggtccagagcatacccgcgtggggtccgctatgacacgccgcgcgtccagtcgtcccctgaccctgacgggattcttgtgaaggtcgccgccgcgattgagcgccggacagaccggacgaaaagagccgtcgccgccctggaagaacgacagcgccagatcgagcgcgtacacgacgccgtcctggacatggacgcgaagtcgaagatcgtccttctgacgctatactacccgcgccggacctacgaacaggccgccgaagccctgggcgtcgacgtgtcgaccgtcagccgtcagaggaagaccgccgtcgaccggctgacccggaagctgatccgcctgtatggggaaatcaaatgaagaccccctggcggaaatctttttgcacatgattgcacatctttgcaaatgtctgcatatacttgcacttttacacaatgcccttatatggtattgtggtacatgggaaccttgtcccggttccccctcctttttcataggggcacaaagaaggaacgtcttcaccggcgttccttttttgtcgccctgatacaaccacgacacagaaaggaaggtgaagaatcgtggcacgactgacgaagaagaatgaagtcttctgtgaagaatatctgatcgacctgaacgcgacccaggccgcgatccgcgccggctattctgtggaatccgccgggagtatcggaagtgaattactgaaaaaacctgaaatccgcgcgcgcatagaaaccgctatggccgaacggtcgaagcggacggggatcaacgccgaccgcgtccttcgggaactgggccggatcgccttcgttgacccttctgacgtgatcgacctgaacacggcggaagtgaagcccgacgccagcaaggacgacctggccgcgatcgccggaatgaaggtcaaatatgtcccacacaaggacttcgacgaagacggcgaaccgatcatcgaacaggccattgaacgcgaagtcaaactgtgcgacaagctgaaagcgttggaaatgtgcggtcgacacctgggaatgttcaaggacgacccggacagcgcggcgcccgtgacggtggtgatcaattatgactacggtcagcaaggcgggaattgagttcagagcgacggcccagtttaacccagtcttccgccctgtcaatgagtggcgcggccgatataggattctgaaagggtccgccggttccgggaagtcggtcaatatcgcccaggactacgtcgcgaagctgtctgacccggccttccggggggcgaacctgttagtcgtccggaagattgaggaaacgaaccgcgacagcaccttcgcagagttacaggcggcaatataccgaatgttcgggccatacgccgaccgcttctggaaggtcaatctgaaccccctgtccctggaatgtcggatcacgggaaaccggatcattttccggggcgtgaaggatcagcgccagcgtgagaaggtgaagtcgatcaccttcaagaacggaaaactggtctggatatggtgtgaggaagcgacggaacttctttccgaagacgtcgacattctggacgaccgtcttcgcggcaacctggacgacgtcaacccgaatctgttctaccagatcacaatgaccttcaacccggtcagcgcgacacactggatcaaggcccggtattttgacaaggccgatccggacgtcctgacccaccattcgacctataagacaaaccggttcatagaccccgcctattcccgccgcatggagcgccggaagaaggaagacccggaagggtatcgtgtctatggcctgggggaatggggcgaactgggcggcctgatcctgacgaacttcgaggtccacgacttcccgaccgggcgcgactactttgacggcttctattacggccaggacttcggcttcaaccacgccgacgcgatcctggggatcggctggaaggacggcgaaatctatgtcacgtctgaaatatacgtcttcgagaaggacaccgaagaaataatcagccttgcccgtcaggcccacgtcgacccccgcgtcgaaatgttctgtgattcagcagagccggaccggatcaggacatggcagaaggccggcttccgggcctatcccgtgaagaaagagcctggaagcgtgaaggcccagatcgacttcctgaaaggccggaaggtccacattcacccttcatgtgtgaacaccttgaaggaagtccaacagtggaaatggaaaaaagacccgaccacgggcctttacatcgacgaaccagtggagttcatggacgacgctatggcggcccttcgctatggcgtggagcgtccgcgccgtggatcgtctatcgaagttttgaaatgaggtggtatgaatggaactgtccgtcatggaccggatcaatatgatcctgtcggaccccgaaaaggcgcctatgaccctggcccagatcgtcagtgaggaaatcagggagttcaaggcgtccgaacagtacaagatcattctggaagccgaacagtattacagaaaccggtcggccgtccagaagaagaccgtggacgtcgccaacaggtcgaacgccaagatcgaacggccgatcctgaaaaaactggtggaccagaaggcgaactaccttctggcgaagccctggaccgtggacaccgaaagcgaaaaatacggcgcggccctgaacgaagtcttcgaccagaccttccgccggaagatcaagtccctgggaaaaggcgctgtgaagtccgggattgcctggattcaaccctattttgacgacgacggccgcctggccttcatgcgcgtcccttcgacagaggtcgtccccctgtggcgggattcagagcgaacgaagctggacgccttcattcgcttctatgatcaggtcatttacatcgggaccaggaagcacacgatcacacacgccgagttttggtggaccggcggcgtcaagtatttcaagaccgacgccttcgccgggaccggcgccggggacttttccgtggacaaggaccacgggacagaggaaaacgactggaccgaaccacacttcgtcgtcaacgaaaagccctacaactgggaagaagttccgattgcgtggctgaaatacaacgaagaagaacttcccctttgctatttcatcaaggacctgatcgacgacatcaactggcagaacagtgtcacggccgacgtccttcgggacgtggcgaagttcatctatatccttcggaactacggcggaaccgatctggcggagttcttgaaggatttgaaggaacacatggcgatcaaggtgacgtccgacggcggggtcgacaaattacaggccgatctgaacatcgacgccgtcatggccttcctggacaatgagcgccgggacatttacgacttcgcggccgccgtggacacgaaggacccggacctggggaacgccagcggaacggcgatcaacttccgatatatggacctggacgccgactgtgattccctgggaaccgaacttcaagacaccttccaccggctgaaactgttcattgacgtctacttccagatcaccgggaagggcgacttcaccggcgacaccttcgacattctgttcaacatggaccttccggtcaatgaaacggacgtgatcaacaacgcccggaccagtgacggcctgatcagcaagcggacgatccttcaaaatcacccctgggtgaaggacgtcgacgaagaactggatcagcttgacgccgaaaagaaggccgctatggaagacttcggcgccggcctgttcgacgattccctgggcgccgggaataggccccaggaggccaggaaggccaggaaggagccgccggaaaaggtggtggcgtaaatgcggaataaagaatactggatcgccagggccattcagcgcgaaaatgaagcccatcttcgcggcgtcgacctgacggcgaaaatgttccaggaatacgacacggccgcgaaggcgatccggaaggagatcggcgacttctacgggaagtatgccgggaagtatggcctgacctatgaccaggccgtccaccttctgacccggaaggagttccaggaatggaaggcaaccctggccgaatacgtcgccaggatcgccagtgagccggaccaccatgtcaaggcccttctgacggcccaactggacgccctgtccacgaacagccgcatttcccgccttgaagcccttctgggccagattgacctgaaactgaacgatctgttcgatcagggcgtggcccagatgaaggcggagttcggcgacaccttccaggaaggctactacaaaaaggtctatgacattcagtcccgcgccggcttcatggcggagtttgcgaagctggacgaagccgtggtcgaagacgtcctgtcctatccctggtccggggctatgttttccgacaggctatggcagaacaaacaggcccttctgttccacgtcagggaaacgatcacacaaggcgtcatgcaagggaaaagcgtcgccgaaatgtcgaaggccctgtccgccagaatgggccagtcctacaaggccgccgaacgcctgatccggaccgaaacgaaccatttccacggggaagcggacaaggccgcctataaggccgccggcgtcgacgaatatgaatacgtcgccacgctggacagtcggacctgtgaaacgtgcgcggccctggacgggaaacacttcaaggtcaaggacgcccagtccggcgtcaactatccgcccatgcacccgaatgaccgttgtactacggtcgaatatgacccggacgacgccctggactggtacaattccgggaaacccatgccggagaatatgacctatgaagaatggtatgatcaacaggtcgcccagaatggcgccggctacgttgaaacagagcggaaaaaggcgtataatatgaagaccgacgccgcccagttcacccagtacgccgaacgcctgggatcggacgcccctgtcagccttgacgccttccaggaaatgaagtacacagacccggacgcctggtccgacctgaaatccttctattcctacaaggggcgcgtcccggaatccaccaggggacacttcgacgcctacaagcggatcagggcgacaggaatccacgggaccgtcagggtcccgccggcgccggtcgatctggacacgctgaccctggacgcggcacacatagccgccaggggccacggcgtcaccctggacgaagcgaaggcgttcattcagaaggccggcttctccataaggcggaagcattggaccggcgacgtcttcgtcaactactattccgccgaaggcgcggcctatgtccgcgtcggcgacggcgtgatccggaccgccttcaaggaatcagagttcgacgacaaggtcagaaaggccgtggacgctatggagggatcaaaatgaaccagaagaccgtcttctgtcccctgtgtggccgggaagtcaccggggacgaatgtttcgatatatcaatggtcgccgaagggaccacgccagaccggttccttccgaacgacatcaagcccgaacaggtgaaagcaaatgaaaacacctgtttgaagtgtaaataccacccggaataagacgtcgcccgtctgggcggcgttttattacaccctttttcgttgaaaatggcgttccccgtcctggggggcgcttttttcatacccattcagccgcccccgcccggcgaacaggcgggaccgcaaagcgcgtggaagtcgcgatataaacagcgggaacagaaaggagaatccaccatgatcacagagagcgtcagaaccattctgggggcagacctggcgaaccaggtcgaagcggccctgaaaggcaaaggcaaggacggaaaggacgtggacctggtcgtcggaaacgacggttccttcgtcccggccgaaaagttcaacggcgcgaacagcggcaagaacagcgcggaaaacgccctgaaagccgccgccgaagccttgaaggcgatcggagggtccggcgatcccgcgaagatcgcggacgacgtcaaggccgcccaggccacgattgacacccttcggaccgaccaccagaaggaaatcgccagaatccagaagaacacggcccttcgtctggccctgtccgacaaggcccacgatccggccgacatcatttcccttctggacctggacaagatcgacgtcgacgacgccggcggcctgaaaacagacttggaaggtcttctgaaacctttgaaggaatcgaagccgtatctgttcaagacccaggagccgtcgaaggaccccaacatcaagggcgcgaagcccgctgaccctggcgcacgtcaggagccggcctcaaaggtcgacggtcctgtcgtgatctaacccaccaacccaccaacacacgaaaggaatgattttattatggcaagaaccaaagcgatcagcctgatccagaacggggcgacgaaggtcgaactggccgaactgtccggtctggtgatccagaacattcagaaggacaccctggcgtccggcctgaaatcccagtcctacaccggcaaccccgccagcgggtccgtcgagtatcgccgcttcaagaacagcgtgtcccaggactacgggaccgccagagccgccggcaagggaaccgcgctgaccgttcccccgaccaccgtgaacctgaacacccacaaggagatcgtggaggaagccgcgaagttcgacctggacaccttcggcgtcggaaacatcatggcccggcgcgctgacaaccacgtcgacaccgtggcggcagagttcgacacggccttcttccaggcggccttcgacgaagggaccgccttcaccgcccccgccaacgcaaccgatccggggaagatcgtcgaagcgttgatccagacccttgaaaccgtcaagaacgacttcgtcaggggcgttccccgcaacatcatgcgcctggtcctgtcccccgccttctatggcgatatgcgcgactacctggacaagaccgtccacaatgcgaacgtggacaccgccgccgaagacttcaccaccttccacggcgtccgcgtctattccagcgtcttccttcccgcgaacgcgaaggcggtcattatgatcgaaggcgcgatcgcacagccggcggtcatttacccctacaaggacccggagaagatccccctgtccaacgactacggcgtgtccatgttctacgacttcggaacgaaggtcctgacccctgacctggtcttcacctattccgtcaccgagtaaaggaggaaccgacatgaagttcaagaataagcagaccggcgcgatcctggaaccgaagaacgaaatggtcctgaatcagcttcgcaagagtgaggactacaccccctacgacggccaggacgccgcccaggacggcccgaagcccctgtcgaagatgaataagggcgaacttctggcggccgcccaggcggccggaatcgacgtccctgacggcgccacgaaggacgacatcatcgaactgatccaggcgaacagcggcaaccagtaaaccggggccgccggaaaggtggtggaaacgtgcttgatcagattctttcttccctggacggcctgactgaccttgaacgcgcggaagtccttcgtgtccttatgtcgaaggacgaccgtctggcgaaggtcaaggcccttctggggatcactgggacagaccaggacgacctgatcgccttcgtgatcgaaacggtcgaagccctggtcctgtcctacatcaaccaggacacgcttccggccccgctggaaaagcccctgatcgtcatgtgtgtcagctactacaaggccgccggcctggggaccacccaggcggccgccggtccggtcgcgtctgtgaagcgcggggacgttcagacgtccttcgcgaacgcttccggcgcttccggatcggcgtcgacctttaacctgggcgcggacggaagcgacttcttcggctggcggaccgtcctgaacgaataccgaaaattaaggtggtgatctatatgttcggaaaccctggcgcagagcgcgccgcgatcgaactgacctacgaagacaccgccacgatcaccagaacgacccaacagacgggggcgaacaagatcacgaagtccgtccctggcgtgatttacagtgaaatcatttgcgcgctgtcgtattcaggaagtgacaaaagcgaacagacgaaggcacagaacgaagtcgactatgacgccgtgatcttcgccgcgcctgaccttctggtccttcctggcgacagtgtgagcctgaaacggttcggacgcgacaacccttccagtcagattcttctgtccttccaggtcgtcggccgcccttccctgtatgcgacacaccaggaaatcaaggtgaaggaaggtgatctggcgtgacgttgaatctgtttctggaagcggtcgccgcgaagctgaccggaatctggccggaccggaaggtccatgtcgacgaaatcccgaaggattccgacggccagttcttcgtcgggatcatcgaatcgaaccaggaaaagcacctggaccggcgccggaaacggtcgatccagtttgaagtcctgtacttccttcggtcgaaggacacaatggacttcaacgcatgggccgaagaaatgtacgacaattttgaagaactgacggtccaggaagcccccggcaagacaaggacgatccgtctgaccgggcagaaggccaggccggacgggaacagccgcgtcttccagttccttttcgacgcggacttcttcttcgtcctgacgccgccggaaatcccgttcatggaagacctggaacatacggaggttacgaagtaatggcgaaaacgaccaaaaaggccgccggcacagaccaggcgccggccccggccttcacaaaggatcaactggtcaaaagtaaaaccctgggccttcccgtggacgccgtcatggccgttctggaagacgggaagacctacacgaaggatcaggccgtcggcctggtcaacgattttctggaaaggaaggtgtgagttatgcctattggtggcggaacttttaccgttcaaaacaagattcttcccggcgcatacatcaactttgtgagcctgggaagcgtcgtgaaaatggggacgcgcgggatcgcggcccttcccctggaactgaactgggggcctgaaaacaaggtcttttccatgtatgcggaagacttcaacaaaaccgccctgaacgtgttcggctacgacccgacggaccccgccgtccttctggtccgtgaagccatgaaacgcgccagggccgttctgatctatcgtgtcaattccggcggcgacaaggccacggccacgatcggcggaatgaccgtcacggccgcctggggcggaacgcgcggaaacgacgtcgccgtcgctgtcctggcgaacgctgacgacgcgacgaaggtcgacgtcgtgacctaccttgacggaatggtcgtggacacccagaccgtcgtcaagaccgaaggatcggccggcctgaaagcgaatgacttcgtgaccttcgggtccgcttccgccctggaagtggccgtcgcgacgaagctgaccggcggcacgaacgggaccgtcaacggcggcgcccacacggccgccctgaacggcttcgaggtcgaaaccttcagcgtgatcggctatcccggaaccgacgccacaatcaaggccctgtatgcggccttcgtgaagcgccttcgcgacgatgaagggaagaagatcgtcggcgtcctgtaccagtacgccggggacaacatcggcctgatcaacgtcaaaaacggcgtcgtcctgtccgacgggaccaccgtgaccggcgacaaggcggtcgcctgggtggctggcgcttccgctggggcggaaatcaacgaaagcctgacgaacgacacctatgacgacgccgtggacgtggacatcaaatatacgaagtcccagtttgaagcggcgattcaggccggcgagttcgttttctatgcggacaacggcgcggcccgtgtcctgaccgacatcaacagcctgaccaccttcgggggcggcgtgacggaagactggacgtcgaaccgcgtgatccgcgtcctggacggctgggcgaacgacgtcgcccgtatcttcggcgattcctacatcggccgcgtgaccaacagcgacaccggccgccagcttttcaaggccgaccttgtgtccctggccttacagtatcaggggatcgacgcgatcagcgacttcaagtccgaagacatcaccattcagcagggcaacgggaaacgcgacgtcgccgtcgattccgccctgaaaccgaacgacagtatggaaaaactgtatatgactactgtcgtcaactaacggaaggagtgaaccagaatgagaaccctgaacgcgccggacaccatttccggcaaggaaggccgcgcctatgcgaagatcaacggcaacaacgaagaccttttcatggcgaagaacatcgaatccaccgttgagaaggcgaagtccgaagtcaaggcgatcgggaagcgcatgaccggccacaagaccaccggcggcaacggaaccgggtccatgaccctttactacctgacgcccctgttccgcgacatgatcaaacagtggaaggaaaccggcgtcgacgtctacttcgacatggtcgtcgagaacgacgaccccgaatcttccgccgggaaacagtcggtccttctgatcgggtgtaacctggattccacggtcctggcgaagctggacggcgacagcgacgaccccctggacgaagacgtcgacttcacctttgaggacttcgacatcttgacccccttcacccagttctaaacagaaagcgaggaaacgaaaatgggaaaactgcaagattttcttatggaacaggacgtcgcggcccaggcccaggtcgaagtcacgatcgcgccctttcccttccccttcgtggtgaagtctatcaccgaagcggagaataaggcaatccggaagacctgtcagaagatcagcttcgacaagaagacccgccagaagcagatcgaaaccgacaccgacctttacaacagccgccttgtggcggcctgttgcgtcgaacccaacttcaaggacgccgcccttcaagagaaatacagcgtccgtggagccgaagacctgatcgaccgccttttgaagcccggccagtacaccgaccttctgatcgcggtccaggagatcaacggcttcgctgacgacgtgaacgatttgagggacgaagcaaaaaactaatcacggggggcggaaatgacgcggacgccgacggcgaatcggtctacgcccattacgccctccaccggctgaaaatccttccgggacaacttctggcccttcccagacgggaacgggccttcatttatgcttccattgaccttcaaatagagaaggagaaaaaggaagcggcgaaggcgaaacggaagggcaagaaaggcaggtgataacgtggccggagtaaacacacaattcacgatccaggaccgcatgacgtcccgcctgaacaccatgatcaacgcttcggaacgtctgaaccggtccctggacgccacggacgccctgaccgaaaccgtcgatccgggggcgcccttcgagagaagcgcggccccgatcgcggcggccggtcgccaggtcgacaacttcaacgaacgccaggaacgcgccgaacagggcgcgaaccgggtgaaaagtgtctggtccaaaatgggcggcctgatccgatccgctatggcggcgttcagcgcgaagaagatcgtggaactggcggacagcatgaccaccacccgcgcccgtcttgacctgatgaacgacggccttcaaacgacggcagaacttcaagatatgatcatggcgtccgcgaaccggtcgcgcgcttcctaccaggccacgaccgacgccgtttccaaaatgggaattatggcgaaggacgccttcaacagcaacgaagaactgatcgccttttccgaactgatcaacaaacagttcacgatcgccggcacgtcggccgccggaatcgacgcggccatgttgcaacttacacaggccatgtcgtccggcgtccttcgcggcgaggaattgaacagcgtctttgaacaggcgccgaccattatccaaacgatcgccgactatctgggggtccctatcgggaaaatccgggaaatggccgccgaaggccagatcacgtcgacgatcgtgaaaaatgccatgttggcgtcggcggacgaaatcaacgcgaagtttgaacaaatgcctatgaccttttcccaggtctggacgatcgcgaagaatacgatcctggaagccttcacccctgtcctgaccatgatcggccagggcgcacagtggatttacgacaactggtccacgatcgccccaatcttctggggcttggcggccgccgtcctgggctatgccctggccctgggaatccagacggccgcgacatggatcgcgaccggcgccgcccaggcgttcttcacgacgcttctgacgaaccccctgttctggatcgccctggcgatcggcgtcgtcgtggccgcaatctataagtgggtccagtccgtcggcgggattaaagtcgcctggctgattgcctgtaacgcgatcctgacggcctggtcctgggtgaaaatcggctttatgaccggcgtttactgggtgatgaacctgttcaaccggttacaactgaccttcgccacggtcagcatgaatattcagaacttctgtggcgacatgaaggccggcgtcctgatgatccttcaaaacatggtcaacggggcaatcgacattataaacggctttatcaacaccctgaacaaaatccccggcgtgaacatcggtctgatcgaccaggtcactttcgggaccacggcacagcttgaaaatgaagccgcgaaacaggccagagccgccgaccttgcggcctatcaggatcagatcaatcagcagatcgcagaccgggacgcggccctggattccatgaaggcccaggcgcgcgcggaaacggcacagcgggaagcggagatcgccgccgcaaaggccgaatcggccgccgccggaagcaaaagcaccgaaccggactgggcggcctacgctaccggagccggccccggcgacattggaaacgtggaccatgtcggttccgtcggttccgtggacgaagacgtcaacatagccgaagaagacttgaagttccttcgggacgtcgccgaaatgcgctatgtccagaacttcgtgaccctgaccccgaccgtggccgtggacgcgaagatcagtgaaaaggtggacgtcgacgaagtagtcggccggatcgaagcgaaactggaagatgaatttgccgcggccgccgagggggtgtacgcatgacgaactatggaatggccctgatcatagagggacgggaagtcagtcttcccgtccttcccgctaaattgaaggtaacgtcgcccggcaagaacgaaacaacgaccgttcttgaactgggcgaaatccttcgccttcggaagaagggccttcggactgtggcctgggactgtttcttcccggtccatgacgccccctatgtgacggggcagatcagggacccggtcgagatcgtccaggccattcaggccgcgcgggacaccctgacgccgatccgtcttctgatcacaggaacggacctggacattaacgtccgaatggggatcgaaaccttcgactatgaagaacgatccggcgaactgggcgacctttactattcgatcaagctgtcggaatggaaggactattccccccggaagatcgtccttccggcagagccgaagaagccggcgaaggcgaaggagcctgaacggaccggcaagccgaaggccgccgcgaagaagacctacaccgtgaagcctggggactgtctgtggaatatcgcgaagaagttctacggcaagggaagcgactacaccaaaatctataacgcgaacaaggggacgatcgggtcgaacccgaatctgatctacgcgggacaggttttgacgatcccatgagcatttctattttgtaccagaacaacgaaagcggcgacgccttcgacgtgaccacgttgacgtccgccgcgaagtggtcgacgaaacggtccggttcccccgcttccctggaactgaccgtcgtcgccgacgattccgtggtatggacccacggcgggatcgtcgtcctgaaaaacgggtccaccggccttttctatggctatgtcgtgaagatcagctatgacgaaaaggaacaggtcaaggtcacagcctacgaccagacctggcatttgaagaagaacaaggaaacctatgttttcaacggcaaacgcgccgaccagattttaacccagatcgccgccgacttcggtctgaaatgcggcgccctggaaaataccggctacgcaatcccgtccatgatcgaggacggccagacccttttcgacatcgtcttgaaggccctggaccacaccctgatcaacacagggaaaatgttcgtcctgtgggacgacttcgggtcccttcggatcaccgacgtcgcgaagtcgaagctggacctgttcgtcggcgattccagtctggcgacgggctacacctacgaatcggacatcgacgccgaagcctacaacaagatcaagctggtgaaggacaacaagaccaccgggaaacgggacgtctacatcttccaggattcaaagaacatgaaactgtggggcgtccttcaaaactatgaagtcgtcgatgaaagcatgaacgaagcccagatcaaggaacgcggcggtcaaatgctggccctttacaaccggccgaagaagtcgtttgaagtgaaggcgatcatggacctgtcggtccgcgccggccgcgccctgtatatcgggatcaagaaaatcggcgtcagcgccttcttcatagtcgaggaaacaagcgtcgatctgttgaaggaaactatgactttgaagttaaaggtggtgtgatatgagcctattagacactatgaaacaggtcgccggacagacgcagaacgcgaacgtcccggcggcctttctgtttggcacagtgacgaagaagtcgccgctgacgatccgcgtcgacaaccggttcgacatttccggggacgcgatcgtcctgatgaaagagttcaaggccggcgcctatccgacccacacccacacgatcgacccccatgaccacgtcgtcccttcccattcgacccaggccgccggcgaagggccgcacacccacggcgtcagcgcgttccacacgcagacgaccggcctgacgacgaacccggaagtttacttcggtttggccgagggcgaccgggtggtccttcttcggaatcagggcggacagtcgttccttgtgctgggaagggtgtgatcttatggccttgataccgacacaggacacggtcacgatcggccaggacgtcgagatcgtccagccggccgaccagaccaccagaacctataaactggacattgaagccggccgcgtggccggctttgttgacgaaacggaagccatgaaacaggcaatcctgaaaatccttctgacggaacggttcgactacctgatctattcctggaactatggaatcgaactgaacgacatcgtcgggaaaagttttcaagtgctatcaagtgaaatcaagcgcgtgatccgcgaagcccttctggcggacagtcggatcacggacgtcaccgacttcatcgtggagcagatcgacaaaaggaccgttcacgtcagcttcaccgccgaaacgatcttcggcgaaatccctgttgaaaggagggtgacaactggtgtttgagaatatgacctttgaaaacatcatggaccgctgtctggcccgtgtgtcttcttccgtggacaagcgcgaagggtcgatcgtctatgacgcgatcgccccggcggcggccgaactggcgatcctttacatcgaacttgcctatcttatggaccgggccttccctgacaccgaaaccggcgacgacctgacgaagaagtgtcaggaacgaagcgtcttccggaacgacgcgaagttcgcgatccggaagggctacttcgagaagggggacggttccgcctgtgaagtggagatcggaacccgcttttctggcggcgacattaacttcgttgtcaccgagcgggtggccgccggccagtacagactgacgtccgaaaccgccggcgccgtcgggaatgaatatgtcgggggccttttcccgatcgactacgtcccggacctggcggcggcgcgcctggccgacatcttgatcccaggcgaagacgaagaaagcgacgacagccttcggacgcgctattttgcgtcccttgtgtcccaggcgttcggcgggaatatcgccgactataagggcaaggttgaacagcttcaaggcgtgggcgccgtgaaggtgtttcctgtctggaatggcggcgggaccgtgaaggtcgtggtcgtggacagcgaatggaccgtcccttcggccgacctggtccagagcgtccaggaagcggtcgaccctgtcgggacccaggggaccggcgtcggcctggccccgatcggccacgtcgtcactgtcaccggcgtccgtgggacgacgatcaacgtgtctttcagcctgacctttgacgccggcgcgtcctgggccagcgttcagaccgccgtgaaagcggcgatccagtcctacttcgacgaactgacccacacctgggccgacacggacggcctgatcgtccgcgtcagccagatcgaaacgaaggtcttgaacgtgcccggcgtcattgacatcaccggaacgaagatcaacgggcagaccgcgaatatttccctggacgctgacgcgatcccggtcctgggggtggtcacaaatggaacttaaagcatactggccgcttttccttcaagacgtggtcgagttcgaccagatcgccggcgccgaacagccggagttccagaaggccgtccaggacgtcagaaacgccgctgacgactttttcctggtgagcctgtccgaatatgggtgttcccgttgggaagccattctgggcctttctgtggcccctggtgacaccctggaccaacgccgcgaaagaatccggatcagataccttgaccggcttccctacacatacagggcgcttctgtcctatctgtcgaccgtcagcaaagacttcacggtccgcctggataacgacgcctatgaactttttgtccgaatcaccttgagcggctacacacagcgcgacgcgctgatcgccgtcctgaaacagatgattccggcgaacctggtccttctgacccagaccgcaatcccccaggacgtcgcccggccggcttgcgtcgcgggcgcggcaacggtcagcctggtcaggcatgaacaccaacccgaaggaggaaacccgaatggcacgatttaagtcaacgatcaccgacaagggggccgaagtgctgacccgcttcctggcgcaaggccgccaggtcgccctgatccgcgccgccgtgggcgacggcgtggcggaagtcagcccgaacaccctgtccgacctggtgaaccccgtcccgctggacgcccagatcggcgaaaagaccttcatcgaaggcgacgtgtcctatatgaaaatccctgtccaggtgacgaacgccggcctggaagcggcccagtacgtccgcgaggtcgcgacgtatgccctggacgaaaacggcgcggccttcatgttcacctattcctggatcgacggcccggacagcgacaacattcttccggcctgttccttcctggacaccccgtcaatggcagacgaaggcgacaccgtccacgtccacgacgtcgccgtggtggtgacgaatcaggaaaacagcgcggtcacggtccaggtgacagccgggtcctatgtgacccgcgcgcaaatgaccgcctacgcggcgccgcttctccacgtccacgccgcttcggacgtgaacgagagcaacggcgacagcgtcgaaacggttcagcgccgccaggacttcgatatttccgcgatcaaggaacaactggacaccggcttcacggggaccaccgtgacccacaccttcgcgccggcacaactggcccagtggaaaggctacgacgggaccgggcttcccgaaggaatcctggacaccgccgcgaatcggctttatttatgaccccgttcgcctgtacgccgtcggaaacgtcgtgtctgttatctaacctattcaccgaacttcggcccgtgtgcggccgctgtgagggcgacagcgtcgttatttgcggcctgacctatgagggggaggaacagaccgtcgtccttcgggactacggcttcgactattccggccggcgcgaaaccgttgacctgatcagaaagcgaaggtgtatctatgggaacaaggcgcaatttccagcgcaaaacgaacgggactgaaagcccgcttcacgtccttcctgtggcgtcgaagctgatcgactacaccctggaactgaccgacaacacgaagcacttcccgaagaaggtccgcttctccattgtgaaccggattcaggatcgtgttctggcgatccgcgacgacctggtggacgcgaatgaaatctttccgatcctggacgaacaggacaagatcgaccgactgaaacttcaacgccgcgcgctgacagggtgcaagaaacttctgtatctgatcgaactgtcgaagaagcgcggctacatcgacacggggaccttcgactattggacgaagctgaccctggacgtcaagtttatgaccgccgcctggtataaggccgaaacagagccgaaggagccgaccgaaaaggccgacgccgaagccccggagccggccgcgccggcggaaggttaattgaatattagggtacggcctgacccccgaacgccggcaacgcgaacaacgcgcggaatgtcaacaccgacggcagtctgaacaacaacaacgcctggaatggcaacaacggcgtccggccggatttggtggaaaacgcgaccgagtagggcgacgaacccgaaagcagaggaccccaacaaaggaggccgtatccttcccgacgccggaaaggccagggtaaacacatgaccgtcgacgcgagggcttcggctacgacgcccggactacaagcggcggggaggttttttattatgaaaagcgaagtcacacagatcccgccttccgacttcgccgtcatgtccgacttcaacaacctgtatcagtcctatctggacgcccggaaggggaaacgctggaaaatggcggtcgtccgctatgaagtgaacgcgctggaaaacaccatgttccttcactatatgctgacgtcgaagaaataccgcccttctccatacaacacgttcctgatccatgagccgaaggaaagggtgatcatgtataacggatttaaggacaagatcgtccagcatagcctgtgcgactatgtcctgggacccgcgctgtcgaagtcgttcatatatgacaactacgccagtcaggaaggcaagggaacacacttcggcctggaccgcctgaaatacttcatgcagaggtattacaggcagaacgggccggccggctgggtattgaaatgcgatataacgaagtatttctaccgtatcaatcacgacgttttgaagtcacagcttcgtcggctgatccacgatcccgacgtcctgtggcttcttgatttgatcatagattccaccgaagggccgggaatcccgatcgggaatcacacttcacagtggttcgcggtcctgtacctgtccggaatggaccacatgatcaaagaacgcctgggaatcaagttctacggccgctacatggacgacttctatttgatccaccaggacaaggactatttgatctattgcctggaagaaatcaagaagtatctggtccccctgggcctggaactaaatcacaagacggcgatcttcccgctgtcccaggggatcgacttcctgggattcaggacgtacatgacggacagtgggaaggtcgtccgcaaaatacgccgcgacagcaagaaccggatcaggcggaaattgaagaagttccgtcaccttctggacgaaggccggatcaccttcgacacagtggtccagtcttattcgtcatggaccggtcacgccggccacggcaacagtcaccatttgatcaggcagacggacgaactgttcttcgacctgttcaaaaaagaattggaggaataccatgtcaaaacgaatgtcgacgttacccgttggcgcgatcgtgaagtcggtcaatacgaagtataacggcgctgtgatccgcttcgtcattggccgccaggcttccgaccgcgtcggcctgttgacggaaaagatcatcaccttgaagtgtttcgacgcgaaggagccttccaactccaacagtagccgcgccagttacggcaacaaccgcgccagcgtgtcgaaccttcttctgtggctgaacagcgcggcggccgccggcggctggtataaggcacagcacagcgccgacgccccgccttcggccgcgaacgtctggtccggctataacgaatacgaccaggaagccggcttcctgtccttctttgaagcggacttccggaacgcccttctggacgacacgatcaccgtcgcgaagaacaccgtcaccgacggcggcgggtccgaacagatcacgcggaaggtccgccttctgacccgaaccgaagtcttcggggacaccgaaaacggaatcacagaagggacccagtggcccctattcaccgacgcgaacagccggaaggcatacccgacggccgaagctgtcagcaagtccgaatataccaattcgagcctgaacgcttcgtccccctggtggtggtggcttctgaccccgtacgccggcggcgcgagcggcgcgcggggtgtctacgccggcggcagtctggtctactaccacgcctggggtggcgacggcggcgtccggccggctttgtttttggctcctgatactctggtatctgatacaacggacacagacggagcctatattattcagtggaatcaaccgccgaccaccccttcgagcatttcccacgcgaccccccagtctggaaagtccctgacgatcacgaccggcgggtccaccgacccggaggggaacgcgatcaaatatgtgtgggaacgccgggtcgattccgggaactatgtccagatcgggatcaccacggcgaagtcgatcaccgacaccgtcccgacgtccgggacgaactaccaggtccgggtgaaggccgttgacgcgaacggcgcggaatcggcgtataaaaccgggacggccacggccatttcctacaacaccgcccccgtgatcagcggaagcaatcagaacgtcggcgcgaagaccgcccccctggcctacaaatacaccgtcaccgacgccgaagcgtcgtcccagaccttgaccgtcacggaaaccctgactaacgggtccgaaacgatcacccttcgccagtacagggccacaagcggcgcccagaacacggcggacctgacgtctgtgtggcttcgccttctggccgggacccacgtcctgaaaatcaccgccagcgacggcgccggcgggacggccacgcgacagatcacattcagccgaaccgtgaccaggatcgccgcgtcccgcgcgatcagtaccgacgctatggtgacgaaggtcttcctgtccctgtacccggcggacattccggccgacgcggtccttcactgtgaggtcacgaacaacccgttcgacacgacccccgtctgggaagacatttcttccaaagtcggccgcttcgttcacattttccagaacaccaccgccgcgaagggctacggcctggcctaccgcttcacgatcacgaagggcggccagacggtcgaggtcgtccaggcgacggtccggttcgcgtaaaggagggattcaccatgttcaaccctgaaacctgtgaccacgtcagcatgaaggacgcccaggaacaggaacgacagaacccggcggcccaggccgccagggccgcgtcgatcgccttcgtgtccctggccgaagccggccagatcgacgacgtcacggccgccgaaaacgtcagtcagttcagcccgtgggcctaccctgtcgcctacaaagccggaaatatccggaagttcggcggcgaactgttccgctgtgtccaggaacacacgtcacaagcggactggacgccgccggcggccgcgtccctgtggacgaagatcggggaccccggcgaggaatggcctgcctggtcacagccgatcggcgtacacgacgcctacaacatcggcgacaaagtgtcccataacgggaaacactggacgtctgacaccgacgggaacgtctgggaacccggcgtctacggctggaccgaacagaactaaatcacgaagggcgggggaaggtccccgcccttcttcatacccaggaaggagaaaagaccatgaatgaacaacagcttcgccagaaggtcgtcgagatcgcgaagggttatgtcggcgtcaaagaaggaaccgccgcccaccggaagatcgtcgacctatacaacagtcacaagcccctggcgcgtggctatcccctgaaatacaccgacgcctggtgttccggctttgcgtccgctgtggcgatccaggccggcctgacggacatcattccgacagaagtcgggtgtggaaagcatatcgccctattccagaagatcgggcgctgggtcgagaatgacgcctacgtcccggagcctggcgactacatcttctacgactgggacgacggggccaactaccagaacaccgacaacaccgccgccccggaccacgtcgggatcgtgtgcgaggtcagcggcgggaagatcaccgtcgtcgagggcaacaagaacaacgccgtcggcttccggaccctggacgtgaacggccgctatattcgcggcttcggcgtccctgactacgccgcaaaggcggacaaggccgtcgtgacggccacgaagggaaccgccgaccagaagtccttcatcaacaagatcggccccctggcggccgccgacatgaagaagaacgggattctggcgtccctgacgatcgcccaggcgatccttgaatccggctggggaaagtccggcctgaccacggccgcgaacaacctgttcgggatcaaggggacctataacggccagggctacacttgcaagacccaggaatgggacgggaagaaatatgtgaccgtggacgccacgttccgaaaatacccgtcctgggcggaatccctggcggatcattccgccctgttcaaccgcctggaccgttacaaaaaccttcgcggcctgaccgactataaactggcctgtcagtatgtccgcgaagacggctacgccacggacccgaactatacggcgaagctggtcagcctgatcgaaacctatgacctgacaacctgggacggcgccggcgggaagccccagggaaccggccaggcgtccggcgaaaagacctacaccgtaaaggccggcgacaccctgtccgggatcgcggcgaagtacgggaccacctaccaggcgatcgccgcctataacgggatcaagaacccgaacctgatcttcgtcggccagaaaatcaagattccggccggcaacgccagcgcccagaaggcgccgaaaatctacactgtgaaaaagggggacagcctgtgggcgatcgcggcttcgcaacttggaaacggttcgcgctggccggaaatccaaaagctgaacggcctgacgtccacgactatctacgcggggcaaaaattaaagattccggactgatccggaaggaaagcaggtgcaaaatggatcatatcaacactttgaaggcgtccgtcgtggcgttcttcggcgcgctgacggcggccttcggctggttcggctggctggtgatcatgttcttcctgtgcatggtgatcgactacctgaccgggtcggcggccgctatgcagaaaggcgaatggtcttcggcggtcgccagagccggcctgtggcacaaatgcggatcgctgatcgcggtcattgtgtccgggctggccgacatcgtcgtcggcctggtggtcaacaatatcccggcgatcacccttcccttcgactatacggtcttaatttgcccgatcgtggtcgtgtggtacattctgacggaactgggaagcattacggagaacgccggcgccctgggcgcccctgtcccgaagttcctgaaacagatgatcaaagtcttcaaggacgtcaccgacgccacgggcgacaagctgtccagcgacggtcgcgacgaccaggaagacaccggccaggaataaaccccagaaacagcgcaaagggggcggggcaacccgcccccagtcctaccggaaaggggtgacgaactatggcggttcacaaaaaggacctggccctgttcacggcccaacttcaagccctgaaagatgatattccggagatcatggacacgatcgccgtcggcgaaggcgtctacgccgtaaaacaggcccggctgatctgcaaaaacgattcccccgacatcgtcaatactggcgactatcggcggaactggaaaagcgacaggcgggcgcgccggagcgggaagaagtacatcgtccggttttataatccgctggactacgccggacacctggaacacggattccgaagtcacttcgtccccggtcactgggaaggattcaccttcgtatataaccgggacgacccggaaggcggaatgttcgtcggcccgaagggcggctatgtgcgcggtcatttcaccatgaaaagggccgtcaagcggaccctgaacacccaacaggccagagtgacccggaagatcgacagggccataaacaaccgcatgaaatgaagaaggcggacgggaaaacccgtccgcctttttttattttctgacgaccatgtcaagggccttcgcgaagtgtccctggcgttccacggtcaggcgataagtcttcgccccggcctggatcataagccgatcgccttccggcgtgatcgccgaaatggcgtccagtttacagtcgaagccgttctgtttcgacaggaaaacgatccgcctgtttgtcaggatcacctggccgacgaaagaatccgtgacgtcattgtaaaccgtctgactggccccgccgccggtccgaagcgacacgcccttcgccacgcggacgctgacgccgccgcccgatccggtccggccgaccgccttcgtctttgtgatatagcgccgcgccggtccgaagaaatgggcgacttcgccttcacccaggaccaccgggacgccaggcagaaccggaagaacgccggcctgaatctgttcaagttcctgatctgtcataaatgcctgttgcgcggcggcgcgtttcgccttcttcctggcgccggccttcgcaccgcgccagaagcacaaaaccgccagaaggacgaaaatcagggtgatcacccattcgatccccgtcttatattcggccgccgtggtcaacgtgatcagcgcggccaggccggccaggatcgcagaaaggaccccgcctattttccaccccatgtattaacctcccgtctgaattattttgaatctatggttcatatccatgattataattcgcctttcatggtaatgtcaagtaaactactgaataaacccatgaaagaaggcggaaaagtgaagaagctggaatacctgggccggcggaatatctgtggggagcgcgtcaggaaggaacgtgtcacccggcgcatatcacaggaacgcctggccgctaaaatgcaaatgcgcggcgtcgagatagaacaggacgcaatcagccgaattgaatctggcgatcggctggtcacggactacgaacttcgcgccttcgcggcgctttttgaagtcccgattgaaagtcttttggaaccggaagacacataatcccacggacaggaaagttcgtgggatttttttcattctcccccttgacattacgccccaaaaggcgtaatataagagcagaaaacaggaaggcggcgatcaacatgaaatcaggaagcacgaagaacacgaccaaagtcgcgcgtttgcgttgcgaaagggggctgacgcaagccgcccttgcgaaaggaaccggcgtcaatatccggacgatccagaagttcgagaacggcgaacgcgggatcgaaaccgcgtccctgtccgtggcccttcggatagctgacttcctgggcgttcacccgcgcgaactgatctgacaacgcaacgaagcccccgtcccttgccaaaaggcaaaggcgggggcctttttctgttctatgggaggaattacaatgaaacgacgcagattcaaacatttatcctgggacgaccgtctgaaaatcgaatccggcctgaaacacggcgatcccgtccagaagatcgcggacgacatcggcgtccaccggaacacgatctataacgagatcaagcgcggccagtacgaacaccttaattccgacttgaccaccgaaacccggtacagtccagagatagccgaagccgcgtacagggcgaacctggcggcaaaggggccggacctgaaaatcgggtccgaccggcgcctggcggaacacatcgaaagccgcattgtaaacgacggctattccccggcggctgtcctgggcgaaatcaaggcccaggggatcgagttcgacacgacgatctgtgaagcgacattgtattcctacatcaagaaaggcgtcttcctgaacctggaacagtgtcaccttccccgcaaggggaagaagaagcggtcctatacccgcgttcagaagaaggcggccagggcgtcggcggggaccagtatcgaaaagcggcccccagagatcgacgaccgcgctgaactgggcgactgggaaatggactgtgtcgtcgggaagaagcggacgaaggaagtccttctggtcctgtcagagcggaaaagccggaaggaaataatcatcaaaatgaaagacaagaccgctgacagcgtcgtccgcgccctggatcgccttgaacgccgctatggggctacgttcaacaaggtttttaagacgatcaccgtcgacaacgggacagagttttccgacgtgaagggcctggaacggtcctgccttcacaagggccagagccggacgaaggtctactactgtcacccctattcttcctatgagcggggaacgaacgaaaatataaacggaatgatccgccgctggttcccgaaagggaccgacttcgggaaagtgacggcgaaggcgatcaaggccgtcgaagactggatcaacacctatccgcgcggaatcctgggattctttacggcggacgacatcttccttccctgggtcgcttccctggcctgaaaagttttttcaggttttttacaatttaatcttgacttttgcgaaaaatccgaaaatttttctgttcagggccgggagctatcttcctttgtatgacgaaattttttcaggatggactcctcccagcggtcgccgtatttcatccccagcaggaagacggccacaccgatgatccccagcaggaccatagcccaaagagggagagtcagggtggcaccgcccaaggcgctggctaccagcaggccccagggacgagtgagcacaacgatcaccagaaaacggggggtggagatggcggtgagcccggccagaatgcacagcaggtcatcgggaaagaagggcaggagaaaggccaggatgaggaaagtgtctgttttggcccggacgatggagaggtacttgtcggaaatggcccggctcaccaggcggtccgcaaaagattggcccagcgcgcgtgccaggagaaagaccagcagggaggcggagaggaccgcggcgatggtgagaaaaaaggagggccaggtgccgaagagcatcccgccggcggcggcgctgaggttgctggggatgggggccagcaccacagacaggaactggagcaggaaaaaacagaggtgggagtagggagcgaactgagagatatagtcctgaagggcctgctgggaggagagggcggcgaagaagccgctgcgccacagaaagacgccgcccagggcgcacaggagcaggaccaggaccgcgctggtgattttcaggagatgtttcatgagggacctcgatcttctctttagattcgcgggacagtggaggccggcggcgcgccagcctgcatagtccctatggtatcacagaattgtggcggatgtgataagtttttcttaaattctcataaaaatgtcggagcggggcgaaaaaagagggccagcaggctgctggccctcccgggaggagcggggagcggatcacagatgaaagcgcctgcgcacttcctcgcgcagggccgggacccggcgcaccacgatgagggggatgaccagggcagcgcatactgtgagcaccaccagggaccagcccggctgccagcggcccaggaagtagcggtcgatgagcagctccacgccggagagaaaaacgccggtggtgccgatgaccagggtgatgcgggagagggtgctccggggcctggcccccatcataaagcccagaaacagcagcgccgcccccagaagcaggatgatgggcagggccagatgccaataccaggctgaaccgtccagatccacggagatcagaaagacgtagagggcgacggccagcacatctgccgacaggcggagatagaggtgcatggtgcgcaggagcagcggtggcaccagccagacccacagcatggccgccgcgccgatgacatagagggaccagatatggccgctgcgcagcaccagattgagcaggccgcagcacaccgccactgaggccagcatggaggacaccaggatggccaactccgccttggaggcggggggcacctcccgccgttcggtggggaaggggggaggagagccggtgtccaccggctgccgggggttgaccaccggggtgcggcagagggggcagaaggaggcggtgggatccagctccacgccgcagttgacacaataggacatacagaacacctcccagggacctcagcgggtccggttggactccaccttgacggggatgccttcccgtaccaggtgggtgaaaaagcgccgctccgtctcgctggaggtgccggtgccggcgaaggtgacagccatggtattgccatagctgatggaggcgcagtgaggggagggccgggtggcctgccccaggacgacctccatccgctggatgtgaggggccatctccggcgggacccggaagaggccgggattggtgtaggtggcggagaaggggcgcacccccaccagctggtaggagagggacatcaccgggttcttcaggaagatggggatcagctggagaaagcggttggctgtgaagtggacattgccggtgaagcgggcccgcatctcctggggattgatgtgcaggcgcatgtagtggtggacgtatcggaccagctcagggaaggtgtaaggccccagggtggggtccacgcagagccggacagtgaggatgaagttgcggagggtggcggaggggaaccagccccggagatcgatgggaatggccagagccgcgggcctgggacggcgggggcgctggacctcctgattctccaggatagactggaggagcactgcggagaggtattcggtgatggaggcgccgtaccgggcggcgatctccttcagccggtccacgggcagaaagcccatggtgacattcagggtgtagaagggctccgcctggctggtgttggagaaagcggtctcctgccagcggtcccgcaggacccgcttgcccgcgtaccgagcgtaggcatcctccagctcctccggacgagggggatcatccacgtccagcaggccggggccgcaggggatggggtgtcccagctcccggaggtagaccgccagcagggtgcggaaaaaggtgagggcccccgccccgtcagacacagcgtggaagacctccagggagatccggctctggtagtagaagaagcggaccagccatccgttgtcctcccggaagcggatgggctggcaggggttggacatgtccggacggacaaaggggccggggctgtcgttgggctcgaaatagtgccagaagaccccgggcttcatccggacgcggaaaccggggaaccggggcatggttcggtccactgcccgctggaggacggcggggtccaccggctgggacaggacagcagaaaagcggtagaccggcgagtacttctcccgctggagagcggagtagaggacgccggcgttgtccagccggtaccagtcagggggacctttgggcgtcttggacatggcggcgcctcctttcctttgtgatatcagtgtagcatctcctgggggaaagtacaaggggaggggaaaaagtataaaattcaacgctcccattcgctgcggcatgggcgtgccttttctgaccttgcgcagggagagctgcttgaagaatatgccgtgggcgggaggcggatcggtccttcccctggcctcgtgggcctcccaccacttcggagagcctgggctcttcgggggcaggggagaggaatacggcagttagatgaggtccatcataccgtatctccacgcccgccgcaaggcgtgcgcacctgcccgcgcgattttgtcagaacgccgcagcttttcccggcaccgcaaacaaggcggcggggagaggccattgccaaacgcggccggatgtggtaggcttgtcatgatccaggtcccagaacaggaaggtgagaacgatgacactgaaagagagaggaagacgggtgcgggtgacccatcccacccccgcccagcgggcggaggcggaggagcgccgcctggcccccatgatgagggccctgaaggcaatccactcggccagctcgcccgagtccatgcgcccggaggacctgaagcggcagcgggcggctcaggaggtgctgggcaggctcatcacccccatgatcgggatgaagtgggccccctttgagctggaggggatgaacgcggcctgggtgcggcctgagcggagctatgaccggaaccacgccatcctgtactgccacggcgggggctataccagcggaaatctgggctactcccggccgctggcctccaagctgtccggcgtgacgggctgggacaccctctccttcgagtaccggctggccccggagcacccctttcctgcggcggtggacgatgcgatgaaggcgtgggaccatctgatgcgccaaggctacggggcccgggacgtgacggtggcgggggactcggcgggaggaaacctggcgctggtgctgtgccaccggctgaagcaggagggcaggcggctgcctgcccggctgatcctcatgtccccatggacggatatgacggccagtgggaagtcctatacagagcgggcggagctggaccccaccatcaccctggactatatccgggcggtgcgtggggcctatgcccgggaccaggagctgacctcccccatgctgtccccgctgttcggggatttccggggcttcccgcccacactgatccaggcggggagcaacgagctgctgctgtccgattccgtgcgcctgcgggaccggatgcaggcggcgggggtcccatgccggctggaggtctggaccgacatgtggcacgtgtttcagatgttccccatcaaaaaggcgggccaggccatggccagcgtggggcgcttcctgctggaatacacatgaaaatggtccctgtccgcaggagagcgggagggcacagcgggatcaaggagaaaagatcgagggccgccccggcaggggcggccctctcgtttctggggtaaaacttctgcaaggagcgcgtctgggagctcagggcagcgaggatgctccgtcacagcagcaccacgccggcctgctcacaggcccggacggtgtcggggtcccacagggaactctgcacctcaccgatgtgggccttgcccagcagcagcatggacacccgggactggccgatgccgccccccatggtcaagggcagctcaccgttgagcagcatccggtggaaggggagggagcggcggctgtcacagcctgccagggtgagctggcggtccagggactctgggctgacccggatgcccatggaggagagttcaatagcctggccattgacgctgtcccagaacagaatgtcgccgttcaggttccagtcatcatagtccggggcccggccgtcatgtggctgacccgacttcagctttccgccgatccccatgagaaacaccgcaccatgctcccggacaatggtgttctcacgctccttgggggagagctgggggtatagatcctccaggtcctgggcggtgacgaaggtgacctggccaggcagctcgggcagggcggacagctgggggaaaacggagcgcaggaaggactgggtatccacgagagcgcggacaatggcgtttaccgtctgcttcagatagtcccgggtgcggtcctcctgggtgatgatcttctcccaatcccactggtccacgtaagcggagtggaggttgtccagctcctcatcccggcggatggcgttcatgtcggtgtagagcccctctccggggtggaactgatagcgcttcagagccaggcgcttccacttggccagggagtggaccacctgggcggtgtcctccacccggttgatctcaaaggagacggggcgctccaccccgttcaggtcatcgttgaggccggaggaggcggagacgaacaggggggcagatacccggtgcaggcgcagggcaccggcgaggcggtcctcgaacagacgcttgagcaggctgatggccttctgggtctcatagaggctgaggagggagcggtatccctcgggaatgacggtttttcccatgtcgaatactccttttgaaagggatttggaacagaagctcatccggcagagccgggatggaacgcctggtgagcacatacagatttttctattatagcggagaagggcggaaaaatcaatctgttcttgccaagcggggcacgtctttgtataatagggtccatccaaagttccgacggagggagagaggagatgcctatgaaattcgtttcctggaatgtgaacggcctgcgggcctgcctgaaaaaggggtttctggacttttaccgacaggaggcacccgacttctgctgtcttcaggagaccaagatggagcagggacaggcggatgtggagctgaacgaaggggtcttggagttctggaactctgcggagaagaagggatactccggcaccgccgttttcaccccccaccagcctgtggctgtggcctacggtatggacaaggaccggcacgaccacgaggggcggctcatcaccctggagtatgagggcttctatctggtctgctgctacacccccaactcccaggacggcctgaagcggctggactaccgcatggagtgggaggacgacctgcgggactacctcatgtccctggaccggcacaagccggtggtctactgtggggacctaaacgtggcccaccgggagatcgacctgaaaaacccaaagaccaaccggaacaacgccggcttcaccgaccaggagcgggaaaagatgacctgcctgctctcctccggctttacagacagcttccgctatctctacccggacacggaggggatctactcctggtggtcctaccgcttcaacgcccggaagaacaacgcggggtggcgcatcgactatttcatcgtctctgaccgcctccgggacaagatcaagcgggcggagatcctgaccacggtggagggcagcgaccactgcccggtactgctggagctggacatctgagtgccccggggcgggaccggaaggagataaggaggatctggatatgcgcagagcggagaaggaagtcaaagacctggagcagttggaggagatcctgcgggactgcaacacagtgcggatcgggacccaggatgcggaggggatgttcatcgtccctgtgaattacggctacgacctgacagaggggcagctgaccctctacctccactcggcccgggaggggcggaaggcggcggcgttccgccggggcggggcggtggcctttgagatggactgcggccaccagctgatgacggcggagcaggcgtgcagttacagctgtgcctaccgcagcatcatgggcagcgggaccatccgggagctgaccgagccgcaggagaaatatgaggccctcaacgccattatgcgccatatgaccgggcgaaactgggagatgccggagcccgccgtggcccgggtatccgtctttgccatccgggcggagcgctggacgggcaagcgcagcccagccaactgagaggaggcagccgaaatggtcttatttgatccccacagatacgcctatccctcccgccgcagcgtggtgtacgcccgccgggccatggcctgtacctccgtccccctgggggcccaggtcggcctggatgtgatgaaggccggaggaaatgccgtggatgcggcggtggccatggccgccgccatgcccctgctggagcccacaggaaacggtatcgggggggactgcttcgccctggtttgggtggagcgggagaaaaagctgtacggcctgaacgccagcggcgtgtcccctgcagctctgtccgccgccctggtgcgggagcggggcttcggggagatgcctaaagagggctggctgcccaccatggtgcccggcgcccccgggggatgggcagagctcaaccggcgcttcgggacccgcccccttgaagagctgttcgcccccgcggcctcctacgcccgggagggggtggctgtgccggtgaacgtggcggtccagtgggcactggacggcccccgtatcggccgggctatggagcgggacccggccccccaccgcccctggtgggagcggatgatgaaggcggacggcaccccataccgggcgggagagatcttccgctggccggagtacgctgacactctggaggagctggcagccaccagctgtgagagcttctacagggggagcctgatggagcggatggtctccttcagccgggagacggggggctttttccaggagcgggatctccaggactaccgcccggagtgggtggagcccatcaccgcggactacaagggctacaccgtgtgcgagatcccgcccaacggccatgggatcactgtgctgatggcgctgaatatcctgaagggcctgcccctctcccaggagcgggacagcgccgacacctaccataagattttggaggccatcaagctggctttcgcggacaccaggacctatgtggcggacccccggtacatgcggacccgggtggccgacctgctctcggaggactatgctgcccggcggcgggccctgatcggagaacgggccctgctgccacaggcgggggacccctcctgcggcggcaccatctacctgtgcaccgcggacccccagggcaacatggtctccttcatccagagcaactacaccaccttcggtgcgggcatccgcatcccgggtaccggtatctgcctccagaaccggggggccaacttctccctggatgagggcagcgataactgcctggccggcggcaagaagtcttaccacaccatcatccccggcttcctgatgaaggaagggacggcggtgggtcctttcggcgtgatgggggccttcatgcagccccagggccacgtgcaggtggtggtgaacacggtggattaccacatgaacccccaggagtgcctggacgctccccggatgcagtggaccggtgggaagcgcatccagctggagcgggaggtgcccgcccacatcggcctgcgcctggcggagatgggccaccaggtggagatctgcaactccaacctggacatgggacgggggcagatcatctggcggatggaggacggcaccctggccggcggcaccgagccccggtgcgacggcacggtagcggcctggtgaagagagaggagagatcttgtgaaagagcgcggcctgatccggatcattattctcctctccggcgccctgctgtgggtggcctacctgtttgatgcggtctgttcccgatacgctatctatgaggtgatcggctatggggcccatgagctgttgtctatgctcccctatgtgtctgccctgaccaccgcggtctggctggccgttacgctggtgaaaggggcccggggaaagacactgcgccgggagctggcgttctgtggggccctggcggtcctgctggcggtgcagtggggctatctgatcgagcgatcccaccgctccaccgccaccgttctggcccaggtcacagagacggtccttgtgccggcgcaggggctgcaggcggtgatccggcatccggaggggtatgagatcacactgtggtgcccccagctggcatgggagctccttcagccgggaacggagtacctggtcacctacgagtgggatgaccgaatgccccaggaggggaccttgtgtatggtccatccctgaaaatctcaattttgatcaaggaggcagcagccatgaaaatagcagaattattcggaaaggggaagaccgtcttttcctgtgaggtgtttccccccaagaaggacagccccgtggacactatctatcagaccctggacgggctgaaggatattaaacccgactttatcagcgttaccttcggagccggtggctcccaggtgaaccagtccacccgggagatcgcggccatcatccagaagcagtaccacatccccgccatggcccacctgacctgcatcaccgccaccaggggggaggtgaccgagctgctctatgacctgaaggcagacggcgtagagaacgtgctggccctgcggggggaccggaacccggactatcccccaaagacggagttcctccacgccgacgagctggtggccttcatccgccggcggggggactttggtgtgtccgccgcctgttaccctgaggggcacccggagagccccgacgcggtaagcgacctgcgctacctcaagcagaaggtggacgccggcgcccagcatctggtgagtcagctcttctttgataacgaggacttcctccgcttcctggagcgggcccgcatcgcgggcatcacggtgcccatcgaggcgggcatcatgcccgtgctgaaccagaagtccatcgagcggatggtatccctgtgcggggcttccatcccccggaagctctcccgcatcctggctcggtacggcgaccacccggaggccctgcgggaggcgggcatcgcctatgccatcgaccagatctccgacctggtggccgctggggtggacggcatccacctttacaccatgaacaaccctgcggtggccaggcagatcagcgacagcgtctccgccatccggcgggtgtgagcgccatgccaatcgccctgggggagctggacctggacgaggtgctccgctacatggggaccccgcccagccaggccgggccggaactgcgggccctggcggaggagtgcgggcgggccgtatgcgccgccgcccggccccgctgggcctggagggccttcgacatcgcagaggaggcggacggggtgcgcctgtcctgcggcctgctgctgccggggcaggacctgaagcgccacctgagggggtgcggccgggcggcggtgttctgtgccaccctgtccgcccaggtggacaccctgatccgccgctgggagagcggggacatgctgcgggccctggccctggactgctccgccgccgccgcggtggagcagatgtgcgaccagatcgaactggagctccaggggcacttccccggctgctccttccctttccggtacagcccagggtatggggacctgcccctggagctccagaaccccctgctggacctgctggacgccccacggcgggtggggctgtgcgccagcgccagccacatcctcaccccccgcaagtcggtgaccgctatcttgggggcggccgacggacccatccaaccaactgtgcgcagctgtctgggctgtcccgcccgggagagctgccagtatcgaaagtcaggtggacactgtggaatttcgtgaattgctgaatacgccgggccccgtcctgctggacggcggcatgggcaccatgctgcaggccaggggcctgtccatgggggagtggcccgagctggccgccctggaacacccggactggctggaggacatccaccgggcctatgtggaggcgggggcccagatcctgtgcgccaacaccttcggcgccaaccgggagaagctcggccgcaccggccgcactgtggaggaggtggtccctccctcagtggagatcgcccgccgggcggccagggggagggccttagtggccctggacgtggggcccaccggccagctgctggagcccactggcaccctccgctttgaggaggcagtggatatctttgcccagacggtgcgcgccggtgtccaggccggggcggacctgatcctgatcgagaccatgaccgacctccaggaggcccgggccgccctgctggccgctaaggagaacagcagtctgcccgtcatcgtcaccatgacctatgaggagcggggccgcaccttcctgggctgcgacccggcctctgcggccctgaccctggaggggatgggggcagatgccatcggagtgaactgctccctgggcccccgggagatgcccccgctggtgcgggagctgacccggtggtccaccctgcctatcgccatcaagcccaatgcgggcctgcccgacccagggggcgcggggtatgacattacggcggaggagtttgccgggagcatggcagagctgaccgggctgggcgttaagctgtacggcggctgctgcggcactacgccggagtatatcgcactgctgcgggagaaactggcgggccgcaccatcgtccaggtgccccggcaggtgcccgcggcggtgtgcagcggcacccgcaccgtgcccatcgaccgggtgcgggtcatcggggagcggatcaatcccaccggcaaaaagctgatgaaagaggccctgcgccggggggatgtggactacatgctgaaccaggccctggcccagaccgaggcgggggccgacatcctggatgtgaacgtgggtctgcccgagatcgacgaggcggagatgatggtgcgcacggtgaaggccctccagggggtcaccgacgcccccctccagttggactccaccgacccccgggtgctggagggagccctgcgggtctactgcggcaaggccattgtcaactcggtgaacggggacgaggagaccctgaacgccatcctccccctggtgaagaagtacggcgctgcggtggtgggcttgacccttgaccacaccggcatcccaaagacggtagacgcccggctctcggtggcccgccgtatcctggaccgggccctgtcctatggcatccggcgggaggatgtgtacatcgactgcctgaccctcaccgtctccgctgagcaggaagccgccgcccagaccctggagggcctgcggcgggtgaagggagagctgggcctgaagacggtgctgggggtgtccaacatctccttcggactgcccgcccggcccctgatcaaccagaatttccttaccatggccatggccgccggcctggacctgcccatcctcaaccccaatgtggacgccatgatggcggcagtgcggtgctaccacctgctgatgaacatcgacaccgacgcccgggaattcatcgccgcttacgggaacgccaccgtctccacctctatcaccagcgcggccgggatgaccgccgcccccgcagcgggggaaaagcggggcctggaggagatcgtggaggccggcctgaagggagaggcgggggaggccacccgggccctgctggagagtcgggcccccctggacgtggtggacaacgtcctcatccctgccctggaccgagtaggggcggccttcgaggcgggaaaggtgttcctgccccagctgatccagtctgcaggggcggcccaggccgccttcgaggtcatccgggagcgcctgtccggccagccgggccagagggaggaccgggggaccatcgtgctggctaccgtgaaaggggacatccacgacatcggcaagaacatcgtcaaggtgctgctggaaaactacggctacaccgtggtggacctggggaaggacgtggacccagccgccgtggcggaggcggtgcggaagcaccgggcccctctggtggggctgtccgccctgatgaccaccaccctgaagagcatggcggacaccatcgccctgctccatctggagggcctgccctgtaagatcatggtggggggggcggtgctcaccccggagtatgcgtcccagatccaggcggacttctacgcccgggatgccaaggagagcgtggacatcgccaagcgggtcatcgggtaacgaccgcaatggggccgggaggggctgtcaagccgtcctcccggcctttctgtgccgcttaccggcggaaaaaggcctgacagctcccacccccttgcgtgtgagccagggatctgctatcctccggacagagaggaggcgaaggccatgaaaccacacattgtcacagaggacatgaggctccgggcccgggacgggcaggagctggagggaaagctgtatctgccccgggatggcgtcgtctcccggctggtggtccaggtcaacggctccggcccacagacctgcaacaccttccgggaccggggagacgggaccacgtacagcttctgcggcttctttggggaggagcttgccggccggggactgggcttcttctgttacagcacccgcgggtgcaccgatggggatcagggtccactctactgccgagtggaccgggcggtctaccgctcctacacccctcagacctgtgtggccgacctggaggactggaccgccctccttcaggcccacccccgctgtgctggggcggagctcctgctgctggggtggagcgaggggaccatgatcgctccggctgtggctgcagggggagcggtacccctggccggactgctgctggcgggctacgccaacgggaccatggaggaggccctggactggcagcagcgggggctggggctgtacaccatgctctgccagtattttgacgccgacggagatgggagcatctcccgggaggagtttgagacggggccgggagcggtgcgggaggccctggaggcgaccttctccgggctggacctggacggggacggccggatcaccccggcggacctggaggcggtgtatgccgggagccgggcggagatcttccgggccatcgaggcgggggacgacgagtggctttgggaacactacccagtccccctcaccaccaactggttccggggccaccggaggtttccccccaaccgggagaccctgccccgtctggacctgcccatccatatcctccaggggaggtgggacgccaacacccctgcggaggacgccctggccatccaggagaccttccggaggctggggaaggacaacctcgccgtccacatctaccctgacgcaggacacgccctgggctttgagcagtatctggccaccggggaactgccccccgccctcaccgatctctttgagctgtgccaggggctgggacgatagaacaggagccggagagcgggcctctccggctcccgcttttttccggactccagggcccggaggaggagcccgcggctgaaagggaaagccccttgtgccctcatgtcccgtctgctataatcggaacagaaaaaagtcgaatccgcgtgcggagccggaaaggagttcattatggcagagaccttgatcccattggaggagcgggaggaggagcggcgcccgtcccgggtggagccgccccgccggagcgggggctgggtggggaagctggccctggtgctggcggtcgtcgccctggcggtggcctgtctggcgctgtaccggacactgccgccgggggaggatgacccacaggagccaggggagagagcagagtcccctaccatctcctaccgggaccgggagctccccgtcctggaaggggtggcggtgaacagctatgtgtcagacggcttctccgtcaatgatcggggctggctcacctatgagcaggatggaaagcaggcggccatcggcatcgatgtgtccgcttatcagggggagatcgactggcagcaggtagcggattcgggagtggaatttgccatgatccggctgggctaccggggatactcccagggggtcatcatgccggacaagaattttgagcagaacctccggggggcgctggacgctggcctggaggtgggggtctattttttctcccaggccgtcagcgtctgggaggcggaggaggaggcgcagtacgtcctggacgccattcaggggtacgatgtgacctaccccgtggcctttgactgggagttcattgccggggacaccgcccggacggacggcatggggccggaggccatcacacgctgcgccggggccttctgtgatatgatccgggaggcgggctaccacccggtggtctactttaaccaggacctgggttatctgtcctaccagctggatcggctcaccgactataccttctggctggcggagtataacgcccgccccagcttcttctaccactttgacctgtggcagtacacccacaccgcctcggtgcccgggatcgagggaaatgtggacatgaatctggccttccgggagtttgacgaaaagcctcagcatggggaagaatagagaaagagacggcgcccggtgcttgaagcaccgggcgccgctcgtattgattgggaggatcactccacatatttcagaccgctgccccgggtgacagtacaggcactggccagtttttcggcccactggctgtactgctcgttgttcagggcgtttttggcgctgacggcccagacggggtcgtcccagcctgcaaagtacatgatatgataacccttgacggaactgccggtgttctggatgatgccggtgtctccgggctggcggctggggtccagggaccactgggtaaaggtgtccacatagccggagtaaggagagacatactggagcagcccgccgttggaagcagagctggtgtcagcgctgttctcctgggccagctgggcaaaggagtcctcagtggcatcgccggcctcccactgggccagcagttcctccgccttggcctttgcctgctcatactgctcttcggtgggggtgatgttggcgtcggcggcgccgatcaggatgtggcgcacatcggcggtgggggcgtcatcccgtacacggtcgtggaagagggctacgcagtagttatagctctcgctgctgccgccggcatactccaccaaggtgatgtcgccgggccggcgggcgctgtcataagcccactcgctgtattccgaattgacggtggagcccatctgttccagcgccacctcggaggagtaaagggagtcactgaactcctccgccagggcctccgggtcctccccggcctccaggcgggcctggagcgcctcggcctgctccttaacggcggccttctcctcctccagggcggcgaccttctcctcatcggtcatttcaatggtgttgccctcgtcgtccacggtgttcacccgggcctggaaaacgaactgggacagagtgaaggtgtccagctcgtcggcgtgctcctcatagtaggcatccagctggctgtcgtcgtaggtgtaggagtccacctggctctgggcgtagtcagcggccagatagtagcgctccatgatctggacgaatttgtcatagctcatggtggggccgtagttagcgcggacataggcgtccttgctgccgtagccggaggtgatggtgccggcctgaatggagtccagggtgttctgcaggctctcctgggcctgggcggacatggtgtatccgctggcctgggcctcgttggcaatggccgcctgctgagtcagggtctggatggccacgtccagcagatggtcgcgccaggtctcgccggtggactcgtcgtagatctggtcctcgggatcgagggtgtagtccatggtgctggcgccgctgtagctgttgtagatctcctgctgaagggcgccgttgtagtagtactgcacatcggcggcagtgtagtcctgcccatcgatggtgacggcggcggcgcggctctggaagaaattgctgttccagatcagaaggccgacgccgaacaggaccaccagaacggcaagcaccgtgtagacgatgtggtggacatgggtctgacgctcctcctgctgctgcttgagcttcttttcactgagaccctgaccgctcgggtcctggcgggtcttcttctctcgggatgcactcacagtttgttcagtcctctcgttcagttggcaatgcgcgtggttcacgaccgcacatttcttgatattatataagaaatgaccccaactttcaagaggagaagcgggttttcctctgggcgggggcagcttttacattttattcatgtttccggggagggagcaggcgtaaaaaagagccgcggcaaagccgcggccccagttccaaatggatcatttataccccgctctggccgtgtgggcccgtttaaaacctgcacgactggcaggtgggtcacctccacagcgctttactgcttccaacttccagcatgccgcaggggcagccgggaggcctgcaagccacgctgtgagggggtgtcccgttttagaaatgtgggtttaaaagagcccatcacgcaccgagcaggagatccagttcggtcaatcctccatctcttcgtccgcaaagagacgttccataaactggttgtagatcaggtccagctcttcatcgctgtccagggtggacagcagctcctcgccgtcctcctccaccaccttcatgatgatcaggccgtactcctcgtcatccaggtcgatgtcagcaggctcgccctcctgggcatcctctgagacggcggggaaaaaggccatgtagacttcgttgttgtactccagggtgtccaggtgctccagctcgaagtcattgccgtcctcgtcggtgacggtaataaagtcagggccgaattcttcactcatggagatccctcccgctgttttgttctggacctattgtaccccgacttgaagaaaaaagcaaggcccggaggccccaaattttcacaggggagaaaagcgaccttttgcccggtggaaatcataaaggtggacaaacgggaatattatgatataatatgctagatatccggtgtcccgccccgtccggggcggctgccggagcggaggatctatcaactgcccgggggcctgtccccaacggaggaagtaacgtgtcagaagaacagaacagtcgtttatataacgagaacaacgattacggggagcgggattacgccccccgcaagtccggaaaaaagaagaagcggaaggagagcggcggccatgtgggcaggcgcatccttcaggtgctgggcaccctgctgcttgtggggctgtgtacgggggcaatcctgtgctgcttcgccgccgtctatatcaagacggtcatcatcccggaggccggagccgtggacctgagccagttcgcggtgggagaaaacagcgtgatgtactacatggaccaggacaccgggaactaccgggagctggtcactctggcggcagaggagaacgccgagtgggtgaactatgaggacatccccgaagacctgatcaacgccaccgtggccattgaggaccggcggttctgggagcacaacggtgtggactggaaacgcaccgctgcggccatcctctacatgttcactggtcaggatatccagggcggctccaccatcacccagcagctcatcaaaaacctgacccagtacgacgatgtcaccgtcaagcggaaggtcatcgagatcttccgagccctccagttcgacaaggactacaccaaagagaccactctggagtggtacctcaacttcatctggctgggggaccgctgtcggggtgtaggggcggcggccatgaactactttggcaagcccgtgcaggagctcaccctggcggagtgcgccagcctgatctccatcaccaataaccccaccatctatggcccttactccgatgctgtcttcaccaactcggagaccggggagcagaagactgcccgggacaagaacaaggagcgccaggaactggtgctgtggagcatgctggaccagggctatatcactcaggaggagtatgatgaggccgtggcccaggagctggtcttcgaccgggcggcgggggagtccactccctctaccatctactcctggtatgaggagcaggtcatctccgatgtgaaggacgacctgaaggcccagtacggatacagcgatgaggcggtctccctgctgctgaccagaggcggcctgtctatctatacctgtgtggacccggatgtccaggcccaggtggagcagatatacagcgaccgcaccaacctggactacacttccagcagcggtcagcagctccagtccgccatcaccgtcatcgacaacgagacgggcaacctagtgggcatcgccggccgggtgggggagaagacgggcaacctgtggatgaacttcgccaccgacagcaagcgtcagcccggctcctccatcaagcctctgtcggtgtacgcccccgcctttgagatgggcctcatcagccccatctccgtgctggatgactatccccacgaggtgatgggcggccggccctggccggtgaacgtggacggccgctaccggggactggtcaccgtgcgtcaggccctgtccaactcctataacaccgtgtccgtgcgggtgctggccgacttggtcaccccggagaacagcttcaactttgtggaggagcacttccacctcgatttggaggatggtgtggagataggcggccagatgaagagcgacatcggggtggcccccctttccatgggcggcctgacctacggcgtcaacacccgggacatggcggaggctttcgcggtgttccccaacggcggcctctatcagaagtcccgcacctacaccaaggtgacccgggaggtggatggcgtggagaccgtactgctggaaaaccagcctgagtccgaggccgtactcaagtcggagaccgcctactatgtcaactccatcctgcgggaagtggtcacccgggtcaatacgtcgggcaactttgacagcggcatggccatcgccggcaagaccggtactaccgatgacaagtacgaccgctggttcgtgggctacaccccctactacaccgcggcggtctgggtgggctttgagcaaaacgagcgggtgcctgcctccgggaacccggccctgaagatgtggactctggtcatgtccggtgtccacgaggggctggaagaccggaagttctctgagcccgccgggctgaccaccgtcacctactgcctggacagcggcctgctggccaccgactactgccggatggacccgcggggggaccgtacagccagaggaaccgtcttccagggcgatgcgccgaccgaattctgcaccagccacacggcggagaccactgttacggtatgcctggactgccccatcctggatggaaacggcgaggagaccggcctgtaccacctggccggggaattctgcccggaggagagccggcaggaagtgagcctgctgggctaccagcgggaggacgtgggaggcgccggcgcagaggacgccaagtattttctgggtgtgacccaggaggccgggccctgtacggtccacactgcggcccagcccgacccggatctgccctttgatcccaaccagccatgggaccccagcgatccgtggaatcccaacaccaacccactggatcccacagggcagggcggcgggggtgccgccgaccctggacaggaggacccggacgcgcctcagggcggagagacggaggaccccagcgggacggaccccatcatcaacccggagacagggaggccctacggatattgaacaaaaaacgggcccgcggagcatcgctccgcgggcccgtttttcgttctgcaaacagagcggctcccatatgccaaagacacgtgggagccgcttgttatctctatattttacttagaaaaggatctctctggtgatctctttcagactgtggaccccgcacatagccatggtgtcctccagctcccccttcagcttctgggtcagcagggccacgccctctgctcctccgccgtacaccgccgtgacataggggcgggccagcagaacggcgtcagcacccagcgccagtgccttacacacgtccacgccgctgcggatgccgccgtccaccaggatgaccatctgatccctcaccgcgtcggcaatggcgggaagggcttcggccgtggcggggacaccgtctagcacccggcccccatggttggataccacgatgcccgccgcgccggcctccagagccttgcgggcccccttcacggtcataacgcctttgatcaggaaggggacttcggcgtactccacgatctcctgcagctccgccaccgtcttgctgcccgccgggggctggagccccttcaggaaggggaggccggcggcgtcgatgtccatggcgatgacctgggcgccggccgccttggcctcgtccagcttggagaagagtgtgttgcggtcccagggctttacggtaggaatgcccttcccgccggaggcaccgatggccctggctgcggcggtgaagactgcggggtcggtcccgtcgccggtgaaggcggcgatgccggcctgggcacaggccgggaccaggatgctgttgtaggcctggtcgtcatatttttcgccgtagtgcagcttggtggcgcccaccgggccggcaaagacgggcagatcgtactgctgcccgaagaaggtgtaacgggtgtccacaggcttgttttcgcagatggtgtccagatccagccggatgctctgccacgcctcataattccggacggcgacggtgccggtgccctttgctcccgggccgggcatggagctgccgcaggcccggccattgcataccgggcaggctttgcagtaagggccgctgcatcccctggcggcctgcaggacttcagaataggtcatggatcttcctcctcacgttttcccctttattgtaatgattctacgggagcgggtcaagcataaaaacaggacaggtggaaaaactgtgtcctgcgaaacagagatggagaatcaaatctgttattgggaatataggaatgagagagccgatgtgctagactgtgagtgaaacgatgggattagagtgagggaaacaagtatgaacggagaccaccggacagaggaactgcggatcggcagaacgaccgcccagaggattgtgacggacctgagcgagatcattcaggaaaatataaacttgatggatgaaaacagtgtcatcatcgccagcacagaccagaagcggattgggaccttccatgcggggagcagggaggttatctcaaagcatctgaaggagcttatcattacgaatgagggggagtattccggtagcctgcccggattgaacatccccattgaagtagacggaacgattatcggagtcattgggatcacaggacagtatcaggaaatcgagaaatacggaaaaatcattaaacggatgacggagattctggttctggaggattggcggaaggaacaaaagcgcctatcagtcagcgctcgggtgagatttttgaatgaatgggtgttcaatgaaaactactgcactgacccggtcttctgccaacaggcgcggctgttgggaatccggacggagatttccaggaaagtagtgattttttccccggaggaagaggagcgaccggacaatgcggcgcagcaaaatcgaacagagcagattgagcggtgcctagcggaggaaggggagcgcagtacagacctgttgatattcagtactgcgaccaaatgtatctgtctgttgcctaactggtccagaggccaaacgcagcgctttgtggaggagggcagaagagagattgaaaagcgttgccacattcggatgggcgtggggatagacaacatcagttctgacagcgaacagatattccaggcgtacaaacgggcggaaaaagcgttatgggccagcctgaaggcaaactgcgtaccgattgcatatcaggagttgacgctggagattctgttgcctgagctatccataggggtgaagcgggagtatatcgaaaaaatattcaagaactgtccggagcaggagaagtacatccaactcctgaagatttatttctcctgcaacgggtccctgaagcagacgggagagcggctgtttctccataaaaatacaattcagtaccagctgaataagctgaaggagaggactggactggacccaagaaagatggaggatgccgcactgctttatatggccgtagtactggcagaagactgctggacctgaaattttaaacagatgaggaatgaagaaggacatgaagatcgtaattgcaatcgattcgttcaaaggaagtgtcagcgcagtggaggcaggggagcggctggagagagggattcgaaaggtggtcccccaggcggaggtagtgaagatccccatttctgacgggggggaagggctgttgattcccttttttcacgccgtaggcgggacgatgcggaagctggaggtgaaggatcccctggggcggacagttggggcggagtatctgaagctgccggacggaacggcggtgattgaagcggcgcaggcctgcgggcttccgctgttaaagagagaggagcgggacctgcggcggaccactacatacggtgtaggagagatgattcttggtgcactggatgacgggtgccgccgactggtgattggtgtgggcgggagcgccaccaacgacggaggcgcgggcatggcgcaggcattgggggcctcgttctcggacggaggggggcgggagttaaactttgggggagaggcacttttagggctgacgaagattgatgcaggccggatggattccagactgcgtgactgccgcatcgaggttgcctgtgatgtaacgaatcctctgtatggtccagagggagcggcagcggtctacggcccgcagaagggggcgtcgccggaggaggtctctctgctggaccgggcgatgcggcggtatgcggaggtcatagcatgggagatggggaaaaatgtggcggacctgccgggtagcggcgccgctggtgggttgggggcggggctgatcgccttttgcggcgctcaaatctgtcggggaatagaggtcgtgctggatgttgtggggtttgaccgcatcactcgggacgccgacttggtgattactggggaaggaaagattgatgctcagaccagtaagggaaaggtgccggtgggcgtagccgtgcgcaccaagggtctgggtgacattccagtggtggcggtagttggcggcattggggagggtgctgagttggcataccggaacgggattgacgccatacttcccatcgttccaggccccgtgtccgtggaaaaatctgtggaaaggggcacacattttctggaggaggcgggagaacggctgatgcgcctgctgctggcgggggtcgggatgaaaagaagagaaacagcggggaattggtctggagaatagaaaaagaagcgaaatttatggcttctaaaatatatcattttaaaaattgattttatataatattactatagtacaaagaaaaaatagcaagaaattgtatttatcaacaagtgaaagggagagaggaatatgacattgcagagcttgttggatgatttggcggtcttctgtattttcttgatgataggcttcctgctcagagaatttatcaagccgctgagaaaactgtttctgcctgcatccattatcgggggagcggtggcgctgatcctgggaaaccagtgtatcggattggtccagattccggactcttttgagggggtgtcaggggtgctgattacagtggtgaccacctctgtggtgtttgggatcgacatcaatctggagcggttgaagtctgacatcgactatacgctggcctgtaatgtgatgtacgggtatcagctactggtggggacgctggtgggcgccgcactgtgcctgatttggcccgcactaccggagggctgggggatcatgggcgtgttcgcctatttcggcggccatggcaccgcccttgtggcggcggatgccttcgagcagttggggatcgaggggacccgtgagattgcggtgatcctggctaccatcgggctcatcaccgccatggtgctgggaatggtagtggtcaatttcggcatccgaaaaggctgggggagctatgtgcagtcccctgacaaatccgatgaagccacaaaggccggtgtgctccccaaagagaagcaggtgcccatcggaatggagaaggtcaactccataggaatcaactctctggccctccagctgtgttttatcatgatttcgattttcatcggaacggttatattcggattgttggatgattacatcgccatcgtctcccagttcccggggaccatcaagggaatcgtcggtgccatcattttgtggccgcttctgaaaaagctgaagctggacggctatgtagacagacgctccatctccacgatttccgggctggcgctggagctagtggtgctgacggcggtggccacgctgcggatcgacatcatcacatcctatttctggcccattatgatttactcggcggctatcgtcctgcccatgctgattatctgcgtggctctgtgcagaggcttctgcggcaaggagaactggtttgaaaaggcgtgctgtctgtttggcatgtccaacggaaacaatgccacggggctggccctgttgcgggcggtggatcccaactcccagagcaacgtagcggaagcgctgggcgtgtttatgacagtctccctctggatccaagtggcgcccgggctgttccctatgatggtgacaggtagcatgtggaccatggtgctgatcggtgtcggattggtcgtggtggatctggtggtcatgaagttgtttttcgcagccaagcggggaaagcaataagaggaggacacttttatggtaggatccggagcgaaagaagggcaggacgtctttgcgtatgtagggagctacaccgtagaaaataaggtccgggaccggtttgtgaccaattccagaggaatcgaggtgtttcggatttgtggaaaggatgggagttggagccatattcagacagtagaacagctcaaccccatgtatctgatgtttgaccgcacccaaaggacactctatgcggccagtagcgattccaacctggtgtatgcctaccgggcggacccgcagacaggctggctgagcctgttgaacagtcggtcagtgggaggaaacagtacgctctgtctaggactgtccggggacggaaagcatctggtagtgggatcgatttccggccatgtggcctgtattcgggtggaggaggacggacggctgggagaggtgtgcgatgactttgcccttccgggcgaggccggtccgctgcgggaggcacagccctggccccgggcccaccacagcgtatttgacacagatggaacactgtgctacatcgtggacaaggggaaggataccgtagatacctatcgggtggatgcccaaagcggtcatatggattgcgtggcccagcttcagactaggccgggatcctgtaccaggcatattgtgttccatcccaaccgcaggtttgcgtatatcaatacggagtatatcgggaccgtgctgacatgcaggtgggagccggacacaggaaagctggagacaatccaaatcctccccaccattccagaggactatgtgggcaattacagcctgagctcagaaattgcgttgcatccgtccggaaaatttctctatgtctccaacagagggcacgacagcctggccatttttcgggtcgatcccaagtgtgggaaattgacctccctcggatggcagaagacgctagggacgattccgagatactttatgattgagcctggaggaaggtatctctatgtctgtaatcaggggaatggagagattcggcccttccgcatcgaccaggagacaggactgctctcccagacaggccaagcagtccgtacagccacgcctgtgtggttgctcctgaccggcccggtagaagcggaactctgagaggtaagcctgagctataaaaacagcccgccgagccctccaaggggcacggcgggctgctctgctgtttcagcggcggtaggtgcgggtgatctcacgcagcttaccggagacgtaggggttgaaggcctcctgacggacccgccagctccaattctggctgcccatagtgccgggggtgttcatccgagcgtcgctgcccagccccagtacatcctggaggggggcgatagccaggcggctgggagcggcccaggcgccggagattacgccccagcccagcccctcgtcctgccggagccggagatagcggctggcgaacaggcgggagtcggggtcggtctctctcagccactggaggaaggtcggggtgtcatgggtgccagtatagatgacggagtcccgctggcagttgtgggggaggtaggcgctctcccccacggggtcgaaggcgaacaccatcaccttcatgccggggatgccgcaggtacggacgaactgcagggcttcgggccccaggtcccccaggtcctccgcaatgagctccagctggggggcggatttttgcagggcatggaggagctccgtccccggtccatcctcccaatggccctcccgggcattctccgcgccagtggggacggaccagtagctgtggaaagcccggaagtggtcgatgcgcacggcgtcatagatggcggcgcaccactggatgcgccgcttccagaagtcaaagaccccctgcttgtttcccttccagtcatagagggggttgccccacagctggccttggtcagaaaatgcgtcggggggaacgccggccgaggcggccagatggcccttcccatccagctgaaagagctcgggctggcgccacatctgaacgctgtctggggagaggtagaaggggatgtcacccatgatgcggatgcagcgccggctggcatatttcttcagagccatccactggcggtagaaggtctcctggaggaaacggtgaaaatcaatctcctccggctccggcggaggggcgtcctcaggccactgccagaaaggggcttgataccggtcgtggagggaggcgaaggtgcagtagtcctccagccagggcaggtctggggcgtcagactggaggtgggcggtttgggagcgttcccaggccttccgcagcagggggatacgggtctgggccagatggtcgtaatccacccggtccgggtcgggccagcgggccccgtccagctcctgaggggtgaggagcccctcggccgccagttcatccaggtcgatgagataggggttgccggcaaaagcggagggggacatatagggggaggagccgtcccccggtgggacaaggggcaggatctgccagtagtgctgcccggcctcggcgagaaaatccacgaaccgccgggcgggtccgcccagggagccgatgccgtaggggccgggcagagaggacacggccagcaggatgccgctggaacgatgatcttccatgaaacgatgcctcctaaacgggaatatggcaagccccgctggtgaccagcggggccgtgcatgtgctgaggggtcgccttatgggcattataccacaaaagaaaaggaaaggaaagagaaaattgtgcaatatttccgttcatttcggggaaactgggcgaactgtgaccttgccttgggagacggagacctggagcgtgtctccggggaccagggcaccccgcagcaccaggtctgcggcggggtcctccaccagagaggagaccgcgcggcgcagagggcgggcgccgtactcccggtccccgccgctgcgggccagcagttcaaccgcaccctcctccgcagacagagagacgcccagctccgccaggcgagcccccgcctggtccagcagctgccgggtgatggagaccaaggaagtgtggtccagtgggtggaagacaagggcggcgtccagacggttgaggaactccgggggaaaggacttccgtgcgtcggccagcacctcccgctccagggcggtccggtccccctcagggccgggggagaagcccaggccgggtccccgcacgaagcgttgggaacccaggttggaggtcatgaccagcacggtgttgcggaaatccgttttgcggccccggctgtcggtaagcaccccctcctccatcacctggagcaggatggaccagatatcccgatgggccttctccagctcgtccagcagcaccacggaccagggggagcggcgcaccgcctcggtgagctgtccgccgtcctcatggcccacatagcccgggggggagccgatgaggcgggagacggagtggggttccatatactccgacatgtcgaagcggatcagggcgtcctgactgccgaagaggacagcggccagggcccggcacagctgggtcttgcccacgccgctgggacccaggaggaggaagcagccggtgggccggcggccgtcttttagtcccagccgtccccgtcggatggctcgggccacctgttccactgcggcatcttggcccagcagctgcccacgcagatggtcctccagctccaaaagggcccgacggtccccatcgtccagatcggtgaccggcaccccggtccattgggagaggacctcccggatgtggcagggctccaccgagcgccgctcctggctggcctgccaggcccggcgggagtgattcagctcctcccgaaaatcctcctccgcgtcccggagcatggctgcctgctcgaagtcctgggcccggatggcctcccgcagctggcggccggtttggacggcccggagctccagggcttggagctccggggggagggagcgcccggccagccgggcccggctggccgcctcgtccaccaggtcgatggccttgtccgggagaaagcgctggggcagatagcggcaggacaggtccaccgccgcctccagggcctcatcggagatggagaggtggtggtgcccctcgtatcggccccgaaggccctggaggatggccagggcctggtcacgggtgggctcccggaccgtgacgggctggaagcggcgctccagggcggcgtccttctcgatatagcgctgatactcgtccagtgtggtggcccccagcacctggagctccccacgggacagagcgggcttcaggatgttggcggcgtcgatggccccctccgcgctccccgcccccacgatggtgtgcagctcatcgatgaagaggatgatgttgcctgcccggcggacctcctccagcacgtgtttgagcttctcctcgaactccccacggtacttggtgcccgccaccatggcgcataggtccagagcgcacacacgcctgcccagcaggtgggagggggcggtgccatcagcgatggccagggccagcccctccacaatggcagtctttcccacgcctggttccccgatgagggcggggttgttcttggtccgccgggacaggatctggatcacccgggtcagttcctcctcccggccgatcaccgggtccagctgtccgtcggcagccatccgagtcaagtcccgggcgcactggtccagcaggcgggtatcggtgctgcgctccggttcccggggtcggacggagcgggtggggagttcctcgccccccagaaaggctgccagtccctgggagagctggtccagatccgccccctgctccgccataaggcggcaggcggcgcactcacggtcctggagcagacccagcagcaggtgctccgcgctgacagcgttctgccccaggcggcgggaggcggccgctgcctgctggatggccaggcagcacttgggggtcaggccctggtggagggaccgggcaggcacgccggtgcccaccagctgggagatggcggagcgcagggagcggctgtccaccccgctgctctgaagggaccgggcggcggcgctgtactcctggctggccagacccagcagcaggtgctcgctgcccacatagctgtgcccaagccgggcggcgttctcctgggccagccgcagggcgcccagggcggtggaggtaaagcggcattctggcatacatatcacctctggataggttttcctctcagtatttccaatttcaaaaaaattatcattgcatttttcaaaacttgtgataaaatgagactagatttttatggaggtgtttcccatggcttacaagattagcgatgcctgcatcagctgcggctcctgcgccgacggctgccctgtgggtgcgatttctcagggcgattcccagtatgtcatcagcgaggatgcctgcatcgactgcggcgcttgctctgacacctgccctgtgggtgccatttcccagggctgattggcaacaaaaaaacagcgccggcgtgtgcggcgctgtttttttatgctcaaaagggcctgaaaagcaggagactgtgtaatatgacggatattttcggcgggacgggaagaaaatctctatttttcgtcaaagatttcattgaagcggtccgccgggtgtgttacaatggaccacaacacaagaacaaatgcccttgcaacacggacacggggcggggatgacgcatagtctggagggagacgcagttgagcggaggggcgaagtactttatcgtggaggcagaggctatgccggagatcattcggaaagtggcggaggccaagcgcctgttagagaccggggagaagaccacggtgaacggcgcggcccgggaggtgggcatcagccggagcgcgttctataagtataaggacgcggtgcatccctttcaggatatgctccacggcaggatcgtcacgctccagaccgtactgcgggatgagcccggcgtgctctccggcgtgttgaacgtgttcgccggtacaggcatcaatattctgaccatcaatcagaacatcccggtcaacggctgtgcggtggtgaccatcacggcggagacctccgccctgcggcgctccctggaggagctgctggccgccgcggggggcagccccggcgtgctgcgctgtgagatcctggccggataacgggccgtgtttttagattatcgtggaagagattcatgaggtgaacggaatggtaaatgttgcgatcttaggctttggcactgtgggctccggcgtggcagaggtgctcaccaccaacggcgggctgatcgaccagcgggtggagaatctggtgcggctgaaatatatcctggatgtgcgggatttcccggacagcccgtaccgggactgcttcgtcaaggactttggggtcatcgagagcgaccccgaggtggacatcgtagtggagactatcggcggcgccacggtggcgctggactttaccacccgggcgctgaaagcgggcaagagcgtggtctcctccaataaggagctggtggccacccacggctatgagctgctccagctggcccgggagcacggggtcagctatctgttcgaggccagcgtgggcgggggcatccctatcctgcggcccctgacctcctgcttggcagccaacgagctcagccaggtcaccggcatcctcaacggcaccaccaactatatccttacccggatgatcaaggcgggcctcaccttcgagcaggcgctgaaggaggcacaggagaacggttacgcggagcgggacccctccgccgacgtagacggacacgacgcctgccggaagatctgcatcctggcagccctggccttcgggcagcacgtctaccctgaccaggtgcccacccagggcatccggggcgtcaccctggccgatgtggcctatgccgactcctgcggctataagatcaagctgctgggccgggccatccgggagggggatggaaagctctgcgcctttgtggccccccatctggtgcccgcctccaaccccctgtccggggtggaggacgtgttcaacgccatttccgtcaccggaaacgccatcggcgacgtgatgttttatggccggggagcgggcaagctgcccacggcttccgccgtggtggccgatgtcatcgacatcgccaaggatctgaagactgcccggtgtgcggtctggggacccgggtcccgggacctggtggtcagttctgacatcctcagctcccggtggtatgtccgggggacggcctccatggacaaagtccgggccgccttcggggagatcagccccctggcaaggggaggtgcgcctgccggggagaccgctttcctgaccgcacccatgacggagccccaggtccgggccaggctggaggggatggagctccactcccttatccgggtgctggagtgaggaacgccgccggcatagaatggtgtgcagagtcctgcgcgctgatcgagaattgacctttagggggaaacagatatatggcattgatcgtacaaaaattcggcggcagctccgtcgccgacacggcccgcatccggaatgtggcccggatcatcacggagacatatcgcaaaggaaacaacgtggtggtggtcctgtccgcccagggggacaccaccgatgacctgattgccaaggcggaagagatcaaccccggagcctcccgccgggagatggacatgctgctggccactggagaacagatctccatctccctgtgcgccatggccatcgaagctctggggtatcctgtgatctctctcactggctggcaggcggggatgctcaccaactccgcttacggcagtgcccggatcaagcgcatccgcaccgaccgcatacagactgagctggacgcccggaagatcgtcctggtggccggcttccagggcatcaataagtatgatgacatcactaccctgggacggggcggctccgacacctcggcggtggctctggccgcctccctccatgcagatctgtgtcagatctacaccgatgtggacggcgtgtacaccgccgatccccgctcggtcaccggagcgagaaagctggaagagatcacctatgacgagatgctggaactggccagcctgggggcgcaggtgctgcacaaccgctcggtggaaatggccaagcgatacaacgtcaatctggaggttctctccagcttcaccgggaatccgggtacgaaagttaaggaggtcgtaaaaaacatggaaaaatcccacgtcagcggtgtggcgaaagataaaaatgtggcccggctggccttggtgggcctggccgacgagcccgggatcgcctttaagatcttctctctcttggcaaagaaccggatcaacgtagacatcatcctccagtccattggacgggacagcagcaaggatatcagcttcaccgtggcccggggcgacactgaacgggccaaggcgctgctggaagagcacagggaggccatcggcttccgggagatcgaagtgaatgagcaggtggccaaggtctccatcgtgggggccgggatggtaaacaaccccggtgtggccgccaggatgtttgaggccctctacggtgccagcgtgaacatcaacatgatctccaccagcgagatcaaggtctctgtcctggtgaatgagcgggacgcagaccgggcggtccaggccatccacgaccgcttcttcaacgaatttggaggcaacgcctgaacaggcgtcaaagcgatgcagcccccctcatggcccggtcccgggccgcgagggggtgccctgttttcaggttttcgcccgtttttgccggaaaaatccttttttagcttgcaatatttgtgccggtctggtaaaataataactcgactggatattcttttcccatccagtctgttttatccccccgccgggaggcagacggaacgggatgcgggctgactgaaaacgagaatctcagggttgccgcccaagggcgcccctgctgcaagtaaggagagaatcatcgcaatggacaagaatcagagagaagagcggcgccgtcaggaggatatcgcactgaaccggggcttgctctgggtcggggcggccatcctgatggagctgcttttgatgctggtcaataaatactatatcaactactactccacggtggagtccatcaatatggtctacgcctttgacgcgggcctgaaggcggtgcgcatcgtggcgctgatagccctggcggcctccggagtgtggtgcttcctgcgcttctcccgggaggggcgcaccggcaccatgcccctggtcctggtggccgctttcagcgcggtgacggccatcgcccatatcacgatctgttttaaggacgccggcgtccgcatgctgttcctgctggtgcctgcctgggccgccctggcgctggtgtactacctgtatcagcgggagttcttttactccgccttctataccggtctgggcaccatgctcctgtggatgctgcgccacaaggacagcacagtggacccctcctcctcccggctgactacgtacgtgttcctggccatcgtggccatcctgatggtgctggggctggtgatgctgctccaggccaggaagaacggcggcgtgtggagcctggcgggccgtgaggtccgtgtccttcccgcagaggctggatactccctgatcttcctgaccctggccgtcaatgtggtggcggtagccgccgccgcagtgatgggcggaaatgtgggctactatctgatttatgtgctggtggcctggctcttcgctctgctggtgtattacaccgtcaaaatgatgtaagagcggcctgaggaaaagtaaggctgcggtgtgctttgacgcctccgtagaaaagtgtcaggagacgcctatactgtgtggtcagcaagtgaaatgtggaaatttaaagagggactatcggtgaaaagccgatagtccctctttttgtgctacactgggcacagatagagccggaatacaagaaatgccggctgtcaaaggaggcttctcctggcagacgacgtttcattgtccttttggaagatatttcttttgtcaatgctcatgtgcggtaaagcagcacataaggatttgacagacagcctcccactattccggcttaatgggaatttcaatttgagtgatataatcgtctatactatcaataaccaactcattgatccccgtttcataagcatagccacacagagttgtcccttgcttttttgcataggcaaggatttctttgtatctttcgggaagcttttcccaatttcccttacaaaaagcccttaggtatgttccggcaggctgcagatgcagtcctcttttggaaacaggaaaaggcatttcaatatatatggcactatactcgctgaattttccttgatataaatgctccactggaagcatggcaccataggaagcgtcatgcagacggcgaagttggtgtttttttgtttcggcaatgacccgttcaatttcttgttcaaatgataagttttcagccatatcaacagccaccaaatagcggctctgcttttccacaaggctgatttctgcaatatccaaagagcgcagcatatccatatcctgctgctggttgatcagaattttttggatagatctcaaatgggaaatggtttgatttaattctgtgattttttcttgcaaaagagaagcgaagttatcaatggtacggttttccataaattgtttgatttcatcaagagatacatttaactcccgcagcattaaaattgtttccagtgccgcactctgctggtagctgtaataccgatagccgttttccttaatacaggcaggtttcagcagaccgatctcatcataccacatcaaagtttttttgttgatttcatggagcgccgcaaactgccctatggtaaacagtgcagctttttctttcagcatttttgaagatcccccttgactgtactgttactgtacggtttattatataaaatgttcagagaaaaaacaaggaggatctttatttatgctgagcgagaacgcatacagccgcccggtaacattaaaaaatgttttgagatttgctgtcccgactatcgttatgacggtattcatgtccttttataccatggtggacggtctgtttgtatccaatctgattggtacagatgcactgtccgcagtcaatttgaccgccccgattatttcactggtaactgccatctctaccatgcttgctacgggtggaagcgctgtcattatgagaaaggtaggagagcaaaaagcaacggaagcaaatgaggacttcacatttctaattgttgtgaatgtgattgtagggcttgtcatgtccgttttaggttatcttgtcatggacggcatctttggaagcatgaacctttcgccggttgtatttgatcactgccacgattatttgagccgctatttgattttcacaatccctatcctgctgatgaataactttaccctttatatgatcgccgccgggaagtcagatctttctatggtctgctccattacaggcggcgtgttgaatatggtccttgactatgttttgattgctgtacttgatatggggattgcgggggcggcgattgccaccggcttggggtattctgttacggcggtagtgggaattgtgctgttttccaagaaaaacagcctgcttcattttgtaaagccggtatgccggaggaaaactttgtgggaagctgccacaaatggcagttcggaaatggcgaccgccttagtgacaggtatcgttactatgatgtttaactggacaatgctgaaatatgtaggggaaaacggcgtagcagccattaccatcattatgtatgtgctgatgttcgccacttctctctataccggctattcctacggagtcgcgcctatgatcagtttttactatggcgaacaaaatcatggaaaattaaaaaagctgatacgtatgagcttgaagatcatcagcgtgatcgctgctgtgaccctcatcgcttcgctggtcgttacagagccgcttgtctcagtgttcgcccgcccagataacccagtatatgatttggcggttacaggaaaccgtatctgttcctttgcccttatctttatcggctttaatgtttttgccagcggaatgtttacggcgttatccaacgggctgatctcagcggtgcttgctttttcacgctcctttgtattcatggtgatcgctatgctgatacttcccgcactcttcggcgtaacaggtgtgtggtttgcgacacccgctgcggagtttgcggcgatctgcctatctcttattatgtttggcagataccaaaagaaatatggatattaacaggaacgatcatttatgatgtggatttttggaattgtcttgatttcaggcatgaaagcgcttttatgcaagggattttcgttaggagggtttctgctgctgttttggatcaaaggcaggcagctccgatttaactctgacgagtgggatagctttttcatttcacttccggaaagaaagctgcaaaagtatgttatctgtatctatctggtggctgctatgttctcttcgtttatcagttatttcattcttgagttgactggataccggaatagcattggaatagcgatattgatctttgcagttggggtactgatcacagcctgcaaatggcatacaaaagaaagggactatctgctcagacggtatcgagaaataccagacacgatccttgaaagacagaagcaagaaacggaggaaatagaaaaaagtgagtgaactgattactgaagggaatatcagaaagcagactgttcttgaagcgcatagcagctaaggtgttatgcgggcgtcggctcgatcagcatatttgaaagaatatttgcttgccttggttgcaataggaatgagtttgtctggcatttcccaggagcttaaactcaaaagagcccagtaaacagcggacctgcctgagccagtcagcacggcaagtaaatggggctgcgctcaccgctgacagccccgtctgccctcgccgcctgccaggtgtgagatccaactggccgatctgtatcctgccccgtggataaaacggacaaagactcttagaccatcacttatctgttccattgttaatatgtgacatgttaacggggaaattgagatcgcagagagcgccgttcagaggagctgtttttgaattgtgcggcggtagaggagtgcggcggcaaagcaggagatcagctccgagaggggaaaggcggcccagaccagggccggcttcagggccagcagaagggcagcggcggggagcaggagcaggatctggcgcagcagggccaccagaagagaccagcggctgcggcccagggattgaaaggcggagcagaagataatgctggtcccggcgaagaaaaaggagagggcgatgatccgcagagcgggggcccccatggccagggcctcggggctcgcccggaaggcggagcggagcaggggggaggccagcagggagagcagcagggccccggacagggagaggacggcggtgaactgctggccaaaacggacagaggctgacacgcgccggagtgccccggacccgtagttatagctcaaaatagggatcaggccgctgctgatgccgaatatgggcatgaagataaaggtctggagcttgaagtaggcgcccagtacaaagaccgcggactcggaccaccgggtcagcagctggttcagccccagggacatgaagctgctcagcgactgcatcaccacggcgggggcggcgacgcggcccatctcagccagcatttccccccgggggcggaagccccgcaggcggatggggagctggcgccggaggcggtacaccagccagaagccgatcaacgcgccggagatctggccgatgaccgtggctgccgcggcccccgcaactccaaggtccaggacgaagatgaagatagggtccaggatcaggttgaggatggcacccgagccctgcacgatcatgaagccggcggggcggcccatggcctgaaggatgcgctccgtcaaaaactgcatgcaggtgccgatggacagtccgcagcagatcagcaggtactgggccccctgccgggcgacggaggggtcctctgtggagaggcgcaggaagggggcggcccctgtcagggcgaaaagaaggaagaggagccagcagagtccgtaaaggaaaaacccgtggcagaccgcagaagcagcctgttcctggtctccctcccccagccggcgggagaaaatggcgctgaagcccaccccgatgccagagcagaaggccaccagcagcatctggatggggtaggcgtaagagagggccagaaaggcctcgtcgctgtactgggccacatagacgctgtccaccagattgtagacggcgctgatgagcatggacagcatgatgggcagggacatagtcaccaccaaacggggcaccggcatggcgcccagcataccgtcattggactgccgcacagagctctcacctcctgttttaccgatatggggcggcatcatggcagggaacgggtgtagcgcaggtccacgcagatggtgtccggcgggaaggggatgtcctcgtgggtcccgtcccaggcaaaccccattttttcgtagaagcggcgggcgttttcattctcccgcaggacaaagagaaagacctgaagatagccctggccgctcaggcggcggaggacttcctccatgagcttggtgccatagcccttccttttatggtctgggtgggtataaaaggagatgatctctccccagccctcatatcctcgggagttgaacttgcacaccgtacctgcctggagacctgcatcgatccgggcggggccgaaggtggcacagcagacgggaatatcctcatcgtataatagaaggagttgattgcgatttgttttcagattttcccggaatgtggggacccagcggtcatcggtgatctcccgggccatgaagtcggcggggatggcgccggcgtaggtggtccgccagcccagggcgtggatcagggacagggcggcgaactgctcctctgtgcgggcctcttcaaaatgaaggcgggacatggacagcgctcctttcagaatgttctgctctactgtcttcgattatatccgtccgattcccggttggcaaggaggaaagcgccgctgggcccccgccgccgaaggggaggccggccccggaaggcagaaaaactggacagaaggtggaaattgtacaaaaagtcctgaaaaaggggcggaacggggaaaaggcatacaatatatccacctttttggaaaaaatgagaggtgaaagaagaatgaaatgggagggaaataagaaaaaaaggaaaattccccttgcttttttggacaaattcacatagtattggagcagatacccccacagcaggtccgctgcgttgagatgggggaagcgggtggtgagaatatggaaatggactccattcaaaaggtagccggcgcagagcaggagagccaggagcgccgggaggcggccgcggcggagagccggcggaccgtggctgaggcccggaaggcagctgaagagctgctggaggaggcccgccgccaggcgggggctgagacccggcagatgctggcccgggcggaggcggacgccgcggaggagacgaagaccatcctggcggaggcggagcagcgctgccaggcgctgaagcagaacgcccggacccgtctggatcaggcggcgaagcgcatcgtggaaggggtagtgaagggctgatggcgatcgtcaaaatgaagcatctgcgcctggcggccatgcagtcggaccgggaggccctgctgcggctgcttcaggggatgggctgcttggagatcgaagagccgtcggtggactggagcgatccggagtgggccgggctgaagagcccggacagcggggcgctctccgccgcccgggaggagaaaaacgcagcccagcacgccctggaggtgctcaagcgctacgcaaaggtgaaggggggcctcctgagccccaggccggtggtctcctcccagcagttttttgaggagcaggcgtaccgaagcgccctggagaccgccagagccatcaatgatggggagcgggagctggcggcgctgaaggcggagcgggacaagcgggctgcccagcgggcctccctggcaccgtggatccccctggagctcccccttgacacggcctccacccgggaggtggaggtgcagttcggcacggtatcggcggagacccccttcccccagctggcgggggaggtgcaggcagtgagtgagctggcccagttgacgctggccagcgcagaccgggaaaaccagtatctgctgctgatctgccaccgctccgccttggacgaggtgctggagaagctgaaggagcacggctggtcccgggcagtgttccgggatctgacaggcacggcggcagacaacgaccgccggctggagcaggagatggaggagctgtctcagcgcagggcggagcaggagcggcggatcgccgcccaggccggccagcgggaggcgctgaagcgggcggtggaccgagcctcggtggagatcgaccgtgaggagggcaagagccgcctggtggagacccaggtggccttcttcctggagggctgggtgccggaggagcgctgggaccagctgcggcaggccctgtccgactacccctgtgcctgggaggtccgggacccagagccggaggaatatccccaggtgccggtgcagctgaaaaacaactggctcacccggccgctgaacatggtcacggagatgtattccctgcctgcctacggaagcgtggacccaaaccccctgatggcccccttctttatcctgttttacggcatcatgatggcggacatgggctatggcctgctgatgatgctggcctcggtggtggtcctgcgccggatgagacccaagggcaccatgagccacttcttcggtctgctgggactgtgcggcgtcagtacctttttgatgggggcggtcacgggaggctttttcggtgacatgatccctcaggtgctgaagatcctgaatccggagagcaccttcgtctggttctggccgcccctgttcacccccctggatgacaccctgatgatcctggtgggggccatggccctgggtttgattcaaatcgtcacgggcatggccatcagcttcatcaaaaagatcagggaggggcagattctggatgcggtatgggaggagctgacctggtggatcgtctttgccggtctggccctggcagtgctgggggtgactaacgtggtcatcatcctgggcggcgtcatggtgctggtgggctcgggctggaacgccaagggcttcggtaaggtgaccgccgtgttcggctccctgtataaccatgtgaccgggtactttggggacatcctctcctattctcgtctcatggccctgatgctggcaggcagcgtcatcgcccaggtgttcaatactctgggcgcgatcccgggcaacctggtgatctttttcatcatctccttggcaggcaatgccttgaactttgccttgaatctgctgggctgctatgtgcatgacctgcgtctgcagtgcctggagtattttggaaagttctatcaggatggcggaaagcctttccggcctatggcggtgaacacccggtatgtggatatcaaagaacaatgatttgaggaggatacaaaaatggatatgtcacaagtggtagagtatggacagagcatgactttcctgggtagcatcggcgggctggccctggccctgctgggggctggactggcggctgtactcagcggcatcggcagcgcaaagggcaccggcctggccggcgaggcgggcaccggcctgctgtgtgaggatccctccaagttcggcaaggtgatgatccttcaggtcatccccggcacccagggcctgtacggcctggtagtctggttcttcgccatcttccgtatgggcctgctgtctgggaccctgcctcagctgaccatcgcccaggggatgcagtatttcgtggcctgcctgcctatggcgctgggcggcctgttctccgccatcgcccagggccgtgtggccgccggctccatcaacattctggccaaaaagccggatgactggtccaagggcatggtgctgtgcatcactgtggagttctacgccatcctctccctgctggcctccatgctgatgatcatcaacatcagcgcctgagcgccggaaaggaacagctatggacggacttgaaaagatcacggccaggatcagcgccgacgcggacgcggagatccaggccattcgggacaaggcccaggcccaggcggaagaactgctggcccaggccagggcccaggcggagaaggagaagggcgagctgctcgcccggggccgccggtccgcggaggagcggaaggcccgcctgatctctgccgctcagatggaggggcggaagatgtccctggctgccaagcaggaggtgctggacgaggcgttccgccaggctctggaggagatgtgctcgctgccggaggagcagtacatccagctgctggcccgcctggcggtgcaggcgtcctccaccggccgggagcagctgatcttctcccccaaggaccggacgcgcatcggcaaggcggtggtgatggcggccaacgacgctctggtgaagcaggtggccccggagctgcccgacgccatcaccgactccaaggtgggggccttcctgggcaaggtggtcaacagcgctgcggcgcagatcaccggcaccgggcttttgaccctgtccgaggagacgaggcccatccggggcggcttcatcatggtggacggcccggtggaggtcaactgcgcctttgaggccatggtgcgtgcccagcgggagcagctggaaaagccggtggcggagatcctgtttcaaaagtgaagagtgaggagcggagcggggggacggagggcccgggtgcccattgccagatcccgcaggaagcaaagactgcccgcagagatacgcgcggcgctctgctctgacccgaaaggggtggtattttgtcccagaaacgagatacggattatttagccgtctccacccgcatccacgcgatggaaaaccgcatgctgacccgggaacggatggagcggatgatcgacgccaaggacagcggcgaagcagccaaggtgctcagcgagtgcgggtacggcgagctgacccagctgacctcggcggcgctggaagagctgctggccgatgcccggcggaacaccttccgggacatgacggactcggtgcctgaccggcggctggtggaggtctttcagctgaaatacgactaccacaacgccaaggtgctgatcaaggcccaggccatggggctggacgaggcgcgtctgctctcccagggcgggcggtacgatccccagcggctgcgggaggatttccttcgggatgaccttcgggactggggcgaggtgttccgccaggcggtgctccgggccagggaggtgctggccgccaccggagatcctcagcaggccgacctggtgctggaccgggcctgctttcaggagatggagagcctggcacgggcatgcggcagcgctttcctgcagggctatgtccgcctgtcggtggacgccgctaatctgcgcgccgctgtccgggcagcccggatgggcaagggcagcgagtttttgaaccagatcctgctccccggtgggaacgtatcggagcgcgccctggccggagcgagaccggaggaactggcagagcgcttccgcagcgggcccctggcccaggcggcggcgctgggggcggcccggacccagccggattctggtcctctcaccgaatttgagcgcctgtgtgataatgcggtcacgggatatctggcctcggccagccgggtccccttcggggaggagacggtgatcggctatctctacgcccgggaggcggagatcaccgctgtgcgcatcatcatggcgggacgcatggccggcctggatggggagaccatccgcagccgcctgcgggccacctatgtataagggggagaggagcatgtataagatcgcggtggtgggcgaccgagacagcgtgctgggcttcaaggccctggggctggaggtctgtcctgcccagagcgcggacgaggccagagagatcatccaccgtctggcgaaagagaactgtgccatcctctacctcacggagcagctggcggtccagctccagagtgagcttcagcgctataaggacgccctcacccccgctatcatcctgatcccgggcaaagagggctccctggggatcgggatggccaatgtgaagaccgccgtggagcgggcggtgggggcggatatcctatgagagatggattcagtaccttccgcagggcggcagcaggggaggcggagcaggtctttgacctgatccggcagcggatcgcctggatggatgagcggggcatccagcagtggaaccaccccggctacctcaggcggtatcccttggactatttccggcagtgcgctgaagagggacagctctacgccctgtggacggagtgcggcgttctggccgcgggggccgtggtgttggaggaggacccgcgctggaccggctatggcgggaaggcgctctatgtgcataatctggcggccagcctccacttctccggagcgggcacggagctgctcaggcgctgcctggccctggccgcggagcgggggcaggactatctccgcctggactgcgcccgggacaacccggttttgcatgattattatgaacgttttggcttccgatttgtggcgcctgtggaggaccaggggtatctcggggatctccttcagtaccccctggggtcccgggactgagcgggacggcggcacaggaaggatcagaaagaaggtttgagccaatgggaaaaatcgtcaaggtctccggcccgctggtggtggccaccgggctccaggaggccaacatggccgacgtggtccgggtgggcgagcagggcctgatcggagaagtgctgaccatgaatggggacaccgcctccatccaggtctatgaggagacttccggcctgggtcccggggcggaggtggtcaccaccggcgcccccctgtccgtggaactgggccccggcctgatcgagaacatctacgacggcatccagcgcccgctggaggtcatcatggagacggtgaagggaaataacctccccagaggcgtggaggtgcccgccctggaccgggagaagaagtgggatttccaggccgtggtggagccggacacccaggtagtggggggcgacatcatcggcacggtgcaggagaccccctccatcctccacaagatcatgatcccgcccaggatgcaagggaagatcgtctccatccagtccggctcctacaccgtcaccgaaacagtggccgtgctggaacgggaggacggctcccgggtggagctgcccatgatgcagaagtggcccgtccgcgtgggacggccctataagcacaaatatccccctgtggtcccactgtcctccggccagcgcatcgtggacaccttcttcccggtggccaagggcggcacagccgccatccccggtcccttcggctcgggcaagacggtgatgcagcacgccctggccaagtggtctgatgtggacatggtggtgtatatcggctgcggcgagcggggcaacgagatgaccgacgtgctgcgggaattccccgagctggtggacccccgcaccggcgagaccctgatgaagcgcactgtgctgatcgccaacacctccgacatgccggtggccgcccgggaggcgtccatctacactggcatcaccatcgccgagtatttccgggacatgggctacgccgtggccgtcatcgccgactccacctcccgctgggcggaggcgctgcgggagatgtccggccgcctggaggagatgcccggcgaggagggctaccccgcctacctgtcctcccgcctggcccagttctatgagcgggcgggctcggtgtcctgtctgggctctgaggaggaccgcagaggctccctcaccgctgtgggcgcggtctcgccccctggcggcgacctgtccgagcccgtgtcccaggccaccatgcgcatcgtcaaggtgttctgggccctggactcctccctggcctaccgccgccacttccccgccatcaactggctcaactcctactccctctatctggactccctgaagccctggtacgacgagcacctgggccctgagttcctccagaaccgggagtgggctatggcggtcctccaggaggaggccagcctgaacgagatcgtccagctggtgggcaaggattccctgtccgccaaggaccagatcaccctggagacggccaagatgatccgggaggatttcctccagcagaactcctttgtggacatcgattccttctccgagtatgaccggcaggagaagatgctggccatgatccgaagctatgaccggcagtgccgggccgccgctgagaagggcggggcgctggccgagctgttcaccatccccgcccgggagggcatcggccgggccaagtctgtccccgccgaccggtatgtggaggcctatgcccagctggtccgccagatggaggagcagatctccgccgtggcagagaagggagaggaagcgctgtgattcgggaatataagacgatccaggagatctccggccccctgatggtggtggaccatgtgcagggcgtcacctatgacgagctgggggagatcgagctgtctgacggtaccatccgccgctgccaggtgctggaggtcaacggtgattccgccgtggtgcagctgtttgagagctctgcgggcatcaatctggcggagtccaagatccgctttttggggcaccccctccagctgggggtgtcggaggacatgctgggccgggtctttaacggcatgggccggcccatcgacggcggacctgccatcctggctgacgagtaccgggatatcaacggcctgcccatgaaccctgccggccgggactaccccaacgagttcatccagacgggcatctccaccatcgacggactgaacaccctggtccggggccagaagctgccaattttcagcgggtccggcctgccccacgccgcgctggccgctcagattgcccgccaggccaaagtgctggatggggaatccaacttcgcggtggtctttgccgccatcggcatcacctttgaggagtcggagttctttgtcagcgagtttaagcgcaccggtgccatcgaccgcacggtgctcttcaccaacctggccaacgacccggcggtggagcgcattgccaccccccgtatggccctgaccgctgcggagtacctggcctttgaaaaggggatgcacgtactggtcatcatgaccgacatcaccaactacgccgaggccctgcgggagatctccgccgccaagaaggaggtcccgggccgccggggctaccccggctatctgtacaccaacctggccaccatctacgagcgggcgggccgccagctgggcaaggagggctctatcaccctcatccccatcctgaccatgccggaggacgacaagacccaccccatccccgatctgacggggtatatcaccgagggacagatcatcctctcccgggagctgttccgccggggcatcaatccgccggtggacgtgctgccctccctgtcccgcctgaaggacaagggcatcggcgtgggcaggacccgggaggaccactcgggcaccatgaaccagctcttcgccgcctatgccaccggtaaggagaacaaggagctgatgtccatcctgggcgaggccgccctcagccccaccgacctgctgtatgccaagttcgcggacgagtttgaaaagcgctatgtttcccagggaacagaggagaaccgctctatccaggagacactggacctgggctgggagctgctgtctatcctgcccaccgcggagctcaagcgcataaagccggagctgatcgagaagtatctgccccaaaagggctaaggggggaccagaatgccttccacgaccataaatcccacccgcatggagctgacccgcctgaagggccgcctgcgcaccgcccagcggggccacaagctgctcaaggacaagcgggatgagctgatgaagcagttcatggaggtggtgcgggagaaccgggccctccgccgccgggtggaggagcagctgatgcgcgcccagagctccttcacggtggctgccgctgtcatgtccccggagatgctggagcagtccctgctctatcccaagcagagcgtagaactggacatgacttttcagaatatcatgtcggtggatgtgcctcagtaccacttcaggacccacagccaggacccgggggagatctacccctacggcttcgccaacacctcaggagagctggacgacgcggtctctgccatgtcccaggtgttccaggatatgctgaagctggccgagatcgaaaagacctcccagctgctggcggaggagatcgaaaagacccgccgccgagtcaatgccctggagtatgtaaagatcccggagatgcaggaaaatatcaaatatatcaccatgaagctggacgaaaacgagcgggccaacaccatacgcctgatgaaggtgaaggagctcctgctcagagacgccattgaggagcggagagaggccgacgccaaggcggtggaggccttcgccggatacccggaggggccggcaggcgtttgacgcccagcagaatctgcatgaaagagcccggatgggaccatagggtcccatccgggcttttcgcagcccgttcagctgtgccgctgagagtcggactgcgcccgggcccgctggaggacgaaacgcaggaaggcctgcatagaggggggctgctcctcatcccggcgataggccatatagatggtgcgcttgtagaggcggtccttcaggtgaaggagcttcacttggctgttgtccagcacatccgttttggccacgatggagactccgaagccgctggccaccagagaggagatgctggcctctccggtggcattgcagaatacctgaggcgtccagccgctctgggagatgtacgccatgatatcccggtagatctggacatggggcatataggtgataaaggggtagggggcgagctgactgagcaggatctggtcctccgcagccagcggatggtccggcggcacgatggccaccagctcctggtccagcagggggacgaactccacctccggctcgccctcctcgtagatacagaagaccacgtcatagaggaaggtcttcagcccgtccagcagctcccgggtgggcagctcccgaaagccgaaggtgacctgctcatagcctggctgctggagaaaggcccgcaccgtctcgggcatgaatttgggggagaggggggcgatgtagcccacgtcgatgtggccctgccccgggcgggcggcccgcttcagggtggcgttcacagagtccaggcggcccaggagggcgtccacctccttaaaatagagcaggccgtatttgctcagttccaggtggcgtccctttcggagaaagagggggactcccagctcccgttccaggctggcgatggcggcgctgagggagggctgggagatcatcagctgttccgcggtccggtggaagttcagctgtccggctgctgccctaaaataatagagttgattcaatgtcaaattgctgcacctccccaaaaatgcggaaaaatatcctatatatttccctatattttattaaagattgagaagtttgtcaagaaataaacaaatattgataaaattaaatctatcaaaaaggcaatgaattggtattttactttttgacggcttggctggataatagagacaggaaaaggaaaagaaaacccaattagatttgtgataatatccaaacaaagagctttagaaatgagggatcgatatggagcgttatcaggataaagtggtgctgatcaccggtgcgggtgacgtggccgaggcggctgctaagcggctgctgtgtgagggagcaaaggtggctttctctgacttctcccaggaggcgctggacgcagccatctccgggctgaaggccgaggggtgggacggggagcgccttatgggcataaagtgcgacgtgcggaagtatgaggagtgcgaggcggcggccaatgccgtcctggccaggtgggggcagatcgacaccctggtagccaccgccggcatcatccgccactgtcctatcgacgagatgactgaagcccagtggcaggatgttgtggacatcaacctcaccggcgtgttccacgcggtgaagtcggtggtcccctccatgaaggagcggaaatacggacatatcgtggtcatctcctccattggaggtcggacgggccgtcccggcgtgggtgtcaactacgctgccaccaaggccggtgtgaacgggttggtgatgtgcctgggctatgagctggggccctggcagatcacggtgaacagcgtggcccccggccccctgaagggaaagatgttcgccggcatgacccaggaccgtatcgaatccctgtccgccggtatccgcctccagaggatgggcgaactgagcgacgtggccgccgccatcgcctatctgggcagcgacgacgccgcctggaccaccggcgaggtgctggatgtgaacggcggcctccagtattgaggccggcagatcctttgtgcaaaagccgtgaaaacggcgctgatccatagctgatacataaaacgaggaggaaagacaatgaaaaaagcgattgccctgattctgaccctggccatgtccctgagcctggccgcctgctcaggcggtggaagcggctccggagccgcttccaatcccccggctgcttccggcggtagcagcacatctggtacggtctcttccggttctgcttccggggcctatgcggatctggagcctgtggagctgactctggcggactctgctgcggtgggagcggctggagagatttttgaccgcctgtttgcagagaaagtggaggagatcaccggcggcaagatgacggtctatttgtatcttaacggcgagttgggcaacgatatggatctgctgtcccagatgcaggcgggctatattgatctggtgggctgccagatcgctcccgtggtctcctttgtccccgagatggccatcttcgacctgcccatggtgtttgcccagtatgacggtgagaccatcgaccaggtgctcaacggcgacagccagacccatgccgccatgtccgccgcctatgagaaagtgggtctggagctgctgggcatccagcagtacgccacctaccgcctcaccactgccaatcgggagttgcgcaaactggaggatttcaaaaacctccagatccgcaccatggagaacagcaaccacatggccttctggactgccatcggcgccgcccccactcctctggcctgggctgaggtgttcatttcccttcagaacggcaccatcgacgcccaggagaacgcagcggatacctgcgccagcaccaactttcaggaggtccagaagtacctggcctgtactaaccatatcctgtacgccaaccagctgtccatgaacaaggagaagtatgactccctggatcccgcttaccaggaggcgatcaatcaggcagtcgcagaggcgattgaagagatgaaatcccagatggtggagagcgatgagaccaacaagcagaccttggtggatggtggcatgaccctcattgagtatgatgacgccttcttccaggagatcctggcgctggatactgtccaggccctctacgataagatcgatgcggatgtaaatggtttgggcaccacccttcaggaggagcttgccgccgctcagggctgatctatcccgcgatattccgcttagcagcagtttcttcctgttgctcctcttaaaccgaatgcctctttgcggtccgctggtcagagcgggccgtaagggggcattccccttccagcaatcaaacagacgggcgaacgccccacagaataaggaggtctctcttatgagcaagtttttttccctggcctatctgactctgcccaacacccacccggtggatcagatcgagatcgccgcccagtgcggctatgagggggtgggcctgcggaccatctcccagcacctgcccggagagccggactacgccctggccaacggccgaatgttccagatggtccgcgctgccctggagcgcaccggcgtgaggctgatggacatcgaactggcccgggtggcggacggggtggacgtaatgagctacgagaaggagttcgccctgggggccgagctgggggcgaaatacgctatcgccagcgtgtggagtgcggaccgggacttctcccgggtgcagttcgagaagatgtgcgatctggcggacaaatacggcatgaagctcaatctggagttcgtccccttctcaaacatccccggcctgaccgaagccctggcctggatggacctgatggaccggcccaatgtgcaggtgctggtggacactctgcacgcccaccgggtgaaggtcaccccagaacagctgcgggaggtagcggcggagcgattcggcttcgtccacctgtgcgacggtccggccttcatcccgccggtggaccacccggacatggtgggcgtggcccggggcggacggctgtacgtgggagagggcggcatcgacctggcggggatgctgaagaacatccctgatcccccctactattccatcgagctgcccaacgcggcggaggtggcgatccggggcaagctggagcacgccaggcgctgcctggagaccgccaaaaccttcttcgcggcgcaccagatctgaagagaaaagaggcccgggatcttctgatcccgggcctctttttggcgtttggtcagtcctggcgagcggccaggcggcggctgcggaactcggcggccgcggtgaacagcacgtcggaggaggagttcagtgccgtctcgcaggagtcctggacgacgccgatgatgaagccgatgcccaccacctgcatggcgatgtcgttggggatgccgaacaggctgcacgccatgggaatcagcagcagggagccccccgccacaccggaggagccgcaggcggcgatggaggctaccacgctgagcaggaaggcggtaggaaagtccaccgagatgcccagggtgttggcagcggccagggtgaggaccgagatggtgatggcggccccagccatgttgatggtggctcccaaggggatggagacggagtacttctcctcgtccaggcccagctccttgcacagccgcaggttgaccgggatattagcggcggagctgcgggtgaagaaggccatgatgccgctctccttcaggcagcggaacaccagaggataggggttgcgccggatgcacaggaagaccagaatggggttgacgatcaaggccacgaaaaacatacagcccgccaggacgcagagcaggcggccgtagtccatgaaggaggagaagccggtctccgataccgtggtgaacaccagacccaggatgccgaagggggcgcagctgatgacccagcggatggcggtggagagggcgtcagacaggtcgcccagcacctgcttggtgcggtcggaggcgtcccgcagggcgatgccgaagaccacagcccacagcagcaccccgatatagttggcctccgccatagcggagatggggttgctcaccgcgttgttgagcagggtatggaggatctcgccgatgccgccgggggcgctggaggccgcctcctgggccagcgccagggtggagggaaacagaaagctggcaaccaccgcacacagcgcagccagaagggtgccgatgaggtagagcgcgatgacggtgctcatattgctcttggcccctttcttgtgctgtgccagggagtgcaagaccaggaaaaagacaagcaggggggccagggccttcagcgcgcctacgaacagggtgcccaggaggctgaggaaggaggcgccgggcaggaggaagcccaggacagcgcccaggatcaggccgatcagaatacgtttgaccaggctgagctggttccatttgcaaagcagttccatgaagaggttcctttctggccaaaggccggggaatggagggtgttccgccggaagaggacatctgtccgtccggacaaagaggtcaaaaaaagacacgcttagaagcgtgtctttctttttggagcgagtgacggggctcgaacccgctacctccaccttggcaaggtggcgctctaccagatgagctacactcgcaacaacaaagcatattatagcagaaaatttgtcgctgtcaagcataaaatgaaaaaattgagaatgatctcattccgccccgtcggaggaggcggaggaggtgccgggaacctcctccgtcccctcctggctgtccgacggctccccgcagggggggaccgcctgggtatcccactggtagcccagggcggccatctcccggtcagagaggagagggtactgcccgcggctgtccgccccccgggtgaggtccagatggcgatagccgctctcggtgcggacgacgttccagaagtggggtgacccgtccagggtgcccggtaccaccatgccggtcagctccagccgttgggccaacagcagggcggccagggaaagtccctcgctgtctgctgcccccgccaccagggcgtcataagcgctggcccccccctccggatcgtagtgtccggcgtccagcacggcggcagatacggtctggatggcctcgtccccctcggtcccccagatggagaccacgatctcattggcgcgccgggccagggcggtccggcggcgctggagctctttctgctccaggtggtaggtaagcaggacctccacgatgcgctggcggccgctctcctccccttggggatagatatagacctgggcctcgggcagatccagggcggtgtctggactggcatagtaggcctcccggaagagggtttggatgtaggtctcgtccccctcgaagtagctgatgcgcagggcggcctcggtgccgaaggaggagagcaggtccttgagttgggagcggatggcggtggcaccggtggcggccacgatggcggagacctgctcccgggtgcggcggtaggtgatctccacagcggcctcatagtaggagacaataggggtcacatcatagcggatgaagtccactgaataggctcccagagggtcctcctggaccacctccagacaggcgttggacagggactgctccacatcctggtcgtagttgtacatccggacagtgccctcctcctcacccagggagatgaggtagatcagggcattgaccagctcctggtagttctccacccgaaggatggaggagtccccctcggcagggggcgtggcgctgtggggagtcacgctggtgtagctgcgggcgagcagtgaggagcacccggacagcagcagggacagcgcggccacggccgcgcagagcctccatttcatcagatccctcctcccatgttcccgccggggctcacatccccagcgcctctccgatcagtacgacttccatctcctctgtggcattgggacgagcccaaagaaccgcaagtcctcggcagatgcgctccgggctcttgcagtcatagcaccggtctgccttggcggcgcagggggtcctgcaccccatggactgtgcccgcttgggggcggccacgttccgggcccgccacagtgccgcctcaaagtcgggggcgaccttgttgacacccaccaggaagtagaccttctggtggccgtacagggtggaggagacccggttgccgttgccatcgatgttgacgatctccccggtctccgccagcgcgttggcggaggtgatgtacacatcggtgaggacggcgtccctcagggcgcccccctcccagtgccagaccacctggttgtgggcagccagcctggggtagagccccatctccttcaccgtcatggacccgccgatgcccaccgtttttccatcgatctggccgtccagataggcggccgcctcatctgcggtggggaagtaggtggtgcggaagccgcgggcctccaggttggcgcggagtttttccagatctgccatggtgatacctccctgaaaaaatgaatggatcacaggtcatgctggtgatagctgtggaagccctggcccagcacctcgtgggcatcgcacacgatgagaaaggcggaggggtcggtctcctttaccgcccgcttcagggccacgatctgcttctgcttgaaggcgcacatgagcacgtcttttgcctccccggaccaggccccggccccccggaggatggtgacgccccggtccagctccgtactgatggagcggatgatctcctggggtcggtcgctgatgatataggccaccttggcgttgtccaggccgtagagcacccggtcgatgaccagggaggagatatacagggagaccagcccgtacagggcgctgctcaggctgtggaaggccagagcggccagggcgatgaccaccaggtccaccgccatgaccagggtgcccatgggcagatggccgaagcggagcttcagcagccgggcgatgagatcggtgccgccggtggtggctccctggaggaacaccatcccaagggacagcccgatcagcgcgccgccgaagacggaggccagcatggggtccatgggcgggaaggagtaacaggcggccagcaggtccacccccagggaggtggcggcggtggcgaagagggaggaggccagcagcttccaccccagcagccgccagcccagcaggaacaggggcaggttgagggcgatgaccgcactgcccaccgggatggcggggacgatggcatggatgatctgccccaggccagtcatcccgcccaaggtgatctggttgggaacatagcaccagtcaaagcccagagcaaagacagcggaggccagtgtgatccacagatagggccggaaggcggcccagagcttgccggtgcgcacaaaaaaacttcctttccttttctggttgggcggcgcggcggctgcccgggacggtggtgttacagcagggtcatctgctcctctccccggtcgggctcccgaaggagggctcccgcaatgggcagggagcgggcccggtagcgggcggcgttgcggatgggggtctgagccaggggcagggccttctccacccggtatttaggcttgagggacatgacgttgaccccctgggtggtgcgggtagtcttgggggagagggcggaggtgtggaagatcatgcagcgcccctcggtggagtagaccgccatctcctggtcctcctccagcaggaaggcggagaccaggggggccttgtcggaataggccccggtgagctttttccggcgggtctgggtctggtaggcggacagttccacccgggccgccttgccgttgtcaaagaagaagagcagctggcggcggtagtccccggggatgcaggcccagaccacccgctcctcctggtccatggcaagcttggtgggcaggtagtcccccagcacgctggccttggtgtcctcaaattcgctgagccgggtcttatagcactgctgcctgtcggtaaagaccagcagctcgtcccggttggaggcctcccaggtaaggaaggggccgtcgccgtccttatacttctgctcgctggacatccgcagggactggggggtgattttcttcagatatccctcccgggacaggaagagattcaccgggtagtcggggacctcctcctcagcggtgagcagctcctcggtctggtggtcatagacgatatcggtgcggcgggggagggcgtactttttcttgacttgctccagctcaccgatgatgacctgacggatgcggcgggggctgttcaccaggtcctggaggtcagcgatctcctcctccagggagtccacctcctgggtgcgcttgaggatgtactccttgttgatgttccgcaggcggatgtcggctacgaactcggcctggatctggtcaatgccaaagccgatcatcaggttgggcactacctccgcgtcctcctcggtctcccggatgatgcggatggcccggtcgatgtccagcaggatgcgcttgaggcccttgagcaggtgcagcttctcctgcttcttcttcagggagaagtatgtgcggcggcgcacgcagtcgctgcgccaggcggtccactcctccaggatctcccgcacccccatcacccggggcatcccggcgatgaggatgttgaagttgcaggactggctgtccatcaggggggtggacttgaacagcttggccatcagcttgtccgggtcagtgccccgcttcaggtcgatagtcagcttcaggccggacaggtcggtctcatcccgcatgtcggcgatctcacggatcttgcccgacttgatgagctcagccaccttgtccatgatggcctccacggtggtggagtaggggatctcgtagacctcgatgatgttgtccgccttgaggtagcgccacttggcgcgcaccttgaaggagccccgtccggtgcggtagatggaggccagctccgaggcgtcgtagagcagttcaccaccggtgggcaggtcgggggccttcagggtggacatgagatcgtggtccgggtccttcagataggcgatggtggtgtcgcacacctcccccaggttgaagccgcacaggttgctggccatgccaacggcgatgccctggttggcagagaccagcacgttgggaaaggtggtgggcaggagggtgggctccttcagcttgccgtcgtagttgtccacaaagtccacggtgtcctggtcgatgtcccgaaacagctcggcgcagatggggtccagccgcacctcggtgtatcggctggcggcccaggccatgtctcgggagtacacctttccaaagttgcccttggagtccacaagggggtggagcagggccccgtagccccgggagaggcggaccaaggtgtcgtagatggcggcgtccccgtgagggttgagcttcatggtctggcctactacgttagcgctcttggtacgggccccgcccagcagtttcatctgatacatggtgtagagcagcttccggtgggagggcttgaagccgtcgatctccgggatggcccgggagacgatgaccgacatggcatagggcatatagttgatctccagcgtctcggtgatgggctgctccagcacctcggcccgcaggcccatgacgttggggttggttaccttgggtttggtctcgtcggggtttttcttctttggcatagggatatccgtcctatcttctgccccagcttagggggacattttcaatcaaacactgaaagagatcacgcatctgcccgatatagagggatcaggctggcaaaacaaatgctcaaagatccaaagatttgagtacataaaataagatcctggtcgaaccgcagaaaaaaccacagaagaaaacctgtggggcagagcgttccattgagcaaaaacagagctccgaggatctttttccagtgatcccatacagcggaggaaactttccgacttgtccaggcggaaggcattccgctggccgtcagaaaggatacaccgaataacagagagaaaatggtcatgcaggcgtacagagcggggagagagggaaaactgtgtgagaagacattcagaaaagcgatggatgccagtgtatagaaaaagagatgtgtgagccgtttcatatcacccctccttgggtgcgtacgccatcccaaagggcgttgcggccaggccgccctttcccgtctcccggagggaggggggcagggaacggcccacctctgccatggcgtccagaacctggtccggggggacccggctctcgatgccggccagagccatctgggccgccgaaagggcgtccatggccccgatgacgttgcgcttgacgcaggggacctccaccagcccgcccacaggatcgcacaccagccccagcagattcttcacagccatggcgcaggcgtgagccatcatggagggagtgccgccccggaggtggaccagggcgggggcggccatggcggcggcagagccgatctccgcctgacagccgccctcggccccggagatggaggcccgggcggcgatgaccattccgaagccggaggccacatacagggcctggaccagctgctccctggagagagagaagtgccgggcgcaggggaggagcaccgcgggcagcacgccgcaggcccccgccgtgggggcggccacgatgcgcttcatgcaggcgttgcactcccccatccgcagagccccggccatcacctgggagagaagggggccgcacagggggtccccggcggcgtacagggtcattttggccccgtcacccccagacaggccgctgtgggagcggtcctgggcctgatagctctcgtccgcctgcaccatggcgtccagcatggcccccatccgctccagagagcgggcgcggggcaggtcctgccgccggcagtcggattccagaatgttttcccagaggggcaggccgaactgttccgtatcctggagcatctgggcgatggagtcaaaggcgatcaaaggggcacctcctgttcttccggggtgtagcgggtgacccgcaggatgccgggcagggcccgcacgtcccgggcggcgtcctcggggatgggctggtcgcactcgatgaccatgacggcgctgccgccccggccgccccgattgagctggagggtggccacgttgaggccccgcctggccagcacgccggtgacctgactgacgcagccgggctggtcggtgttgtggaccaccagggtgggcagctccccgctgaaggaggtgtgcagtccatccacctgaaagacccggatgcgcccgcccccaggggaggaggcccccacctccagctgtccgcccccggcatcctcaagacggatgagggcgctgttggggtggacgtcccgcaggacgcaggtgccgaaggagaaggacagcccccgctcccgggccagacggaagctgtctgggacccggccgtcggccggggagaggcccagcagcccggccaccagggcctggtgggtgccgtggccctctccggtggaggcaaaggagccgtggagcagcagctgggaccggacgggctcctgccccagcagagcccgggccatgcggccgatgcgcaccgcccccgccgtgtgggagctggagggccccaccatgacgggacccaggatgtcgaacaggttcataggtgtgttcctccgctgcgatctcatgtgaagtaaagcaataaaagaaagagaaacatcaggcaggaaaggccgatcacaaagcgccccagccatctggccagccgacggcggtcctccggcgtgtcgtcggcaagtcgcctgccgtttttgatcagatagatgcctccgtccttaaaatagcagagggcctgaattgcagcgtcagtcctgtacaggatgatgcccagcaggagaaagaagatacacaggatggaaaatccaaacatcacaatggaatcgtctgacattgggcttctccctgccgctcgtgatgagatgattacgagatgtccgccagctccagatatttgtagccgttgtccgcgatgtggctcttgcgcccctggaggtcatcccccagcagcaggtcaaagacctgggcggtgcgctccacgtcctccggcatcaccttgatgagccggcgggtctcagggttcatggtggtcagccacatcatatcgggctcgttctcgcccaggcccttggagcgctgcacatcgcacttttttccctccagagaggcgacgatgtcgtttttttccttgtctgagtaggcaaaccaggtcttttccttacaggtgatctcgtacaggggggactccgcgatgtagacatagccctgctggatcagggtgggggttaggcggtagagcatggtgaggatcagggtgcggatctggaagccgtccacgtcggcatcggtgcagatgaccaccttgttccagcgcaggctgtccaggtcaaaggaggccaggtccttcacgtgcttgtcctggacctccactccgcagcccatgaccttgagcaggtcggtaatgatctcgtttttgaagatcttggcgtaatccgccttgaggcagttgaggatcttgccccggacgggcatgatgccctggtactccgcgtcccggctgagcttcaccgcccccatggcagagtctccctccacgatgtagagctcccggcgggacacgtccttggtgcggcagtccacgaacttctgcacccggttggagatgtccatggagccggacagcttctttttgatgttcaggcgggtcttttccgcggtctcccggctgcgcttgttgatgagcacctgctcgcagatcttgtctgcgtcgaaggggttctcgatgaaatagacctccagctgggcgcggaggaaatcggtcatagcctcctggacaaatttgttgttgatggcctttttagtctggttctcgtagctggtctgggtggagaagttgttggagaccagtaccaggcagtcctggatgtcgttgaagctgatcttgccctccgacttctggtacttgcccagctgcttgagccgggcgtcgatggcggagacgaaggcggatttcatggccttctccgggctgcccccgtgctccagccaggaggagttgtggtagtgctccacgatggacacccggttggagaagcagaaggagaccgacagcttcaccttgtactccggcttgtcctcccggtcccggcccttccgctcggtctgccagaacacaggctgggtcaggggattttccccggccagttcggtgacatagtccaggatgccgttgtcatagcggaagtcggtggtctcgaacttcccaccggtctggttgcggaagcggaaggtgacgccggagttgaccacagcctggcgcttcatcacgtccaggtagtactccacggggatgtcgatgtcggtaaagacctccaggtcgggcttccagcggaaggtggagcccgtctttctgccccggtcagtgggttctttgtggagcccgccgatattctcccccttctcaaagtggagggtgtatttggagccgtcccggtagatggttgcgtcgaaatactcgctggcgtactgggtggcgcaggagcccaggccgttgaggcccagggaatactcatagttgtcgccgtccccgccgtacttgccgccggcgtacagctcacagaacaccagctcccagttgtagcgctgctccttttcgttccagtccaccggacagccccggccgaagtcctccacctggatggacttgtcctcgaaccgggtgacgatgatgagatcgccgtggccctcccgggcctcgtcgatggcgttggacatgatctcaaacacggcatgctcgcagccctccagcccgtcggagccgaagatgacgccggggcgcttgcggacccggtcggccccttttagggcggagatggattcgttgccgtagctgggtttcttctgagccatagtaataaagatccctcacagtacaatgcggcgcgggaccgcgcaaaataacaattataataataccccatttgggcggagaaagtcaagaaaagggcggagcggcctgggacagaaaaaagaggctgggagacagacaaaaagggaaagaatggacggggcgggaataaaaagaggggaaatgccccagactgaggaggaaaggggcgggatctgtggagaatttctgggtagccgaggagagcgagggcatcggggaggcggtgcgccggcagctgggggagcgggaccggcgcacggcagcgggaggatcaccctggctgctggtggtctccccccgggcagcggagcggaggaggcagctgcccactgggtgccggacggtgcttctgcccggcggagcgggggggctgctctccgggctggaccccgcggcggcggtaagctacggcaccgggcccagggacaccctgaccctgtccagccgggaggagcggcagctgtggtgcgccatccagcgggagctggtgacagtggagggacgggtggtggagcggcaggagctgcccctccgcctgccggatcacatgtctcccctgtctgtgctggcggcggcgggggccctgctgctgctgggggtgcccccggaggagctgggccgggaccgcggggcggtcaggggcggccagggatgaaagaccggcggcccgaggtgtcccctccggccgccgacaccgtgttacggttttttcatggtcaggctgatgcgctttttcttctcgtccacctccagaacccacaccgtgaccacatctcccacggaaagcagctgggaggggtgcttcacccgctggggcagcttgctgatgtggaccagcccatcctgatggaccccgatgtccacaaatgccccgaagtcgatgacgttgcgcaccgtcccctggagctccatcccgggcttcaggtcccgggcctccatcacatcggtgcgcaggatgggggcgggcagctcgtcccgggggtcccggccgggcttcatcagctccttgatgatgtccgccagggtggggacgcccacgccgcacacccgggccagcgcctccaggcccatggcctccgccttctccttcagggctcccatggcccctgccctgacgtcggacagggtgtagccgcactgggccagcagcgcctccgcggcggcgtagctctccggatggacaccggtgttgtccagaacggaggcgctctccggcacccgcaggaagccggcgcactgctcaaaggccttggggcccagcttgggcaccttcaggacctgcctgcgggtggtgaaggccccgttctcctcccggtatttcaccaggtttttggcagtggcggcggtgaggccggacacccgctggagcagggagggggaggcggtgttcacatccacgcccaccgcgttgacgcagtcctccaccaccccgtccagggcctcgcccagccgggcctggggcatgtcgtgctggtactggcccacgccgatggccttagggtcgatcttcaccagctcagccagagggtcctggagccgccgggcgatggacacggcggagcgcaggttcacatcgtactcggggaactcctcggcggccagcttggaggcggagtagaccgaggccccggcctcgctgacgatcatatagctcaggccgccccccagtctgtggatcagctccaccgccatctgctcggtctcccggctggcggtgccgttgccgatggcgatgtgctccacgccgtgctttctcaccagatgggacagcttggcgatggcctcctgtttctgccgctccccataggtggggtagactaccgccgtgtccagcaccttgccggtgccgtccaccaccgccaccttgcagcccatgcggtagcccgggtccagccccatggtgacccgccccttcaccgggggctgcatcagcaggggcttcaggttcagggcgaagttgtggatggcaccctcgtccgcctgctcagtgaggtgggcgcggatctcccgctccatggagggctggatcaggcggtcataggcgtcgtccgccgccgcccggacaaagtccatgcaggccgcgccgggcaccacggcccggcgcaccgccacgtgggcggtctccgggtccagctccaccgtgaccttgagcaccccctcccgctcaccccggttgacggccagcacctggtggccctgggcccggcccaccgggaccttgaagtcatagtacaggcggtagaccgtgtcctccggctccttggccgcagcccgggaggccagcatgccccggcgcagatacagttgccgcagctccctgcggatgtcggcgtcgtcggagatctcctcggccaggatgtcactggccccctggagggcgtcctccgccgtctccacccccttgtccgggtccagaaagtccagggccgcctgacgggggtccaccgccgggccctgagcggagagcagccgggccaggggttccagccccttctcccgggcgatggtggcccgggtgcgccgcttctgcttataggggcggtacaggtcctccacctccgccagagtggcggccgcagcgatggcgtcggagagctcctgggtgagcttgccctggttctcgatagcggcggcgacctcccccttccgggcctccaggttccgcaggtactgaaggcggtccgccagccggcgcagcagctggtcgtccatggagccgtggagctccttgcggtagcgggcgataaaagggatggtggcaccctcgtcgatgagggtcaccacattttgtacatgctccggagagcgttccagctcccgggcgagcgtttgaaggatggcgtccatgcaaaagtctccttggttcagaaatccctcccagtgtaaccgaattggaagaaaaagtccagggggaaagggtcaccaggtgatatggatctcccactggtcccactccccgtcccaggtgagagtgagaaaacagtcctccgcctgaacggcctccccttcccggagcccccagacgactgtgtagtcctggttctggtccagcatctggaagcggcccagagactggtccggcctgtggcggaggcagtagagaggatgggggcccgggtcatccgcgaagcggacgatgcccgtccgggcggtggaggagcactcgctgtgcatgccggtcctgatgtccagcatggagacgccgtcggagtgacagtggcggtagacggacaggggctccagatagccgcccctggtgtcccagatgtaggtctcgccgttgctgatgaagtagtcctggcacagggggcagaaggcgccgttggagacgacgaagtacaggccggtgaccagaaggaaaagcgcggtcagccccaggaccataacgtcgaatttggtgggcttgaattttttcatccggattcctccctcaaagacaacagttttctgtaaagcacgccctcctgcagagcccggtgcccctgtcgggcggcgtgccgttttccccaaagccttccccctctggggggaaggtgtcacggcgcatgccgtgacggatgaggggtcttccttcccgtgtcccagccgtgggatggcgaaaggggttccgccctgcggggcgggtccctttcccagcgatgggaaaggaaccaaaggatcgccgggggacactcccggcgggaccacggctccacgtgcgttccgcctgggtcccacagtccgctttcccccggcctcccaggcacgtgagccaccgagcggagttgtctgaaacctgaccggcgcggcaatgctttcgcactgaccagcgccttgcgccgctgccgctgatgccctgcgtcatttgggtccatgcgctgtgccagctttgcgcctagtgtttccggcctggcaggggttgcggccccctgttcgcgttgctgccgcgagtgcgttcaatgggagcggcccaacgataatcttgcacatttgctcaagatacatgatataagagggagggctgtccaggaagatattcacaatgcatatatatgcagtttgaatatctggtaaaaaatctcagttaatttataatgatatgcagaggtttagcttatgaactctgcatatcaccgcctatacagaacattaggcatcaatattgcctattatcgaaatatgaaagatatgagtcaggaacagctcggagacaggttggagatcgaccagagccatgtcagcaaaatcgagagggcttccatcgggatatccatggatatgctgtgtgatattgcaaaggaactgggggtagaaccgtacctcctgctgaaaccgaaggattgaaaaggaaaataaagttgggaccgggccgtctgcatcaccagacggcccggtcctattgttttgtgccgcccctaaagccttcccccctcaggggggaaggtgtcacggcggatgccgtgacggatgaggggtcttcctactcccgtctctgttccagtcatgggacctgccagagaggttccgccctgcggggctggttcctttctgagcgtccagaaaggaaccaaagagacgccggggaacgctcccggcgggaccacggctccacgtgcgttccgcctggggcccgcagtccgctttcccccggccccccgatgcgagagacgcgggccttggacatggcaccggcgtccggcgcgggtgggggacgacacacagttcccccgtttgcgctgccgccgctggtgtgtccaatgggcatgcacaccccgcggtggtgtcgcgcctggattggcagaataggggcagcaggtgcgaaatcagcgggcgcgcaaaagctgaagatatctcctcgcaggggcggcttccagccgcccgaaaagccttcccccctcaggggggaaggtgtcacggcggatgccgtgacggatgaggggtctttctttccgcgtcccagtcacaggatagggaaagggggtccgccctgcggggcggaccccctttcccctgaatctcccactgtccccgaggagaaaaccatggtataatgaaggacaagagacccctgaaacaaagacagaacaggagggactgctgtgaggacattggaggatatcaacgccgagctggagcaggtgcggcagaagctggaccgggcccggaagctgtccgccgtgatggaggatctgaaggcccagcatgaggagcgcaagcgggcggcggaggacgccctgaaggtgctgtaccgggagcaggaggatgtggaggagctggagcggctctcctttgcctccttcctggccagaattcggggggagcaggcggaacggctggaccaagagcggagggaggcggtggcggccaaagcccgctatgacgcggcccgccgtgatctggaggatctggaggcccgctttcaggcggcccagaaggagcgggcgggtctggagggcctgagggggcgctggaaggccctgatggaggagaaggaggaactgctctgccaggcgggaggggagcgggcgaagcgcctgatccagatcggctgtgatctggacagcctgggcgcccagatccgggagctggatgaggccatatgtgcgggaaaagatgtgggctatgctctggaccagatgatcggccagctggactcggcggcaggctggggcacctgggacatcctggggggcggcatgctggccaccatggccaagcatggacgtatgaacgatgcgcaaaacgcggctttccaagcccgacaggccataagccgcttccgcaccgagctggccgacgtgtcccagctccgggtgcccgaccttcaggtgggggagttcacttcctttgcggactatttcttcgacggattgttcgtggacctgtacatccaggacaagatcgggacggcccggcgttccgcggaagagacggcggcccaggtggaggacctgctctcccagctgcgccgggagcgggaccggacagcggagcgggccgccgagctggagcgggagcgggagagactgctggccggcatgtgaggacagcggccaggaaaggagcatggatatggaacaggagcagaggaccctgcagaaatgggtcgatgagagcagacgcatcgtctttttcggcggggcgggcgtgagcacggagtcgggcatccccgacttccgtagcgtggacgggctgtatcaccagaagtatgactatcccccggaggagatcctcagccgcagcttttttgatgcccggccggaggaattttaccgcttttaccgggagaagatgctctgcctggacgcccagcccaacccggcccaccggaagctggcggagctggaggcggcggggaagctgaccagtgtggtgacccagaacatcgacggactgcaccagcgggcgggctcccggcgggtgtgggagctccacggaagcgtccaccgcaaccactgcatgaggtgcggcagggcctatcccgtggagttcgtgcgggacagcggaggtgtgccccgatgtgcctgcgggggcatcgtcaagcccgatgtggtgctctatgaggagcagctggacgggcataccctgcagggggctctttcggacatccagggggcggatatgctcatcatcggcggcacttcactggcggtgtaccccgccgccagcctggtgaactactaccgggggcaccgcctggtgctcatcaacaagtcccccaccccctacgacgcccacgccgacctggtgatcgctggccccatcggggagatcctgggcggcgtagcggtggtgtgagggcgcgggatgaaaaacggccgcctgtttgagctgctctatctgctggtggagcgccgcgccctcaccgccggggagctggcggagcgcttcgaggtgtcggagcggaccatctaccgggacgtggacgccctttccgccgccggtgtgccggtctatacccagcggggacaggggggcggcatccgcctgatggatcagttcgtgctggaccgctgcctcctctcccccagggagcaggatgaggtgctctttgccctgcgggccctgctgtccaccggcgggctggagggggcggaggccctggaacggctgtccgccctgttccggcgggaggcggagggctgggtggaggtggacttcaccgactggggcagcggggagcaggagagggagaatttccgcatcgtgagggaaggcatcctggggcgccgcctgctggatttcacctactacgcctcctccggcacccgcacccgccgcagggtggagccgggcaagctggtgttcaaatccggctgctggtatctccaggcgttctgtcttgccaggagggactggaggatttttcgacttgcgcggatggaggggctgtgtctggaacgggagggctttcctcccagacggccgccggagcagctggaggttccttccccggaacagcggcagaatgggaccctgaccctccgttttgccccctccgcggcctggcgggtgcgggactattttgccccgggccagatccgggcgggagaggacagctgcctgctggtggagtgtgactttcctcaggacaggtggctgctgggctttcttctctctttcggagaccaggtggaggtgctcgcccctgcctcttggcgggaggtcctgggccggactgggaaaaagatcgcggccctgtatgaaactggacattccgtgtcaggtatccaggcgtatcctgagggcacagaggaggggagcacccctcccgaacaaaaggaggaacctgatatggaagagcggatcttttgccagtgctgcggcatgcccctggatgcccccgaggacatggggagcaacgccgacggaagccccaaccgggattactgccgctggtgctatcagaggggcgcattcaccgcgccggaggccacagtggaggacatgatcgcctttgacctgaaatttaatgaggagaacggacatcccttcggcccccaggaggaggcggagaggctcctgcgggcctggctccccaccttgaagcggtggcggaagtaggaaatggcaattgaggcagggcctgcggctggccggcttttctccgtgcagggtgtcgggcgcatgatatgcgcccctgcgaaatagacggagccccacgcctcccccaagggggaaggcgtgggggcgtccttctgcggggccggatcaacaggatggacaggcccccctctctgagggaggtgtaaaaacagctgcttccggggcggccctgacggacggagccctccgcaaacaaaaaacgggcggatcttgtaacagatccgccccttggccgttatacagacagaggggagggagcccgttggactttggacgcatctatgaggaatacttccgggagcttcagcggtacctcctgagcctgtgccgggacagccgaatagcggaggaactgacccaggagacctttttccgggccgtccgctccgccgggcagttccgggaggggagcgacctgcgggcctggctgtacaccattgcccggaacgtgttcctggaccagacgcggcggaaacggaacaccgagatccagctgccccgggagctgccggacacggcgggagtcactttgacggaggcgctggaggaccgggaggaggccctgaggctccactgcctgctccacggcctgggggagccttacaaggaggtgttccatctgcgggtgttcggggaactgccctttggggacatcgcccgggtatttgggcggacggagagctgggcgcgggtgaccttttatcgggccaagcagaagatcatcgcgggattggaggaggagaagcatggcggatagacccatgggctgcggggtgatccaggatctgctgcccctgtatgtggacggcgcggcgggggaggagtcccgggccctggtggaggagcatctcagatcctgccccgtctgccgccgggagctggagcagctgcgggggcgggtggtccttccgccggagacggacggaggggaggtccgggcctgggagaagggcatccgacgccggctggagcggcgggtgacggccgcagccgccggggtggtgctgctgctcattgccgccatgctggcggcctcccagttcgtccgcttcgggataccgggctggcagctggcggagcgggaccggggagaggaggggcagccggtggtgctgtcagaggcgcggaacggggacatggcctttttcctctatcaggagggctccagcctgcgctacacctactatgaaaacgagcctgggctggacttcggctatcactttcgggccagcggcaccggccatgaggagaccggggtgtatgtggtgcagcacggggagacactgctggtggtttcgctgaaccgagtggaggaggtggaggggatcgaggtgaccgacccggagagcggcacggtccggcagacatatccggtggccccgggggagcccttcgcggtgctggtgactctgggagaaggggcggaggacttggccctccgggcagtggaccgcaggggggagaccgttccctttgagaactactacgtgcggtgaacgggaacgaaaccgcagaaaaagcaggggcaggacaatacaaaatgtattgtcctgcccctgctttacgatttggatagagactgggttctcaggtgcccagataggccttcttcacgtcctcgtttttcagcagatcccggccggagccggtaagggtgatgcggccggtctccagcacatagcccaggtccgcgatcttcagggccatgttggcgttctgctcgatgagcagcacggtgaccccctgcttgttgatctcctggatgatctcaaagatccccttgaccaccaggggggccagccccagggagggctcatccatcatgatgatcttcggtcgggacatgagggcccgggccacggccagcatctgctgctcaccgccggacagggtgcccgccgcctgccaggagcgctccttcagccggggaaacagatcgtacacccagttcaggtcgtcttccaggtcgtccttccgcagataggccccgatcttcagattctccaccaccgacaggtcgggaaacacccggcgtccctcggggaccagggtgacccccttggagacgatgcggtcgggggacagaccggtgatgtcctccccctggagatggatgcggccgtgggcgggctttaccagcccggcgatggtgcgcagggtggtggacttgcctgctccgttggcgccgatcagggtgacgatctgccgctcgggcacttcaaaggtgatgccctttacggcctcgataccgccatagctcaccttcagttcatcaatcttcagcatcgtctgccacccccaaatatgcctcgatgacccgaggatcgttctggacctccgccggtgtgccctgggcgatctgcttgccgaagtccaggacgtaaatgcggtcggagatccgcatgaccaggtccatgtggtgctcgatcatcaggatggacaggtcgtactcatcccggatcttgtggatgaaatcggtgagctcctgggtctcctgggggttcatgccggcggccggctcgtccaggagcaggagcttgggggcggtggccagggcccgggcgatctccagatggcgctggaggccatagggcagggagccggccacctcgtccttcaggtgggccaggttctgctcctccagcagggacatggcctcctcccgcatccgcttctcctccgccctgttgaggcggaaggcggccgaaaacacgttctgcctggcacgcatgtgcttggcgatgagcacgttttcaaataccgtcagggccgagaacaggcggatgttctgaaaggtacgggcgatgcccttctgggtgatccggtccggggtgggggagaggacctgggaaaacataccctggttctccccctgatagagcttctgcattctgccttgggggtggttttccactatgggttctcccagaaaggagatccgcccgttggtgggctcatacactccggtgatgcagttgaaggcagtggtcttgccggcgccattggggccgatcagagccacgatctccccttggttcacctccagggacaggtcgttcaccgccaccacgccgccgaactgcatggtgacgtgctccagccggaggacattttccacttggctcatttcaccgccccctttccggacgccttgcggcgggcaaacagaatgtcagagaattccttgtcccccattatgccccggcggaagaagaggaccacgatcatgatgatgaccgagaagaccaccatacggaagccggtgcgcagcaggggaacggtgagggagccgctgatgatgaagaaagccagccagaccagcagggccagggccgccagggagaccagcagctccttccaaacctttttggtggtgcggcgctcccggcggatcagcaggagggccccgccgatgaccagggcggcgaagaccaggatgaagaggatgcgccgggtgtcggtaacggaggtgaaggtcatggggctgtccagaaagcgcagccaccactcggcgcaggccacatacaggaaggtggccaggcaggagccggagatggagccgatgccgccgatgaccacgatgagcaggatctcataggtcatggtggaggtgtacaccttggcctgggcgttgttgacgaacatggcaaacagggcgccccccactccggcgaagaaggaagagatgcagaaggagagcatcttgtgcttggccaggttgatgcccatggcttcggcggcgatctcgtcctcccggatggccttgaaagcccggccgtaggaggagttgatgagcatcacgatgatgataatgcagagaatcgcgatgaggaaggggaaaaaggtggacaggcggaggaacaccttcccgctcccgtcggtgaggttgaagttgttgaaggaggggatctgagtgatcatattggcgccgttggtgacgggcccaagggcctgccactggaacaccgcccggatgatctctgcaaagcccagggtggcgatggccaggtagtcgctcttcagacgcagcacaggcaggccgatgagccaggcaaagagggcggccacgcatccgcccagcaggatggccagcagcacccccaggatcaggcccgcgggggtgtccaccccgccgaacaggtcaggcagggagaagggcaccgccgagcccccgtacaggtagtacaccgaatctttggcggagacggggacggtgaggatggcgtaggtataggcgcccagcagcatgaagcccgcctgccccagggagaacaggccggtgaagccgttgagcaggttcatggacacggccaccagggagtagaccgccccctttttcagtacagtgaacagctggctggtgggctgaaggacggcggggacgctgggcagcaggctgctcaggttctccagcaggaccaccagcaccagcaccacagcggcgaagatcagccccgccgcggcgccctttttgctttttctgtcttggatcatgtcgtcattccctccttacaccttgtcggtggccttttccccgaagaggccggtgggtttgaagaccaggatgatgatgagcagggcgaaggtaaaggcgtccacgaaggtggtggcgccgtcaaagggcatgatcttcacaaagttctcacagatgccgatgagaaaggccccgatcaccgctcctggaatggagccgatgccgccgaacaccgcggccacgaaggccttcaggccgggcatggcgcccgcggtagggacaatggcggggtaggtggtgaagtagagcatggagcccaccgcagccagggcggagccgatgacgaaggtgacggagatcaccgagttgatcttgatgcccatgagctggctggtctcgaaatccttggccacagcccgcatggccatgcccaccttggtatggttgatgagctgggtgagcaccagcaccagggcggccaccaggaagggggtgaggatgaccacccacttgatggaggtccccgccagggagatggtgtccgacaggaagggaatggaggggtaggtcatgggctggccgccggtgatgtaggtggccgagttctggagcaggtagctcaccccgatggccgagatcattacgctcatccggggagcggagcgcaggggcttataggctgcccgctcgatacagaagcccagggccaccgtcagcgccagaaccagcagcaggctgacggggatgacggcggcggggggcaggtaggcggagagaaagctgctgaggtagatgcccagcaggccggccaccatgaacacgtcgccgtgggcgaagttgatgaggcggaggatgccgtacaccatggtgtagccaatggcgatcagggcgtactgtccccccaccgagatgccgaagagcagggtggagacaaaaaattccataggggttcctcccatttgctgtttttcaggccgcagggcctggagaggcggcggaacggtctctgtgggacaggtctggactgtctcaaaaagaggcgggactgcctccttttgaggcggcccagtccggtacggcggggacctggaggcccccgccgtaccggaaagcggtatcagtcagagagcggcgctcactgaacggtctgctgggtctccagctcccaggcgccgtcgttggtggagtgcttgatgtaggcggtgtcacggacggcgtcgccgttttcgtcgtcaaaggcgatgtggccggaaacaccgtcatgctccacatcccacagcgcggccttgatggcggcggggtccacggagtcggcggccttgatggcctccagagccacatagtatgcgtcatagcccatggcggacaccgcggcgacggtgtcgtttccgccgttggcctccagagcgccggaggcggtgttgatgtactccttgatgcccgcgtcaaactcggggttgccgccctcctgatagaaggtggacacatacagctgcacgtcggtgcccttggcggcctccagcaccatgttgtcgtccagggtgtcggagcccaggaaggggatgtcgatgcccagagaggcggcctgggaaatgatctgggtggcgtaggcgatggagactggggtgaagatgacgtcggccccctcggccttggccttgttcagataggagttgaagtcggagttgttggtggggaaggcgtccttgatgactttgccgccggcggcggtgaaggcctgctcaaagaagttgatcaggccctggtcatactcattgcccgcctcgcccaacagataggcggtcttggcctggaacttctccatggcgaagttggccaggacggtgccctggaaggggtccaggaagcagatgcggaaatagtagtcattgccggcggtgaccatggggttggtgcaggtgacgccgatggcaggcagccccgcgttgccgaaggtggggcctgcggcgatggacacgccggagccataggagcccagcaccagagaaacgccctcgctcaccagctgggtggcggcggtcagggccttgtcagtggaggagccgttgtcggcgtagaccagctggatctgatactcctggccgcccacagtgacggtgggggtctcagaattggcgtactgcatgcccagcatctccttcttgccgccggaggcggagtcgccggtggagggctcgaacacgccgatcttgaggacattgtccccggagacagcgggggtggagacggcggcaccgctgccggcgggggcattgccgctgctggaaccggcgccggcacagccggccagcaggcccagcatcatagaggcggagagcacgcaggcaagaaactttttcatcttcgatactccttttttcagttggattcaagtgattcaccgcactgaaatgtctgtgcaacaaaaacacttgtgcgcggatataaaggaattataccttgccagacggaaaaaagcaatacaaaatgcaaaatggatcagaaaaaattgcagaaaggggacaggcccagagaaacgcattaacgggagactgtcgggcggtgagaaatatggcccatccgcttgttctccggggaggggtgtgatacaataaaaaacgaggaaaggaaaagcggggcgcgggacccggatgccccataaaaagcagccggaccgccatactagaggtagcacagcgtgccgcccggggcggctcagggaggtcatttatgtctcagacactgtattttggagggcctatcgtcacgatggagcgggagctctatgtccaggcgctgctgacagagggggagcggatcctctacgccggcagtctgcacggcgcggaggaacgagcggaagggactgtgcgccgggtggacctgaaggggcgggccctgctccctgcctttgtggacgcccacagccacctgaccgcctatgccaacaccttcctccaggccggcctggaggagtgcgccagctgggaggagctggggcggcggctgtccgccttcgcggcaagggagggcctggccccgggagaatgggtccggggagagggctacgaccacaatgagctggcggaggggaggcatcccgcccgccagctgctggacgcggcctgtccgggccatccggtgatgatccagcaccgctcaggacacgtgggggtctttaacaccttggcactggagcggctgggggtaaatgaggagaccccgtgcccgccgggcgggaggatggagaggggccctgacgggaagctcaccggatatatggaggagaacgcattcctgcagttccagaagcgggtgcccttgccagacacagaagacctgctggcggcttatgacaaggcccagaggagctatgcctcctacggcgtggccacagtacaggaggggatgatgccggaccagctcatccccctctaccgccagctgctggagcgggacctgctctggctggacgtggtgggctacgctgatgccgacggacaggcggcggaggcgttctccggccatatccgggcgtacagcggccatttcaagctgggggggtataagatatttctggacggctcgcctcagggacgcaccgcctggatgcgcaccccctatctgggaggcggaccccaggaccggggctacccggtcctcaccgaccggcaggtgtatgaccggatggccctggccctggaccaggggatgcagctgctggcacactgcaacggcgacgcggcggcagggcagtacttgtccgtgctggagcagctggagcgggaacgggaggcacatctggagcggccggtgatgatccatgcccagctgctggatctggaccagatggacaaggtgaaggagctgggggtggtgccctccttcttcgcggctcatgtgtaccactggggagacgtgcatgtgaaaaactttggggcggagcgggcggcccggatcagccccgccggggcggccctggagcgggacatccccttcaccttccaccaggacaccccggtgctcccgccggacatgctggagacggtgtggtgcggagtgaaccggctgacccgctccggcgcggtgctggggccggagcagaagatccccgtggtggaggccctggccgcagtgaccatccgggcggcctggcagtattttgaggagggggagaagggcagcctgcgggaggggaagcgggcggacctggtgctgctggagcgggacccgctcactgcggaccccatgagcctgcgggacatccccgtgctggccacctggaaggatggacggctgatctaccgccgggagggctgaagccctgggggcgcaaaataaagaaagaggtgcctgactattatgaaaaccatcttgcaggaacagcggcgcagcagcgtcatcgtggctttgatcaccatggtgctgggggcggtgctggtggtgtggcccgaccggtctgtgcggctgatgtgcaccctgctgggggcggccctgctgatctgcggccttgtgtatatcctgggctggctggtccgcaggcgggaggggggcatatcggccttcaccctgatccccggcgtggtgctctccggcctggggatctggctgatgaccagctccgactcggtgatcgccctggtgcagtatgtgttcggcgctgtggtcatcttccacggcgtgctggatgtccagagctcggtctccctgatgcgccagggagcggctcggtggtggctggacctggccctctccgccctgaccctggccctggggacgctgatcctcatcaaccccttcggcaccttcgccgccctggtgaccctgatcggcctggtgctgatctacgacgggctcagcgacctgtggatcatccaccggctgagccggatggtgcgggacctggagcgggatctgaatggggacatcatcgagacaagggggcgggacttggatgaatgacctgcgggaggtggacctggagcggggcatgccccgggccgagcaggctatccgtcagatgctctttgagctgcgccgcagccccggcctggggtgctccggggtgaagcttatccacggctacggctcctccggcgcgggagggcgcatccgggtggaagccaggcggcgcctggatcggatgaaggcggggggagagatctggggctacatccccggagagtccttctccatctttgactccgacaccctggccgcctttcagcgctgtcccaccctgcggagggaccgggacctggagcggcacaacaacggcgtgaccttcgtcctgctgtaagggagcggcagagttctgccctggacagaaaaaatgaaggataaaaaatttttcttgcattttggggcgggaacccttataattcctttcaaaagagcggggcggagaaggatgggaggccccgcggggagagttccggagatcaatagagcgcggctgcctcggaccgcgctctttttttaccctggctgggccggacgctcccagaaacaggaaaggaagggaaaccatgattgaaatcatcaccaagatcaactcggccgtcaacaacttcgtgtgggggccggtgatgctgctgctcctggtgggcacgggcgtctacctcaccgcccgcaccgggtgcatccaggccgcaaaatttgggtatatcatgcgcaatacggtgggctcactgtttcgaaggcgggagaagcgggacaaggatgccaagaacctcaccccctttcaggcagtgaccactgctctggccggcaccgtgggcactggcaacatcgccggtgtcaccggggctatcttcgccggagggccgggggcggtgttctggatgtggttcgcggctttctttgggatgttcaccaaatttgcggagatcgtactggccctgaagtaccggcaggttgacgagaacggggtccactacggcgggcccatgtattacatcgaaaagggcctgggcatgaagtggctggcggtgctgttctcactggtggcgggcttcgcctgcttcgggatcgggaacatctcccagagcagcgagatcgccggggcgatggaggggctgttcgggatgagcggcctgaccaccggcgtgctcttggcggtggtggtaggcattgtggtgctgggcggagtccagcgaatcggccgggtgacctcctacatggtgcccttcatggccatcttttacattggggcggggctggcggtgatcctgctgcggatcgaccaagtgccggcggccctggcctccatcttcaccagcgccttcagctttgaggcggtggggggcggcgtattcggctatgccattatggtggctatgcgccaaggatttgcccggggcgtgttctccaacgaggcgggccttggctccgcccccatggcccatgcggcctccgagacccaggagccggtggagcaggggatgtggggcgtgtttgaggtgttcatcgacaccatcgtcatctgcacgctgacctccctggccgtcattctatccggtgtgctggacgtggggctggacagctacgccaccaacggcgcggcggcggtggccgccttcaatgccatcctgcccgggactatcggcgggaccatcattcagatcagcctgcttttctttgccctgtccaccatcctgggctggagctactacggtgagcggtgctgggcctatctgtccaacaacaataaagcggtggtgtggatctttaaggtggtctttgttctggtgtgcatcgtgggtgccaccggaaacggcaccctgatgtgggacatctccgacaccctgaacggcatgatggccatccctaacctcattggcctactgctgctgtccaatgtgatcattcgcagcaccaacgactatttcaaaaagcactgacttccgggagagacttggtattttgaagcaccggccggatgccggaaaagcccgcggcccccgcctgccccagagcaggcgggggcttttgctgtggagctggcaccgcgggggcgccaggagccatccctgttttcggacggagtgcctttttccgcagaggggtgagccattcccctgcaaggggtacaggcggcaaaagaaaaccggcggatggacgcttgcgtccgtggggtggaatcgatataatatagaaagaaaaacggaggtccgcctgaggcggggaaaggaaggccagatcatgcaggagagagcactacaatttcatatccagtgcggtccgggggatgtggggggctactgtgtcctgccgggtgatccgggcagatgccgctccattgcccagcggctggagggggcggtccatgtgcgcaccaatcgggagtttgagacctggaccggctccctgctgggggagaaggtgagcgtggtctccaccggcatcggcggcccctccgccgccattgccatggaggagctggccaacctggggacccacacctttgtccgggtgggtacctgcggcggcatccgcctggatgtccgcagcggagacgtggtggtggccaccggcgcggtgcgaatggaggggaccagccgggagtacgcccctatcgagtaccccgctgtccctgatttccaggtggccggcgcgctggtgcgggcctgccaggcgctggggaagccctggcacgcgggggtggtccagtgcaaggactccttttacggacagcacgaccccgcccggatgccggtatctggggagctggaggcgaagtgggaggcatggaagcggctgggggtgctggcctcagagatggagtctgcggctctgttcaccgtggcagcggcccggggagtgcggtgcggctctgtgttccacgtgatctggaaccaggagcgggagcaggcggggctggaccagcaggagtcccacgacaccgcgctggccatcgacgtaggggtggaggcgctgaagctgctgatccgccaggacgcccagagccaggccggagaaggccgctagacagaagagggaggagccccatggagcaggagaagagacagaaggagatcacccggcacggcctgatccgggtgggactgtggctcggcgggggctggctactgctggtcctgtgcgcctggggcatcctcccagaccgggaggtgcccgggatcctctgggtagggctgggcctgctgaccgcggaactagccatcctgtgggggaagacgtggtgggagagccggggacgcggccaggcgatccccgccggagcgcactggtggcaggcagagaaggaggagctggcggccgccgctgtgatgctggcggtgtggtggggctttctggccctgtgcgccgcgggggtgctcccccacatggaaccggaccggtacagctggctcctggcgggagcggtgaccatcctcttcggggcggagctgctgctctggcagagagggaggcgggaccggtagccggtggcgccagccaccggcgggccccggccgtcaggcggccggggcttttttccggctgaccgcttttagttggcaaacggggaaaagcgtggtataatggccctgaatttgaagcaggccgccccaaatgggacgcgccggggagggagcggaagatggacctgacagagcgcaccattgaaagcaaaacgatgttccagggccggatcatcacggtcctgctggataccgccggcctgccggacggggggaccgcccagcgggaggtggtgctccacccagggggcgtggccattttggcattggatgaggcggacaacgtggcgctggtgcggcagtaccgctatccgctccacggtctgctgctggagctgcccgccggcaagctggacccgggggaggaccaccgccccgccgcccttcgggagctgagtgaggagaccggcctggaggcgggggaactgacctatctgggccatatctatgcctcacctggattctgcgacgaggcgctgcacatgtatctggcgcgggacctgacccgcgcccggcagcacttggacgaggacgagtttctggatgtggtgaccatgccctttgacacattggtggagcaggtcatgtccggggagatcacagacgcgaagacagtggccaccgtgctgaaggtcaagactctgctgggccgctgatatggacgacaaggagggatttctgtgggaaagagcatcctgatcgtagaggatgagcagaacatcgtggatattttgtccttcaacctgagccgggaggggtatgacaccctggaggcctacgacggccccactgggctccaactggcgctggagcaggacccggacctgatcctgctggacctgatgctgcccgggatggacggcttcgaggtgtgccgccaggtgcgggagagcggctcctcaacccctattatcatgctcaccgcccgggaggaggagaccgacaaggtcctgggcctggagctgggggcggacgactacatcacaaagccattctccatgcgggagctgctggcccgggtgaaagccaatatccgccgtatgagcatggtgcccgctgggaagggggcggcagcctccaccaaccggatggagctgggccgggtgacagtggacacggaccagatggcggtgctcaaggacgggcagccccttcagctgtctcagcgggagtacgatctgatccgtttcctggcggcccagccgggcaaggtgttttcacgggaggccctgatggagcatgtgtgggactatgaaggctatgtgggcgatgtgcgggcggtggacgtggccgtccgccgcctgagagagaagatcgaggacgaccccgccagtcctaaattcgtggtgacaaagcgggggatggggtactacttcggcggctgagccggaggggccgagggcggggacgtcctcggggacccgccgcaggggggacgccggtggtccggcgcggacccggagcgggagcggagggtcctctccgggacgatccattcgtcctggagatcagaaaaaagaaaagggctcccgcaggacgagtcctgcgggaaactgaccccgccagtcctaaattcgtggtgacaaagcgggggatggggtactgcttcggcggctgagccggagaccgcccagggtgccgcagaggctatttcccagggcgccgaggtatggtgcctgtgaccggcaggaggatggaacagagaccgcccccctgagacagagggacggagagagaagagaggaggtgccccgatgctgcgcagcctgcacatgaagctggtgatgctgatggtgctgctcatcctgtcgctgatgacggtggtgggggctttcctcatcaactctgtggtggccttttacatccaggacttttacagccagatgagcacagtgttcggagaccaggagatcgtctccgacctgcgcaccgctgcggacggggagaccgacggggcaggggcgctgaagacggtgctgaatgcctatgccggccagctgggcgtggatacccgcaaccgcaatttctacatcctggacggggaggggacctcagtgctggccagctccaacggtgagagcggcgcctccggcttgtcctacaccgggaacctgatgacggctatcgagtccggccaggtgggagacgagagcaacgcggccgccgattacatggatgtggccatccccatccagcggggcggcagcgactatatcatctatatcctggacaacaaggccaccgtgtccaacctgaacaaccagctcttcctgctgatcatggaggcgctgctgtttggtctggtgatctcagtgctgctgtcattcctcctctccaagaccatgatcacccccatccagcggctgacggagggagccatgcgggtggcagagggggacttcgcccataagatcgaggtggcctcccgggacgagatcggcgtgctcaccgacaccttcaacgatatggcgggtcagctccaggacaccatccgccaggtggagaacgagcgcaacaagctcaacaccctctttctccacatgacggacggcgtggtggccttctcccggactggagaggtcatccacttcaatccctccgcggaggagatgctccaccggcccatcgggacggacaccaccttcggggagctgttcggcggcctggtctctctggagcgggtgctggcggtgcccgactacctccaggaggagcagacggttgaggagcgattcctccagctgctgatggctcccttcgaccgggaccggcaggggggcgtactggtggtcatccacgacgtcaccgagcagcggaagaacgaggagatgcgccgggagttcgtggccaacgtgtcccacgagctgcgcacccccctcaccaacatccgcagctatgccgaaacgctggtggacagcgccggagacctgcccccagccatggagaagaagttcctgggagtcatcctcaacgagagcgaccgcatgacccacatcgtgcaggatctgctcaccctgtcccggttcgactcggggcgcaccgatttgaagctgacccagttctccttttctgcggtgctccatgacctgtataacgcggtctatatggaggcccagcgccacagccatgcccttgagctgaagatcgagccggagctgcccgagatcgtggccgaccgggagcgagtggtccaagtgatgatgaacatcgtgtccaactccatcaagtacacgccggacggagggcgcatcgtcatctccgccggacggcggggggaccgggtgtggatgttggtggatgacaacggcatcggcatcccgccggaggaccggccccgcatcttcgagcggttttaccgggtggacaaggcccggtcccgccagtcgggcgggaccggactgggcctgtccatcgccaaggagatcatcgaccggcaccagggcgtgctggagctggccgacaaggagggcccgggactggcggtgcggatggagctgaagatagaggggccggaccatgaatagaaagagcaagcacgcccgcctgctggagctgggcaaggacgtgctgatcgtcctgctggcctgctcagcggtgtggctgactaccagggtccagcgcaccgggagcttgggagatctgctggcggacacgccccaggaggggcagggccagacccaggcccccggccagatggagatggtccgcccggtgcggatggcggcagtgggcaggagtggagagaccaccatccgctatggggcacagtatgaccagcagagcaccgacgccctattccagcaggtggccaatctgctggtggaggcgctgagcgacgggggagagatgagccccgtcagccagtgggagtggcgcaccgccctgacctccccgcccagcctgtacttcgacctgatggagggggtccccctgtcggtgctgacgggctggctcaccggggagagcacagggggggaggtgttcgtgcgccggctggcactggccgcctcccggggacaggtgttcctctactaccaggatgaggagagcgggcagttttacgccggcccggtggacgtgatcagcgtcagcaggctggagtccgccgtctccggcctgtcggacaacggcgcctgttttgcctttgagaaggaggggtacagcctcctgtctccctacaccctgctgatgccgggcacaccccagccggcggtctatcaggtctacaaccccctcagccgggaggagggcctcaacagcctgctggaggcactggacttcccggccagcagcagctacacctatcaggggaccgacggagagttggtggtgcgcaacgggtatgacaccctgcgggtatctgcccagggcacggtgcgctaccatactacggagggggagatatcccgttatccggtggcctcggacaccggcggaacggggtgctatgaagcggtagaggcctgccgggtgctggtctccgagacactgggcacccagtgcggggccgcccggctggtgctcacccatgtggagcggatcacggggggctgggcggtggagttcggctactgtctggacggcgcggcagtccaggtgtacgaggagggatgcgcggcccggttcctggtgcagaacggacagatcgcggagatcaccctccaggccagaagctatgaggagacggcggagagcgggctggtgctgccccggctccaggccatggccgccatggaggcggcggggctggagggccgggagctgctgctgggatatcaggacagcggcggcggaacggtcaccgctggctggatcgcccggtgagagagaccggaggggagggagagccgtggcctggcccaagatcaaaaatatcatcatcctgatgctgctggtgaccaacctgtgcctgctggcctttgtgggctggcgggagatccgggactggcagctccaggacaaggcgctggagcaggccgtctccttcctggcggagcggggcatccaggtggacgagcgcatcgtgcccaggtctgcggagctgccgcccatgggcatggaacgggacctggaggaagagcagaccctggcagcagcgctgctgggggatggtctgacccgggaggaacgcagcggcgaggtctatgtctatgcgggggagcgggggctgctccagtgccacagcagcggggagttctgggccgactttcagagcggcgccttcccggtcccagagggggcggagatggcggagcatgctctggggaccatggagctgctccacttccagggggaggtggtgagcagcgcgggcaacgcccaggacgggagcgtcaccctgcggcagctgtggaacggcgtgccggtgctgccctgtcgggcgaccttggtctacgaggggggcgagctgaagcggatcgaggagggccggcgtctcaccgggacgccccagaccacagcaggtacgcccatcacggcgacgacggcgctgatgcgcttttatgcgggcctgagcgagcggatggacatctgcagtgaggtccgggagatcgagatcgcctataccctctccaacgccctggggggccccatctcgctgatcccggtctggcacatcaccaccgacaccgagatatatgagctgaacaccttggacgggagcctggctgcggcaggcgccgaagagacagagcggacggagcagtagaacgagaccactgacatgtccggccggaagggccggagcgggacaacaaagaaagaaggagatcatcatgttcagcaaagaaagccccattgggatcatcgattcggggatcggcggcttcagcgtggcccggaaggtgcagaagctgctcccgcgggagaatctggtctatctgggggacggggccaacacgccctatggcaaccacaccgcggaggagatcctcactatgacccgctacatgctgcgcttcatggaagaaaagggggtcaaggccctgctggtggcctgcaacaccatttcctgcctcattgatcagtaccgggatgagatgagctgcccggtgctcagcgtagtccaggcgggtgcggacgcggtaaaggacttggatgtccataaggtaggagtcatctccacctgcttcactgcctccactcactgctacccggatctgatcggcaaggcagcgccggacaaggtggtcatcagccatggctgccctgacctggccaacgtggtggagcgaaacgtgggcaggccggagggacaggcgctgatcgatgcagatgtgcagaagaacctggagggactggtccgggacgagcagatcgaatgctgtgtgctgggctgcacccactatcccttggtggaggaaaatatccacaggctcttcccgggcctgcggctgctggacccggcggagcagatggccaaggacgtgttggcctatctggagcgggacggcttggtgaacgacggccctcagcccggacggctggacatcttcaccaccggcagcgcggaggagtacgccatgaaggcggagaaggtgggactggacccggtgacctcggtgcagttctatccccccatgaaactgtaaaaatagtccggcggagccggcgtcagaaaaaaggctcaagggccgccccaccggggcggcccttgagtttaaaaaatctgcttacagcttcatgatccagccgtggggatcgggaacgcggccccactgaatgccggtgagggtgtcgtacagcttctgggtgacagggccgatctcattgtggttgatgatggccttctcgtccccctcggccagctcgccgatgggggagaccacagcagcggtgccggtgccccaggcctcctccagggttccgtccttggcggcctggaagagctcctcggcggagatgcggcgctcctccacctcatagccccagtccttcagcagctggatgcaggagcggcgggtgatgccgtccagcacggaaccgttcaggtcgggggtgaggatcttgccgttcaccttgaacatgacgttcatagcgcctacttcctcaatatatttgcggtggacgccgtccagccacaggacctgggtgtaacccttctgctcggcgcggttgcccgcccgcagggaggcggcgtagttgccgccggtcttggccatgccggtgccgccccgaacggcgcggacgtcctggtcctcgatatagatcttggtgggggccagtccctcggggtagtaggcgcccacagggcagacgatgacgatatactggcagtggtgggaggtgtggacgcccagggtggggtccagaccaatgacaaagggacggatatacagggaggtgtccttctcataggggacccactcctgatccagcttgaccagctcagtgataccggccagggccaggtcttcaggcacctcgggcagggcaatgcgctcgcaggacaggttcagccgacgcacgttgtccatggggcggaacagctggatggagccgtctgcggtgcggtaggctttcagaccctcgaagatctcctgggcgtaatggaggaccttggcggctgggtcgatctggaggggggcataggggacgatgcgggcgtcatgccagccctgaccctcgtcatagtccaccacaaacatgtggtcggtcatatacttgccgaagaccagcttggaggagtcaggcttctccttccgctgctcggcgcgggtgatcttgatctcttgcatcttggtttcctcctaaagtaaactcaaatcgagcggtcctggtttggaggacggcttttctggtatttccatattatatcagcctttttttccagacgcaacgggtaatcgtgggaaaagtggggccggcccaactttttagggaaagaattccgccatttccccagagaatggccccgcctggacggtttgctattgtttttcccctgggggtttgatataatatcaccaatcaccgcgctgatacggcggcacggcgcgggaatggggcgtgaagaaggtcctgctgacgggcggacctttttgttgtgataggaggtcccgcccccgggagggggaggaacggccgccccgaagaggaggaacggatcttgaaccgaaaaatgacgcagatgcttcagccaagctttcagctctatttcgtctgtctgatcctgtttgccgcggcatccgcctttttcagcctgtatctggcggcggcggaggccgtggtggtggtcctgctggggctgtattaccgggagaacagccgccggcggcggcgggagatagccaagtacatcgagaacgtcaccgggaacatggatgtggccaccaaggacaccatggtaaactcccccctgcccatggtgatcttccggccggagagcgacgacatcatctggaccaatgaccgttttctccatctggcaggggagaaggagcacctgttcgacgccaagctgagcagcgtgatcccggattttgatacccgctggctcatggaggggaaaaacgagtgtcccaccgaggtcaccttcggtccccgccgctttctggtgtacggacacctggtccgggcctcgggccgggaggggggcttcctggccaccacctactgggtggacgtgaccgagttctgccaggtgcgggaccagttccgggggagccgcccggtgatggcggtgctgctgctggacaactatgaggacctgatgaagaaccagacggagaaccagcgatccaccatctacgccgaggtcaacgcccggctggatgcctgggtggcgggcaccgggggcatgctccgcagaatggagcgggaccgttacctgctcctgttcgaggagcagtacctgtcccggttcgtggaccagaagttcgacatcctggacaccatccaccaggtggtcaattccagcggcctggcggcgaccctgtccatcggcatcggcaaggacggcggcagcttccaggagctgatgcagtacgccaacctgtccattgagatggccctctcccgggggggagaccaggcggtcatccgcaacaagttcacctttgagttttatggaggccactccaccgagacggagaagcgcacaaaggtgaagagccgggtgatggcaaacgccctgtccgccctggtgtccgactcctccaaactgttcatcatgggccacaagatgcccgacatggacgccaccggcgccgcggtgggcgtgtgcgccatcgcccggaaaaaaggagtccccgcctacatcatccgggagggggggaccaatccctccaagcccatcctggataagctggaccagctgcccgagtaccgggggaatttcctcagtgcccaggaggccctggtggcggcggacagccgctccctggtggtggtggtggacaccaaccgcccggagcaggtccaagcccaggagctgctggagtcctgcaaccgggtggcggtcatcgaccaccaccggcgggcggccacctatatcgagggagcggcgctgaactaccacgagccctacgcctcctccgcctgtgagctggtcaccgagctgctccagtacatcgcagagcccaccgacctgctccgcacagaggcggaagccctgctggcgggcatcgtgctggataccaagaacttcaccatgcgcaccggcggccgcacctttgaggcggcagctttcctgcgccgctccggcgccgacaccggggaggtgaagcggctgttccagaacgacctgtccggcaccatcgccaaatacgatatcatccagaatgcgaagctgtaccgggaccacatcgccattgccgtggtggaccacacggtgggccgggtgacagcggcccaggcggcggacgagctgctgaacatcgtggggatcagcacctcctttgtgctctttcccgacggggagcagatcatcatctcaggccgctccatgggagacaccaacgtccaggtcatcctggagcagctggggggcggaggcaacgccgccgccgccggcggacaggtggcgggcaagacgctggaacaggtggccgtggagctgacacaggccatcgaccgctatctggaggaggactcctgagggagccgctcattcccaaataagatatttcctaaaattattactgatagtatttggaggaacacaacatgaaagtgattttacagcaggatgtcaagggccagggcaagaagggccagatggtggaggtctccgacggatacgcccgcaacttccttctgccccggaagctggccgtctctgccacggcggacaatatcaacaccatgaagcagcaggagaaggcacgcaaggcccaggaggccgccgagaaggcgcaggccgaggccaccgccaagcagttggagggactgatggtgaagatcaccgccaaggccggcgagggcgggcgcctcttcggcgctgtgacggccaaggagatctccgaggccctggccgagcagcaccaggtggagatcgccaagaccaagctggttctggacgaacccatcaaggcctgcggcggctatcagatccgcgccaagctgggctatgaggtggtcggcacggtaaacgtcatggtggcggaggcctgagaaggaaggtgaggggtgaggagaggggcgctgtgcagagcgttgatgcgcggccctcccaccgcccggcggttccgggcaccaaaatcccgaactctcgattttgaattcctgatttggaaggcaggtggtctcatatggcgctggaagaggaagagctgctccttaagcagctcccccattctgtggaggcggagcaggccgtgctgggctccatgctcatcgacccccgctgtgtcccggatgtgatcgagcagctccggccggaggacttctatatccggcagaaccgggagatctacgagaccatttactccatgttcaacttctccctcaccatcgacccggtgacggtgctggagaacatgcggaaaaacggggtctacgacgagaatgtctcccgcaactacatcctccagctgatggacaccacgcccactgcggccaacgtgggggagtacgtggccatcatcaaggacaagaccctgctgcggcgcatcgccgagacggcgggggacatgaccgctatggtccagcagggcacagacagcggccaggacgtgctggaggcggcggagcagcggatctacgccatccggcaggggcgggccgcccggggactgacacccatctccgccgtgctgctggatgtgtatgaccggctcaatgagctggccgccagcgacgcggcggtgcccggcctgtccaccggactgggggacctggatctggccatctccggcctgaacaagtccgacctgatcctgctggccgcccggcccggcatgggaaagacctccatggcgctgaacatcctgctccacgcgggcaagttctccgggaagagcgtggcctttttctccctggagatgagccgggagcagctggtgctgcgcctgatctccaacgaatcctttgtggacaacaaaaagctggtgaccggaaagctcaatgagagcgactgggagaaagtggccgccgccgccgacgccctgaaccgcactaagatcctcatcgacgacgactctacggtgtcggtggccgatatcaacgccaaatgccgccgggtggaggacctggggctggtggtcatcgactacctccagctgatgacctccgccggcggaaaggagcgcagcggcgacaaccggcagcagatcgtctccgacatctcccgggccctgaagatcatggccaaggaactgaacgtgccggtgctgtgcctgtctcagctctcccgtgccaacgagagccggaccaataagcggcccatgctctcagatctgcgggaatcgggggccatcgagcaggacgccgatatcgtcatgttcctctaccgggaggactactacgagaaagaatcagaaaaccacaacctggccgagtgcattatcgccaaaaaccggcacggggagacccggacggtggagctccagtggctgcctgagtacaccaccttctcctccatcgaccggacccatgaggagtattgaccatggcccattccagcccgttccatgggctgaacaccctcatcgagacctacggaatgatcccgccggggagcacggtgctgtgcgcctgctctgggggggcggactcggtgtatctcctgcaccggctgtacctgctccgggagcggatggggttccgtctggctgccgcccactacaaccatcagctgcggggggaggaatcccggcgggacgaagcattcgtccgccgcttcgtcgcccagtggtgcggccccgcccaggtggacggacatgagctgcccggtgtccccctctatgtgggccggggcgacgtggctgcccaggccggagagctgggacgaggcctggaggagaccgcccgggagatgcgttacgccttcctccgggagaccgcggcagagctgggcggagccctgatcgccaccgcccacaccgcggatgacaatggagagaccatcctgctccacctgctccggggcagcggcctgcgggggctgaccggcatccgcccggtgggggaggggctgatccgccccatgctcaccaccacacgggcccaggtggaggaatatctgcgcctctacggactgccccatgtggaggacagctccaacagggacgagtccttttcccgcaaccgcctgcgctggcaggtggtgccggagctggaggacatgtgccccggcttcgccagacggacggcagagaccgcagccctgctgcggacagacgaggactacctcaccggtctggcggaaaaggcggtggcggacttcctcccccgcgcggggaccctccgcctgcccgcggcagcggtgggggatctgcctgacgccttggcgccccgggcggcccggctgctgctggcccgcctgcgggacggagatgccgatctggccgccccccatctgaggggggtggtggccctgtgccgggggagggacccctctgcccggctggatctgccggagggcatcaccgcccgacgggagtacgagatgctggtgctcacccgggagactgcgcccccggcactggaggaggcatccctccccatgcccgggcagctgcggacgggggagtggactctgacctgcgcggcagcggtgtaccaaggggagccccagtcgggccgggaattctggctggctggggcagaggggctcaccgtccgttcccggaggaccggggaccggctggagcgtccgggccgtccgggccgaaccgtgaaaaaaatcatgatcgaccagaagctgcccaggcacctgcgggataccgtccctgtgctggacagcggcggcagggtggctgcggtggcggagctggggccggacgcggcctttctgccccgcctgggggagccctgctggcatattacggcgaaaagaaaaggagaatatttcatgttggaaaaggatatccaggaaatactgttttcagaggaacagctggcccagcgggtgaaggagatcgccggtgagatcaaccgggactacgtcggacaggagatcatgctggtcagcgtgctccgaggttcctttgtgttcatggcggacctgtgccggcgcatcgatctgccctgtacggtggacttcatggcggtgtcctcctatggcggcgggacctcctccagcggccaggtgcagatcaccaaggacctgtccagcgacatcacggggaagaacatcatcgtggtggaggatatcctagacagcggaaacaccctgagctatctgctgaaggtgctggagcagcgcagcccggcctccatccggctgtgtaccctgctggacaagccggagcgccgggtcaagccagtggaggtccactactccggcttcaccattccagacgcctttgtggtgggctatgggctggattacgcagagcattaccggaacctgccctacatcggcatcctgaagccggaggtctacggcggctgagccggagagacttggagggcggcggcctcctgaaatttgtgatccgccggaaaggacgtggttttcctgaaacggttcagcgcgcgggacctgatcttctatctgctggccatcctggtgatggtgttcaccttcaatgcggtgcagcagatgaacgagccggatgaccccacttataatgagatccgcctgctctttgagcaggagaaggtgaagtacttctccgtggaggacaatgtgctcactctgactctgcggggggagggagaggacacctccaccctgaagtaccacctggccgacttcaatgtgttctataacgacctgcacgagcttatcgacagccagcgccaggctgggatcatccaggactatgactaccccgccggctgggcggagccttggtggttcgtctatgtgccctacctggtgatcctgctgggcttcggcatcctgatgtacaccatgtatctgcggcagaacaccgggggcggcggaggaggggggccgtcccgcttcggccatgcccgcacccgcaccctggcagaccaggggaagaaggtcaccttcaacgatgtggccggtgcggatgaggagaaggaggagctggaagagatcgtggagttcctccgggacccccagaagttcaccgccctgggcgcccgcatccccaagggcgtgctgctggtggggcctccgggcacgggcaagaccctcatcgccaaggcggtggccggcgaggcgggggtccacttcctgtccatctcgggctctgacttcgtggagctgtatgtgggtgtgggtgccagccgggtgcgggacctgttcgaccaggccaagaaggacgcccccgccatcgtgttcatcgacgagatcgacgcggtgggccggcagcggggcgccggcctgggcggcggccacgacgagcgggaacagaccctgaaccagctgctggtggagatggacggctttggctccaatgagggggtcatcgtcatggcggccaccaaccggccggacatcctggaccccgccctgctgcggcctggccggttcgaccgccagatctatgtgggactgcccgacatcaagggccgggaggagatcctgaaggtccacgcccggaagaagcccctggcggaggacgtatccctctccgatgtggcgaaggccacctccggcttcaccggtgcggatctggagaacctgctcaatgaggcggctttgctctctgcccgggaggaccggcgtttcattacccgccaggacctccacgaggccatgatgaaagtaattgccggcccggagaagcgcagccgggtggtgacgccccatgccaggcggcttaccgcctaccacgaggcgggccacgccgtggtgatccacgagctggacagccaggaccccgtgcaccagattaccatcgtgccccggggacaggcgggaggcatgaccatctctctgcccagggaggaccgggcctatctgtccaagcgggagctggaggagcgcattgctgtctgcctgggcggccgggtggcggagcagctggtgctcaacgacatctccaccggtgcctccagcgacatccagaaggcgtctcagactgcccgggctatggtcaccaagtacggcatgagcgagcggctggggaccatcgcctacggcaacgagaacgatgaagtgttcatcggccgcaccatggcccaggcccggacctactccgaggaggtggcaggccagatcgacgaggaggtcaaggcgatcgtggaccgggcctatgcccggtgtgaagagatcctgacccggcggcggcaggagctggagctcaccgcacgctatctgctggtccatgagaccatgagcggcgagatctttcaaaaagtgttcactgacccggcggcccctgagctggcgcttccggaggaggaccagccggcccaggagggctgagcgcggcggcagccgggaggtggaaggacctcccggctgtttcatatggatagggagagggggacggaggatgagaaaaagaagagctggagggacggcggcgctggtcctgctgccgctgctggccggatgcggcgcctcagggccggaagcggcgggctccgggctggaggaggtgtcctcccgataggggccagacgcacagggggcgtgcctgctgggcacgccccctgtgcgttatgtcatgttacagctgacgcagctcctgaatggtctcctggatggtcctctggggcagccagacggcagccatctccgccagctgagccagggtcagggaccgggaggcccccaccagcgggtggttcatgaatttcccaaaccggcgctggaacacagaccgggaggcccggttatccagcagctcccccaccgtaatggtgttgtttctcagatccaaggtcatttcacctccgctccattctatgcaggggaggggaaaagaatgtggagtcaggacggtgagactgttgaaaaagtagctctgccgctttttcgagcaggagcttagaaaagtttacccacaattctttgcagaattgtgggtaaagatttcatgaaaagcatcatttctaaggcacatgccctgagaaatgacgcaatcaaaccttactcggctgcctgcgggcgctggaactccgagcaggagtttttttccacaagctgagtgggagcttccttatacaagaagctcccactggtgaggtttaaaattgtggtgtgctcaactctccgcataccgggagaggaactgccgggtgcgctcctgagaggggtgctcgatgacctgatgggctgggccctgctccacaatgacgccgccatccatgaagatgacctgatcggccacatcccgggcgaaggccatctcgtgggtgacgatgatcatggtggtcttctgctccgccagggagcggatgaccttgagcacctcaccggtgagctccgggtccagggcggaggtgggctcatcaaagcaaaggatgtccgggtggagggccagggcccgggcgatggccacccgctgctgctggccgccggagagctgactggggtagtggtccgcgcggtcactcagacccatcttggccagcagctcccggccctcggcctggatctcctccaggatctgcttccggttggctttgaagtcgggccgttcctggctgaggagctccttggccagggtgacgttccgcagggcggtgtactgggggaacaggttgaaggactggaacaccaggccgaaatggagccgctttttccgcacctcgctctcccgctgggtggcgggatcgtcggcgtcgaacagagtgtccccctggacgacgatctgcccctggtcgggggtctccagaaagttcaggcaccgcagcagggtggtcttgccgctgccggaggagccgatgatggccagagcctggccctgctccaggtcaaagctgatgtcctccagcacccgggtcgcgccaaagtgcttttcaatatgatgtacttctaagatcggcatgttcgctcccccttatacccggaagtagtccagcttcttttccagccggcccagcaccatggtcacgatggcgctgaaggccaggtagtagaccgccgtgaacatcagcggccaccacaggccggagatcccctgattgcccttcataaaggactcagccgcccagatgacctcctgcagcgcaatggcacgggccagggaggtgtccttgaccagggtgatgatctcgttggacatggggggcacgatgcgcttgaccatctggagcagggtgaccttgaaaaagatctgccgcttggtcatgcccagcaccaggccggcctcgttctgccccgccggcaccccctggatgccgccccggtagatctcggaaaaatagaaggcgtagttgatgatgaaggccacgcataccgccgccatccgtcccacctcgccccggggccatgggctgccatcctccagtatcagaccgggcacataaaacagggcgatgatctgcaggatcaggggcgtgccccggacaatccagaccagcagacgggtgaccaggctgatggggcggaaggaaatgagcgcccgggccacccggccgggctcctgcccccggcggagcaggacccaccgggtgggccgggacaggggcgtccagcggttcatggagccgaaggcgatgaccagccccagagggagcgccccgatcagggtcacgaaaaacagctccagggtcacaagaaacccttggttcaaggctatcagtaccgtctgggtcactggtgattgaaaaaagtcgagcataggggtcgtcctctctgtctgtgatagtggggcgcaaccgctcaaaagcagagagcggacccgctctctgctttcaagggattcagctgcggagatcgtttactccaggatgacggcatcctgcaggccataggtggcagcaatctgctccacggtgccgtcagccacggcctgcttccagaactcgttgaaagcatccaccaggtcagagcccttgcggaagcccacgccgtagaactcagatgcctctgctctcatgtcgttaaggttaaggtcgtacaccagatcgccgtagctggtgccctcgccggtcatctcggcggccatgagcacgtcgataacagcggcatcggaggtgccggaggcgacctccatcagggtgttggcctgggactgcacgggcacggtggtggcccccagctcctcggcggcgtcctcaccggcggagccggactctacggcgatgctcagcccttccagagaggtcagcccctcaaagtccgccgccctgtcgacggggtagaccaaggtctgatagttggtgcagtagggctcggagacgcccatggcggcggtgacctcgtcgttgatggtcatgccgttccatacacagtcaatggtcttggagtccagctcctggaccttgtagtcccaggtgatctcctggaactccacgttcacgcccaggctctcggcaaaggccttggccatgtcggcatcaaagccgatccactcgtcactccccgcttccttatagtccatcggggcgaaattggtgatgcccacatacaaggtgccctggtcctggacataggccaggtcgctttccgcgtccgcgggagtgctggatgccccctggctggagctggcggcgggggtgctggcagcgggagactggctgctctccccctgagaagtggtcccgccagagcaggcggccagagacaggcacatagtgatcgccattacaagagacaacatctttttcataccgagagatcctccaaaatgcagattggtcaaaaacggagcatttgacactttcacattttagcacgctaatgtaatgttgtaaagaggtttttaattttttttgatctttcggggaaaaagcaagcgtccccccgcagcccataggggacagcggggggacgccttccgcatccaatcagagaggcggcaattacttcatgccgttctcgtaggcttcgatcatcttcttgaccatctggccgcccacggaaccggcctgcttgctggtcaggtcgccgttgtagccctgcttcaggttgacacccacctcgttggccgcttccatcttgaacttattcagagcctcgcgggcattggggaccagagactgcttgttggtagacataattcgtttctcctttacctgttcattttgatcttctttgtttcgttggatggaacatccgagcatagcattgccctggagaagcggactatgcaggaaaaggctttcctgtttttgttgattttccatcattttcagatcagggaaacggcaggaaggaaaccggcgcagagaacgggggccgggcggacggcggggctcatccgcggcggcggagacggcgcagcaggccgcccaagggaccggagggcagggcacgggcggcaaattccacctcccggcagctccgaacggcctcgtccatgaagaagtcctgagaggagaggccgggggcgcccggggcgggcacttttttttgatagctcccttcactgtccagggcccgggccttcacggtgtcccgcagcaggatgtccagaatgtgattcaagcgggccttggtgtgggtggcatagacgggacagatgacctccacccggcgctgggtgttgcgggtcatcatgtccgccgaacccaggaagaggcgctggttctctccagagccaaagctatagatgcgggagtgctccaaaaagcgccccaccacgctggtgacggagatgtgctccgtgtggccggggacgccgggccgcaggcagcagatgccgcggatgatgagatcgacccgaacccctgcacgagaggcctcggccagcttttccatgacatcgtagtcggtgagggagttcatcttcatgatgatgcggccgtggctgccccgggcggtctcttccccgatgagcaggaggatgatctgcttcaggttggagggggagaccaggaggttgtggtagctgccctccagattgcccacagccatgtttttgaaaaattccgctgcatcccggccgatgccctgatccgcggtgatgagggagaggtctgtgtactgctctgaggtcttctcgttgtagttgccggtgccgatctgggtgacgtactggatgccggatttgcctttcagggtgatgagacacaccttagagtggatcttatagtcgctgaacccgtagatcacccggcagcccgcgtcctccaggcgctcggaccagtcgatgttgttctgctcatcaaagcgggcccgcagctcaatgacggcagtgacctccttaccgttctccgccgccgcacacagatactccacgagccgggccttctgggccaggcggtagatggtgatctggatggagaggaccgacgggtcggaggcggcctcccggatcaggcggaggaagggctccatgctttcaaaagggtagctgagaagcaggtcccggcgctggaccaggtggagataggtctcccgcttgggcttggggggcgtctggggggagaagggcgggtagagcagcgcactgtggaggggttccggcagctttttcagcatggggtggacaaaccccatgcgcatgggagcccgggagaggaagatctgggcgggggcgacgtggcagcgcttgcagagaaaggcggacagggcctcgctgaggggagcggcgcactccagccggaccacggccatccgtttgcgcttgtgaagcagcttctgcatctggcagcggaagtcatcgtccacatcaaagccctcgtcctggggggcgatatcggcgttgcgggtgacgcagacacagtttttctccgccacgccgtaggggtcaaagacccgcttcaggttatccagaagcagctgttcggtgcgcacatagcgcaggccctccccggggagatagacaacgtcgggggcggagggaggcacagggacgatgccgaagagactgcggtccttcccatggaggcgggccaccacatagacgctcttgttctggaggtgagggaaggggtggttgatgtccacgatctgaggggagaggatggggagcagctgggtcttgaagcaggtcttgagaaagtccttgtccttcccggcgagctggccgggggagacttcgcagaccccataggcctggagctgggtctggagctgggcgtagacctggtcccgctgctccatcagaaggactgcccggcggtagatggcctccagctgctgggaggggagcaggccagtgcggctgtccacctggtcgtcccccatgacagccatgtcatagaggctgcccacccggatcataaagaattcgtccaggttgctggtgaagatggagacaaatttcagccgctcggccaggggattggagggatcgcgggcctcttccagcacccgctcattgaacgtgagccaggagagctcgcggttctgcatgtaaggttggggttcccgggccatcagacagtcacgctccttcgtttcaatacctcggtgagcaggaagccctcccggacgccgtagctgctgacctcaatggcgtcgccccggcaccgatgggccagggtggagaggatgaccagcccagggagcagggtgtggacccgctcggggacgatcttcagcaggatctggaggtccgccttagcgggagcggagaagcgctccaggaggccgtccaccatgttcagggtgatggtgcggttgccggcgggcagcttgtagaggtagttgcacagcttcccggccccgcggatggtgccgcccaccccacagatcaccggacagggaaagtcgggcaggggggcgccgtccagcgcctttttcacctgcttgcggatcttggcctgttctttgggggaggggagcagggtctccacacagcggttatacaggttcagggagcccagggggatggaggcggcgtggcgtatcctgccctgagagaagcagacccactcggtggagccgccgccgatgtccagcaccatgccctgctccctctcctccatgccggaggtggctcccacatagtccaggatggcctcctcccggccggagaggaggcggatcatcagtccggtgcgctcctggagctggaagaccgcctcctcgctgttggtaatgttgcgcagagaggcggtggcgaagaccgcccggttctcaatgtggagggcatccaggatggaccggaagcggagcagggcatctgcggcccggtcgaggccctcccggctcatggagccgtcctcccgaacatagccggccaggccggccgtctccttgctttgaaaaatgctgtggatagctccgtcctcctccacctgatagacattcaggcggatggtattggagccgatgtcgataatagcgtacatgcaagctctcctctgtggctgcggtccgctcggaagcgggaccggatcatctgagtcgtatgatatcaaatgcagggggctgggtccagaaataggatgcagaattttggttaaatgtatgtaaaatcactggctgaacagacaagacgatgatttttgacggcagagtatagagatccccggggaaatgtggtaaacttccttcatctggagatcttacagagaggaaggaactgagcatgctgtcttttgtcaacgactactctgagggggcccacgagcaggtgctccggcggctggcggagaccaatcgggagcagcatcccggatatgggaccgatccatactgcgcccgggcaaaggagaagatccggcgggcctgcggctgcccggagggggacgtctttttcctggtgggcgggacccagaccaatcaggcggtgatctccgccctgctggccccctgggagggggtgatcgcccccgccacgggacacatctgtacccatgaggcgggagccatcgaggcaaccgggcacaaggtgctggagctgccccagcgggaggggaagctgtcagcggcggagctgcggacctatctggagggcttttacggggacgagaaccacgaacacatggtatttccgggcatggtgtacctgtcctggcccactgagctgggcaccctctatacccgggcggagctgggggagatccacaaggtgtgccggcaatacaagataccgctgtacctggacggcgcccggatgggctatgggctggccagccgggggagcggcatgaccctggcggacctggcggccagctgcgacgtgttctacatcggggggaccaaggtgggggccctgttcggagaggcggtggtcttcccccggcacaacgcccccgggcgctttatgaccgccgtgaagcagcggggcgccctgctggccaagggctggctgctgggggtgcagttcgacgccctgttcaccgatggactctaccagaagctgggcaaaaatgccatcgagacggcggagcggctgagagagggattccgggaaaaggggttctccttctatttggacacccccaccaaccagatattcctggtggtggaccgggcccagcgggaggacctggcccggaaggccgcattcagcttctgggagcagctggacgaggagcggacggtgatccgcttcgtcaccagctgggccacccggatggaggacgtggaggagttgatccgccggctgtgaagcgggctgtttgaatcatttgggaggaaaaaagagattgttcttgttggaaatagacaaaaagattgacaaataaaagaaaaagatacatattattctgaaagaaggcgggggcgatggtcagataacggagagatgtatgaaaaaatcagtgagaaatttcataaaaatctattgggaagttctgcttgtagtggctgctggaattgcaggtgtgatacttttaaaagtaaaaggtgaagattggcctgctgcgttgaattttcccacagaggcagtagcggctggctattggatcttgatactgggaatgacggcattagaaggaatcctgattttccgttttctggtgaaagggctgaaatatgtaatatatactgttctgccgctatggctctaccttatgtttgcctcgccaggaggactgcttttcccaagcctgatttggacatatagcttggtgatcctgatcgcccggcttgtgatgctgataaggtgcaggctaaaaaaacaggaccggcagttttctcatctgtcatctatgatatgtattgatgtgatcagcaccataaacatccttcgagaatttgtattgtttggatagcggtaaaaagcatcggccccatccatcacggatggggccgatgctttttatcggtaggaatcggccagggccttgaatttgggaagggcccgctggatcatgtcggtctggacgcagtaggcgatgcgcacgtggccgggggcgccgaagccggagccggggaccagcagcagatcgaactgcttggcccgctcgctgaaggccatatcgtcgggctccagggagcgggggaagaggtagaaggcgccgccgggctccacacagtggtagcccatctcccgcagggcggggaccagcagcttggcgttgcgctcatagaccgccaggtcggaggtgaggtcgcagcacagggaggtgacctgctggaacaggctgggggcgttgacgtagcccagagaccgtccggcgccggccacggcggcgtagacctcccggctgtcggtgacggaggcggggaccagcacgtagcccaggcgctcaccagggagggagagggacttgctgaaggagtagcacacgatggtgtctgggtagagctgggggatccagggcacctggaagccggagaacacgatctcccggtagggctcgtcggagatcaggtagatggggtggccgtaggcccggctcttttccgtcaggatggcggccagccgctccagcgtctcccgggagtagaccacgccggaggggttgttgggggagttgaccaccacgcccttggtgtgctcgctgatggcggcctcaaaggcgtcaaagtcgatctggaatccctcgatctccgggggaatgagcaccatcttggccccagcgccctcgataaagaccttatactccgggaagtagggggcaaagacgacgaactcgtccccagggcaggtcaggccgttgaacacacagcacagggaggcggcggcccccacggtaatgtagaactggtcggcggtatagcaggtgccgaagcggcggttgagggagtcggcgaagcgctggcgggcctcctggtcaccctgggcgctggtgtaacagtggatgacctccggctgctcccgaaggatgcggacggcggtgtcgttgacctcctgggggcaggggacgctggggttgcccagggagaaatcgaagacattctccgcccccacctgggcggcacgtatcttgccgtattcaaagagctcgcggatgacggaccgggcggtgcccagccccaacatgcgttgattcaccatgaagatggcctcctgtcctttgtctgatttgagcctattatagcaccggggccaagccccgtaaagcgcatcttttcccgcagaagggaggaaaagcgggccgggcccgctctgccgcacgcggcggcggcgtcaggaggcgccttgaaaagtgaccatatcagatgccgagtcaaaacatatagtaatttaaaattggtatattgcgataagttttaaaaatctggggggagatcaagccgatccagtcagcgtcccgaagaaatggtgcccatgcgccgccgtcgaaaatgcccagaagaacaggcgtaaaaacgccgcactcccacgggagtgcggcgttcaaattctcacatctcctgacggccctccagggcccgcatcaaggtggcgtcgtcggcgtactccaggtggctgcccaccgggatgccgtaggccagacgggtgatcttcaccccaaaggggcgcagcagccgggagaggtacatggcggtggcctccccctccgtgtcgggattggtggccatgatgacctcctggaccccgccggcggccacccgctctaccagggacttgatgtgcaggtcatccggccccacgtggttcatgggggagatcaccccgtggagcacgtggtagagcccctggtactcccgggcccgctccatggccaccacgtccttcgggtcggccaccacacagatgacggaggcgtcccgcttggggctggcgcagatggagcaggggccgtccccctccgtcagattctgacacaccggacagcagtggatggcggacttggcggacagaatggcctgggcaaaggcggcggcgtcctcctctgggagggagaggacgtggaacgccagccgctgggcggatttgacgccgacgccgggcaggcgggcgaactgctccaccaaattttccagtgcgggggggaaatactgcatgggaaagacctccggagtcgtaaatagtacacggtgtgaacagggggagatcagcgctcccgctccaacacgacggcaaacagatagctgacaccggccggaaagccggcgggatagggcgtgagggaggtggtccgccacccggccagggccatgtcgttcatgacctgctccgcctgctccaggctgtcagcggagaggatcttatactctctcaccgcgcaccccctgacacgcggagggcctgaatggcggcggggatgtcctccgccccgtagacagcggagccggccaccagcacgttggcccccgcctccaccaccaggggggcggtcttgggggagatgcccccgtccacctccagttcgcaggcggggttgtaccgctcgatgagggcgcgcacctggcggatggtgtccagctgggactccatgaaggcctggccgccgaagccgggctccaccgtcatcaccagcaccaggtccagctcctccagataggggaggatggcctccgccttggtgatgggccgcagggccaccgctttttttacgccgcactcccccatgaccttcagagcctgggcgatgcgggtggggtggtcggcctccaggtggatagagagcaggtccgccccagccttggcaaaggcttcgatgtaccgcaccggcttttcgatcatcagatggacatccaggaacatgtcggtgcaccggcggatggactggaccaccgggacgccgatggtgagattgggaacgaaagcgccgtccatcacgtccacatggaggtagtcggcatcggagacccgccggatatcccgttccagattgacaaaatcggcggagaggatggaaggtgaaacttttatcatggttttgaccccgctttccgaaaaaatgagaggttttgatcagggctgtaggggctgggccaggggcagagggccggtccgacgcataggatgcagagcggagagcgggagggcggaagcactccccggagccccggacccgaggcctgctccaggctgatcccacggccgcccggcggccccggccgatccggatggcccgccgcttttcagataccccccgccgggccccgcccggcgggggcagtggctgtgcgccggcggggcggggcccccgggctcaccagtggttgtagctgaggatgtcgtccagctccttgcgtaccttgggccggggagcggtctccttggcgggatagcccacggtgacgatcaggcggacgggccgctcctccgggatgccgaaggactggtgcagcttggcctggttcatggtgccgatgaggcaggtgcccagccccatggaagtggcctcatagcacagggccatggcagccatgccgatgtccatctgggcgaagtgctgggcaccgtagtgctccgcgacgccgggcttgacgtgtgcctcatcctcacagatcaggatgaagttgggcacccggtctccccaggggcagccagtgagcccgtcgtcgtccagcgcttcaatgagcttggcccgggcctctggctcgtcgatgatgatgaagcgccagggctgggcgttgcagccgctgggggccagccgggctacgtccaccaggtgggccagggtctcccggggcacggggcggtcgctgtacacacggcagctctcccgggccgcctgcaaagcctcaaaatccatttcaaagatcccctttctgttttgttggatacggtctgacgtgggggcttccccaaaaagagcgcgagtcaacagggccggatcagtgatagaaatcggtggtgtccacctcgtgggcctggtagccggcctggctcagcgcctccaggatgcggtccttgtggtcgtggccgaaggcctccagggtgaccttcagctccacgccgctctggcggttgatgttcacgaactggttgtgctccagcttgatgacgttgccgttctcccgggccaggatatcggcgatgctgagcagggcaccgggacggtcggggaggaggacggagaaggtgaagatgcggccccgcatgatcaggccgtgctggaccagggaggccatggtgatcacgtccatgttgccgccggagaggacgcagaccacgttcagcccctggcaggacaggtggcgcagagcggccacggacagcaggccggagttctccaccaccatcttatgcttttccatcacatccaggaaagcctccaccagctccgtatctgggatggtgatgatctggtccacatggtcccggatgtaggggaacaccttgtctccaggggtcttgacggcggtgccgtcagcgatggtgttggcggtgggcagggagaccacatggcccgcctccaggctggccttcatgcaggccgccccctccggctccacgccgatgacttttacgttggggttgagcagcttggccagggtggacacacccgccgccagcccgccgccgccgatgggcaccaggatgatgtccacgtcgggcaggtcctggaagatctcataggcgatggtgccctggccggtggccacctccaggtcgttgaaggggtggatataggtcagcccctcctcctccgccagcttggcggccagctcggcggactcgtcaaagacctcaccgtggaggatgaccttggccccgtagtccttggtattgttcaccttcaccaggggggtggtggtgggcatgacgatggtggcgggcacgccggcggcctgggcagcgtaggccacgccctgggcgtggttgccggcggaggcggtgaccaggccccgctcccgctgttcctgggtcagggtgctgatcttatagtaagcgccccggatcttgtaggcgccggtgacctgcatattttcgggcttgagatagacccggttgccgcagcctttggacagggccggggagtcgatgagactggtctcccggatcacgccctttaagacgctccgggcgtttttgaactgttccagtgtgggcatggtcaaaacttcctttctgcgcttggacgacgtattacataaagtgaatcatacccaattccgggaggaaagtcaatggagggggcgggagcgggagcggatttttttagaaaagagtggaattttgcgggaagggggagggggacgcttgcgcagctgccgggggatggagtaaaatagagaaaaaacggggggagagcgccatggggggactggggagaaaaggctggaggatcggcccgtggcagcgcaggctgctgatcgggctggcagtggccctgacctcccagctgtatctgacagtgtgggcggagggcttccgggtctccaccgccgccatcctctacccggccctgctggtgaccatgatgcgggagagccaccgcccggacactgggctggtcaccggactgtgcgtggtgatgatgcggctggcactggacctggcggcagggatgccgccgggggaggcgctgcggatggagtatcccggcggcgtgttctacctctgctatgactgcgtgctctgcctgctgatccgggaccggcgcaccgcctctctggggcggatgggagcggcctttctggtcagtgactttatctccaatgtgatcaatctgtacctgtcctccggagtgcgggggctggagacggaggcccgggccctgctccccctgatcggactggcggtggcccgatccttcactgcggccatgatcctgtggggaagccggtactaccaccgcctgctgctgcggcaggagcacgagcggcgctaccagcgcctgttcctgatgacggcggagctgaaaaacgagctgtactttttaaaaaagaactccgacgacattgaacaggtgatgaccaacgcataccgcctctatgagcggctgggggagaaggaaggggagagcggtgagctgagtgccctggccctgtccattgcccgggacgtccacgaggtgaaaaaggacaacctgcgcatcatccggggcatcgagggggaggtggaggaggtctacgaccaggagcagatggaattccaggatctgatgcacattctggagaactccacccggcggatgctgggggagaaccgggccagcatccgcctggagtgcaggcgcaccgccgacttctccacccaggagcactaccgcctgctgtccatcctgaagaacctggtgaccaacgccatcgaggccattcagggagctggcggccgtgggatcgtgctggtggaggagcgggtggagggtgacactctgtttctcaccgtgtcagacgacggccccggtatctcggagcgctccatgcacaatctgttccaggtgggctattccaccaaatttgacccggagaccggcaacatcaaccggggcgtgggcctgcccgcagtcaagtcgctgacagaggagctgggcggctccgtctcggtggagagccagccggggcggggcgcgcgtttttccgtggagctgccgctccaccgtgtgaagggggagaagagagagaaatgagaatctatatcgcggaggacgacccctcggtgatcggggtgctggaggatatcctggagagcagcgcactgggccgggtgtgcggcgccagcgaggagggggccccggacccggagcggatcatggcgctggacccggatctggtgctggtggatctgctgatgcccgggcgggacggcatccagctggtgcgggagctgaaggagctgggcagccgggccaagttcgtgatgatctcccaggtgtcggccaaagagctgattgcaaaagcgtatcaggccggggtggagttctttatccagaagcccatcaacctgatcgaggtgcgccaggtggtgggcaacgtgatccggcagatggagaacgagagggccctccacaccatccagagcgtgtttcagagccgggagtcccagcccgccgctccggcggggcggcaggaggtgtggcgccggcgcatccagtacatcctgagccagctgggcatggcaggggagaagggggccggggacatcatggagctgtgcctcttcctgctggagcgaaagcagacggcctctcagatcggagtgggcaccctgtgcagccagctcagtgacagccccaagaccatggagcagcgggtccggcgggcggtggagcgggggctgggccatatcgccagcctgggggtggaggactatgggaacgagttcttcacccagtatgccgcggtgctcttcccctttcccgaggtgcgggctgagatggcccatctgcggggaaaagggggacgcggcaaggtgaacctgaaaaaattcctggacggcatgctgatcctgacagaggaatactgaagcgcacagctggccgccctgggacaacgtcccggggcggccagcttgtcaaaaaagccctcctgcaaggagttccgttgcccgcaggcgacggaatcaaattaaatcacgtcatttccgggggcgtgtacctcggaaatgacacctcttacgcaagatgggcccactttcctgcaagggatcgggacccagcttgcgtgcttgctttctcgaaaaagcggctctgccgctttttcgacagtctggccgccccggaacgttgtcctggggcggccctctgtctgatttatttggcgtcggggcacatcagcaggtacatgacggccttctgggcgtggaggcggttttccgcctcgtcaaagatctcctgggcgtgggcctcaaagacctccgccgtgatctcctccccacggtgggcgggcaggcagtgctgtaccatacaccccgggttggtgagggtcataaggcggtcgttgacctgatagccggcaaaggcggcggcccggacggcacgctcctcctcctggcccatggaggcccacacgtcagtaaagaccacgtcggccccggcggccgcctcctggggggtgcggaccagggagaatttaaagtccggctggctggcggcaaatgcgagcacctgggggtcagggtcgtagccggcggggcaggccaccgatacctccatgccgcacttcaggccgcccacgatgagggagttggccatgttgttgccatccccgatgtagcacagcttcaatccctccagggtggccttgtgctcccggacggtcatcaggtcggccagcacctggcaggggtgacagaagtcggtcaggccgttgatgacggggatgtgggagtgactggccagggattccacctcctcttgatggaaggtgcggatcatgatgccgtcgcagtagcgggccaggacccgggcggtgtcctcgatgggctcgccccggccgatctggctctccttgccggacaggaacagagcgtgtccgcccagctggtacattccagtctcaaaggagaccctggtccgggtggagttcttctcaaaaatcatggccagagtcttgccacggagatagtcgtggaccagaccgtgcttctggctgtatttcagctggtcagcggtgttgaggatcttgatgatgtcctccttggacagatccagcagcttgagtaagtctttctgcatgataaaaacccccgatgttcagagtgaggatgacagagggagcgggcctgccctccgcgatgaagttaagaaagcgctgctttcaggatggccaggcccttgtccatctcctcctgggtgatgaccaggggggggagcaggcgcaggccggggccggcggtgaggaccagcaggccgctctggatcagcttggcggccagctccttgttggtgcgctcccccttcacgtcgatgccgatcatcaggcccatgccccgggtggcgcccaggcatggcaggtccagggcctcaatgcggctgcggagatatgcccccttctcctggacggactggaacatggcgtcgtccatccggtccagcacgtagcaggctgcggccgcggagatggggttgcccccgaaggtggtgccgtgggtgccggtggtgaagacattgcggcacttctctcccgccatcacgccgccgaagggcaggccgccggcgatgcctttggcgaaggagactgcgtcaggctggatgccgtactgctggaaggcaaagagagagccggtgcggcccacgccggtctgcacctcgtcgatgaggagcagccagtcccgcttggcgcacaggtcggccaccttctgcacaaactcccggtccagggggagcacaccgccctcgccctggatgagctcgaacatgacggcgcacacatcatgtccggccatggcttccacgctgtcgaagtcgttggcgtcggcgtggcggaagccctcggtaaaggggaagaaatagttgtggaacacgtcctgcccagtggcggagagggtggtgatggtgcggccgtggaaggacttgtggagggtgatgatggtcccccgtcccttgccgtacttgtcaaaggagtacttgcgggccagcttgatcaggccctcgttgctctccgcgccggagttggcgaagaacacgttggacatgcccgctttccggcacagcttctccgcggccttcacatagggctcagcgtagaacagattggagatgtgtcccagcttgcctgcctgctcggtgatggcgttcacccagccctcgtcggcgtagcccagggagcacacgccgatgccggaggtgaagtcgatgtattcccggccctgggtgtcccagagggtggcgcccctaccgtggtccacggccacgtcgaagcggccgtaggactgcatcacgtactgatggtccagtgctttgatctcttcaaaggtcataacgattctccttccggcgctcctagttcagttgaccagcatggtgccgatgccctcgttggagagcagctcgatgaggatggaatgggggacgcggccgtccaggatgatggcggacttgacgccagagcggaccgcctccacgcagcagtccaccttggggatcatgccgccggagatgaccccctcccggacaagggcggggacttgggagagctggagctccgggatcagggtgcgctcatccttcgggtcccgcagcagcccccgcacatcggtgagcaggatcagcttctccgcccccagtgccaccgccagcttggcggccgccgtgtcggcgttgatgttgtaggaggtctccgcatccgtccccagggccacggtggacactacggggatgtagttgttgtccagcgcgtcgttgaccggggtggggtccaccttggtgatctcccccaccaggccgaatctctcgtccagaagacgggcctggaacagcgcgccgtccaggccgcacaggcccagggcccggccgcccaggcggttcagggtggccaccagattcttgttcacccggccgcacagcacctgctgtaccacatccatggtctcctcatcggtgtagcgcaggccgtccacaaatcgggactccttgcccgtctttttcagcatctcgctgatctcaggtccgccgccgtggacaaccaccacccgcagccccaccaggtggagcaggatgatgtcggagatcacggcctgccgcagctcgtcggagatcatggcgttgccgccgtacttgaccacaatggtcttgccataatatttctggatatagggcagcgcctcggccagcacctgggcgcggtccacttcattgaaggacatgcgtattccccctcaaacagtaaaatatggggagggaggagccggagcacatggcggcgctccccgtgcctcccttccctctgggccagggatcaggtgcgatagtctccattgatcttcacgtagtcataggtgaggtcacagccccagcactcggcagcctcgtccccctcgtgcaggtccacaaggatgaccacttccttctcgctgagaatgcgcttggcggcgtcctcgtcaaagggcaggccgtccccctgccggcagaccgggacggaacccgcctgggactggaaggtgacgtccacatgctcggggcggaagggggccttggagtagcccatggcgcacagcacccgcccccagttggcatcggaaccgaacatggcggccttcaccagggaggagctgaccaccgccttggccaggcgctcggcgctctcctcactgcgggcgccggtcatcctgcaggtgaccagcttgctggccccctcgccgtccccggcaatggagcgggccagctggcggcagagctcctccagggcggccaggaaggcggagtagtcctcgtccttccactcgatgagggggttgccggccataccgttggccagggccagacacatgtcgttggtggaggtgtccccgtccaccgtcacccggttgaaggtgcgggccactacctcccgcagagcgtcctccagcatctcgtgggtgatggcacagtcggtggtgatgaagcagagcatggtgcccatgttggggtggatcataccggagcccttggcgatggcacccagggtgacctcttttccacccagggtgagggagaaggccagctccttcttcaccgtgtcggtggtcatgatggcccgggccgcatcctcggagccctccgggcccagcttggccgccagggcgggcatcccggcctggatggcggtgatgttgatggtctggccgatgacgcctgtagaggccacggcaaaatcctcgggggcccggccggtggcctgggcggcggccagacacatggcctgggcgttctcgtggctcatgggacagcaggcgttggcgttgccgctgtttgctaccacgccccaggctaccccgttctccaggtggtccatggtgacgtacaggggggccgccttcacccggttgagggtataggtggcagcggcggtacactccttctcagagaggatcagggcgaggtcgtttttatccgggctgctgctggccttgacgccgcagtggacgccggcggccacgaagccctttgcggcgcagacgccgccagatacctgtttcatagctgtacagacttcctttccagcaaagtgccccagaagggggaagggaaattctcagttccattaaaccgccggtccggggctttcgtcaagtcccggaccagaaatttcagaaaaaagagggagaatggccgcctatttcagctcaggctcagcccttcggtctcctcaaagcccagcatcagattcatgttctgcaccgcggcgccgctggcacccttgcccagattgtcgaagagggccgtcaccgtcagctggccgtcgttgcccgccacggtgagggtcaggtcatcgtccccggccttgcccgcgccatagagcttgccgtcggctccctcaggggccacgcggaccagcttctgcccggcgtagtagtcggagagggccttccacacgtcgtggaggctgctcaccccccgcagctgagacaggtgcaggggtacggtggtggccatacccttgtaatagtcgtccacaatggggctgaacaccggcggacagctgaggccgcagcggacctgcatctccggcaggtgcttgtggctctgggtgatgccatagatggcggggctgctcaaaaggtcctcccgcccctctgcctcatactgggcaatcatcttcttcccgccgccggaatagccggtgagggagaagcagctgagaggcgtgtcggcgggcaggatgcccatgcccaccaggggatagacaatgctgatgaacccggtggcgtggcagccggggttcgagacccgcatgctctcgcagatctgtgcccggtggagcttggacagctccgcaaagccgtaggcccagccgggggcggtgcggtgggcggtggaggcgtcgatcaccttggtgttcccgttctcaataagggagaccgcctccacggcggcagcgtcgggcaggcacagaaagaccaggtcggcggcgttgaggaacttgcgccgctcctcggtgtccttccgcttgtcctcgtcaatgagcagcagctccagatcatcccggccgcccagccgttcatagatctgcaggcctgtggtgccctccttgccgtcaatatagatcttgggtttgttcataaggaccacctgatttttgaaagataagttccgatcgtctgtgtgtcctgccccgcgggagaggggagcacaaaaaggcccccgccaggaacacgaaacgaaatgggggagaaataaaagtcagctccgctgcgcaaggaatccctcgatattggagatctgcttctccacgctctcccgggcgggaccgccgtagacgctccggccgttgacgcaggtctttaactccagggccttgtacacatcctcgtcaaacagtccggagatggcccggaagtccttcagggtcaaggtgtccagggtgtccccggtcttgatgcacaggttgaccagacggcccacgatcatataggcctcccggaagggcaggcccttcttgaccaggtagtcggcgcagtcggtggcattgatgaagccgccggccgccgccttggccatgtttttggggcgcaccgtcagggtgtccaccatggcggcaaagacgggaaggcacagctccaccgtatccacggcgtcgaacagggcctccttgtcctcctgcatgtccttgttgtaggccaggggcaggcccttcatcatggtcagcagggtgaccagatcgccgtacacccggcccgtcttgccccggaccagttcggccacgtcagggttcttcttctggggcatgatggaggagccggtggagtaggcgtcgtccaggtccacgaacttgaactcccaggagcaccagaggatgatctcctcggagaaccgggacagatgcatcatcaggatggacagggcggagagcagttcgatcacatagtcccggtcagagacggaatccatggagttgtcggtgggctttttgaagcccagggcctgggcggtggcgaagcggtccaccggataggtggaggtggccagggcgcccgcgcccagggggcactcgtccagccgctccagacagtcctccagccgggtcacgtcccgcttgaacatgttggcgtaggccatcatgtagtgggcgaaggtggtaggctgggcccgctggaggtgggtgtagccgggcatcacggtgtccagatgggccttggccttcttcaccaggacccgctccagatccagcaccttgccgataaggacgggaatctcctccttcacatacagacgggtgtccaccgccacctggtcatttcggctacgggcggtgtggagacgcttgcccgcatcgccgatgcgctgggtgagcatggcttcgatgttcatgtggatgtcctcgttgtccagggagaactccacaccatccccttcgatctcggagaggatggtcttgagaccgttgatgatcttctccgcctcgtgctcctcgatgatgccctgccggcccagcatggcggcgtgcgctatggagccctggatgtcctgcttatacagccgggcgtcgaacccgatggaggagttgaagtcgtttactaaggtgtcggtctctttctgaaaccggccggcccaaagtttcatattgaatcgctccttaattaggaatgaggaattaggaattagaaattgaggggtccggcgaagccagacggcttgaatttcattcgccgcaggcgaatccgtttattcctcattcctaattcctaattgaaatttatttcagctttccctgctcccgcagcgcctggacggtatcgggcaggccccacagattgatgaagccagtcgcatcgtcctggttgtagtcgctctcctcgaaggtgactaggttctcggagtacaggctctcgggggaggtgacggaggcggtgatgatattgcccttgtacagcttcagcttcacctgtccggtgacatgcttctgggtgtccacggcgaaggcggtgagggcctcccgcaggggggtgaaccacttgccgttgtacaccaggtcggcaaagtccaccgccagcttctgcttcatgtgcttggtgtccttatcaatggtgatcatctccagcacctcgtgggcccggtagagaatggtgccgccgggggtctcgtacacgccgcggtccttcatgcccaccagccggttttccacgatgtccagcagaccgatgccgttctcgccgcccagatggttcagcttgcggatgatatcgctggctttcatcttctcgccgtccacggccacaggccagcccttctcaaaatccagggtcacataggtggcctggtcgggggccatggcgggggagacgcccatctccaggaagccgggcttgtcgtactggggctcgttggccgggtcttccaggtccagaccctcatggctcaggtgccacaggttcttgtccttggagtagttggtctcccggctgatcttcaggggcacattgtgggactcggcatagtcgatctcctcgtcgcggcccttgatgtcccactcacgccagggggcgatgatcttcatctcgggggcgaagcgcttgatggccagctcaaagcgcacctggtcgttgcccttgccggtgcagccgtggcagatcgcgtcggcaccctccgccttggcgatctctaccagccgcttggcaatgatgggacgggcgaaggcggtgcccagcagatagtcctcatacttggctcccatcatcatggaggggatgatgacgtcatctaccatctcatctgtcaggtcctccacgtacagcttggaggcgccggtcttgatggccttctcctccaggccgtccagctcggtcccctgtcccacatcgccggagacagcgatgatctcggggtcaccgtaattctctttcagccaggggatgatgatggatgtatccaggccgccggaataggccagtaccacttttttgatttgagacatagttcatttcctcctgattatgggcgggcgtggggccggatcagggccgccgcagctccgcatcattcaatgttaagggaagtctaccaccgtttaaagcaaaaagcaagtgctgaatcgtatgattatccagaaacgacaaaaaatattccgtttactttcaccaaaaatgaatattatgcaaagaaaaatgaataaataggtataaaaatcgtgcatccgggggatgcacgatagcaagcgtgggtcacagcatggacaggccgaaactgttggccagggcatcgatcttctggccggcccggcacatggggcactccttgggggagctggagatatatccggcgatgtcgtcaggggagaaaagactgtacaccgggatgccgtccacctgttccagcatgctgaagatggcggcaatgccctggaccttgccgccgtaatactggacacactccagggtgcgccgggcgctcttgccggagttgacggtggagatcaggatcagcacctcccgccccacgatcatgggggtcaggttgtcccggaagatcagctgcccgttggagtcatactccggggtgactacgttaatgtttttgttgctgttgacggaaaagacttcctttttggccaggtggcgggcgaggaacgcgccgatgacctcgctcccgtccagacatacgatggtgtccacccccttgtcataggcgtagttctgggccagggtcatggcagcttcccgggccatggtgaactcgtgcttcatgcgggtgatgtcgatgtagtggctgttgtgggagtgccgggtggcaaaatgcccctggaagaccgacacctcaagctgggggttgaatctcgatgtaagctggatcgcgttcatattcttacctcccgtcttgtgaaaagtgtttggtatatccgcttttaatataacactgattggagaatattacaacagaaaaaagaggcatgagggagatccagagcagatcaaaagctgcggccccgccttccggcggggccgcagaaaatttgtcgaaagcttgcccgcagaaaagagcgcgggtcagccggcctgaagggaatcaatgatggagtcaaagaccgtatcctggtcctcacacatcaccatgaccacggtcccgtcctccagcgtctccaagcgggcgttcttggcgacctcatactggtcaggcagatacatctggaaattctgctgctgctggtcgataaagccctgaaggccctctttcaccgtgtcctcgctgtcctgtgcgggcttgatgacggcaatgccgtaggccttgacgttcatcagtgacacactgatggcaaaggactccatatcctcggcggtgacccctaggagctggaaagtcatatccgccgtgtcgtcatccgcggagctgaggatgctgttgtattcgttgtcctcctcgctgcgggcatcggtgatggcagtgacgaagcgctgggtgcgctcctcaggggtcaagctgtctgtctcaccggtgccgccgccggagcaggcggtgagggccagcagagaaagggcaaggatcagagtaaagattcgtttcatttgggttctccttattatgatatttgagatttttgagggaagttcctctgtacactcttttggacgacaggaattaagaaaagttcccagcaaaaaaatattattttgcaaagaagagccttcggacgaccggagcggtccgaaggctctgttataactgattcggtgtggagaggcggatgcttggatcaggggggcccagacgggagagaatgtcaggggtagggtccacatacagcttctgcgctcctccatctagaagggcagtgtggccttccagggaagccgagagatcgagcttcaccagggcggggatggagagggctcgggagagggcagcggcgtggctctgtacactgccgcgcatagcaataaagcccaaaatacaggagcggtcgagggtgatgatctggctgggagcaaattctgtgctcaccaggatagaaggagagaaagagacggggggcaaagtgccgcggccggtgaggatacggagcattcgatcggagatggcccggacatcagaggcgcgggcctgcatataggggctgtccatctgctcaaagagggataccaggtgatccatagcagtcttagaggcgtgctcagctgtacagccgcaggaaaatatcatggagtagacagtgtcctgatagtcttggtcatccaggagcatggcgtggatggcaaaaatggtggccagcttttcccccaccatctggacagcttggtcatagagctgggccagctccagtactgcctggcggtgagccgtggagaagcgctcccactcctcttctggcgggaggggagaatgagcagatatcgtcggcggtgcgggcgtaaggaaatgaagagggccgaaaacgacatcagatgaaattgactgtccggagaagatctgcatggttgttcacctctacccggcgggaagagctatccgccggccgcatgtggaaaggaaaacggcagaattgttttatattcattataagcgtacagcgggaatttgcctattggacaaactgaataattatatgagaacttcccgcggagggaatcattgggaatttacaaatgctggggtataaatttgaattccagtcatccccaaaacaggatgggaaagaggataaaaaaatttgcggtaagggctttacatttttaataaatctggtataataaaaacctgtctaaaggctgccccctgctgtgaagggcaggatggtcccatcaacggcctgtcataaaaacgtgtttcttttgaagaccggcatataaaacaaagcaaagtgcttcaaattatataagataactaaatatgggcctatagctcagctgggagagcgtacggttcgcatccgtaaggtcgtcggttcgatcccgattaggtccaccatttttaaggaaaatcaccgccaatttggcggtgatttttgcatacaagaggtgtggtactcacagctaaattgggtaaaaaagcttccgaaaacctctggatatgggagaacatcccgaaatgtgttaccgattctagaattggcagcaaaaatctaaaaggaggaattctgaatgagaaacctgaagcgggccctcagtctggctctggccaccgtcatgaccttggggctgatggtcgtcggcaccggcgccacgggctacagcgacgtgacttccgaggacaaccaagaagccatcgaggtgctctgggtagtcgacatcatgacctgcgtcaccaatgacgagttcgaccccgccggctcctgcggatgatacgttgtgggggggtggccccacgtgattacccgagctatttcaccgcactagcggcgtcccactttgccagtcgcggcaaagagccgtttaagggggagatatttcgattcatattccccttaaaaatcctcctcttcagcgaccgagctcatcctcgtaagctccagatcactcgtctagccctaaagagaaagattcgctcctgccgctactcgtcccccccccaacggaaatcacttgcgctggatttccattgggctcctgttttggtcacccttattggatgtaaccccgggggacggaaaggcccccttcggggcacctcccctgcaagaggaagattttcgcagcgtatcagggatgccgagccctacataaaacctgggaacttccctctgtgtgggacatttccatatatttttattgaaaattttaccccatcatgcctaaacgggacgacgaacaggcccgccgctgacgcggcgggcctgcatgggtaaagttgtccttcggatttcactgggtggaccgttatggtagttgatatgcttgccaaatcacccttattcactttaatgaaaccgataaacaaaaatgagaaaatattggagaagggggttaggagtagttcataaaaatcggacttaaaatttgtttaaactagaaaatttgcaaatagcactttacaatatcgtcgaaaagtatataattaaatctacattagggggagatattgtttgatagcacaagataaagttttggtttctatataaaattttatttttgaaaagaatgaaatcgattaactaaaatgcttttgctcgaaacaacgatctttccctgaaaacgaatcaataaagaaacggaggaaaaacaaatgaaaaagctgacttctctcatcttgacctgcgtcatgaccctctcccttacggcttgcggcggcggtggtacgagcacatctactcccgatgtgccgggagagctttctgggtctggaggcggcaatgatcaggagaccattactctgaagctgagcgactgccacagcccgacagcaaccaaccatctggcgatgcagcgaatcgctgaggaggtcgccacccagacaaacggtcgcatccagattgaagtctaccccagctctcagttgggggacgtcaagccttccatggaagctattcagatgaataccctggatatggcaatcagcaaccaggccgtcctggggactgtgatccccgagctggctgttctgggcgcccccttcatgtttgagaccgacgatcatatcgccaacgctttgaatggggagctgggtgagaagctcaatgagcttgctcaagaaaaaggcatcaccattgcctgctatctgcccaccggtttccggcatgtcttctccacggtccctgtgcgtactattgatgatttcaagagcattaagatccgcaccatggagaatcccctggacatggccacattcaacgctctgggtgccatcgccactcccatgggttataatgaactatttaccgccatgcagcagaacactgtcaacgccggcgagaatgcattgagcaacatcgctaccgacggcttcactgaagtggccaagtatgtgactttgaccgggcacttctacaacgtctgccccgtgctgatctctcagagcgctatcgataagattcccgaggatctccgggacaccttcttccaggcttgccgtgatggcgccgaggctggccgccagatgtgtatggaggccaacgaggcagccattgaggagctggaggccgccggtctggagattatcgaaatcgaccgcgagtccctgaaagaggccaccgcttccctgtatggtgagttcgcggacagcctgccccaggagatgctggacatggtcgccgcagcggaaaagtgatattggcccttttgtgacagtggccccgtcccagatgggcggggccaccaaaaagcagaggatatataaagaagttcgttatgctgagatcaagataagaaaggcgaggtaaccttgtgaggctcgtaactgtgattgacaaaatagagcggatattgatttctgccctgtttgctgtgatggtgctggccgtattctcgcaggtggtgaaccgcaacattttcaaattggagatcggctggtttgaggaagttgcgagggcctgtatggtatatatcattttatttgccgccgaaataggcctgcgagaccactcacagctcaatattgattccttggttcggcgcctgccgcctaaggtcgcaggtttgttgcaggatgtttctaccattgttactattattttttccggcgtggtggggcttacttctttccggctccttcagacccaggctgctgcccaatcggccacacccggtttgggtatgcccacttgggtgcctcaggcatccatcacggtggggtgtgtgttgatttttgttactcagtgcatcattctgcttaatacgattttgcaccacaaaaagaaggagggggaagcagcatgaccatagcgattttgtttggtacgtttgtgatcgccctcatcatcggtatcccggtctctgtttccctgggcatctccgctgtggtcagctttatctattgtgatattccgctggtcatgatcagccagaagctgttcaccggtattgactctgcctccctgatggcgatcccgttatttattttggcgggcaacatcatgacagatggtggtatctcagggaaaattgtggagtttgtcaattgcctgactgggcggatccgcggctcactaggctatacggcggtgctggcctgcgccatcttcgcagccctgtctggttccggccccgccacggtgatcgcgattggctctatgctttacccggctatgaaacagatgggttatccggagaagacttctgccggactgctggcagtggccggcggccttggcccggtcattccgcccagcatcattatgatcgtatatggcacgctgacaggggtctccatcactgacatgtttgcggttggcctgttctggggtgtcgtgaccacggtggtattttgtatcatcgtggcagttatggccaactggcagaagtggcccaaagcgggggtccagcatcagaggttcaagggattcctacaggtgctgttggattcgttccccgcactgctgattccctttatcatcctgggcggtatttacagcgggatatttactcccacagagtctgcaggaatcgcggtagtggcggccatctttattggtatttttgtttatcgagaaattaaatggactgatttgccgcgtatcttcgtgacctccgcaaaagggagcgcaacggtgatgttcattattgcctgcgcctcctcgttctcctacttcttctcttataccggactgtcaaaggggatcagcgacttcgtagtcaattccaatatgagcaaaacagtattcttattgttctgctttatcctgttcctgatttttgggatgtttatggacggcacctctattgcggtgctgttggtccccctgctttggcctattgtacaggcgatggggatcgacgggattcatttcggcatcatgttctgtatcatgaactccctcggatgctgtacaccgccagtggcggtcaacatatttggaatcgctaatatctccaaactgaatgtggaggatgtttccaaaggcgagatgcctttctttattgccaaccttgccattgtgatttttatcatcttggtaccgcaaatcacggcctttgtagttccctgatataccaaatcgaataaaagctatgtgtgcggcgttgccgcagaaagggactaaactatgaaacgagaagatatgtacaagtggaatgtggctacaaccaaagagtacggtgtccaggaggcaatctctccccaaaagcaggagtgtgagtacacccatatcaaccggatcaatctgaaggctggagatagccacatcgtgtccagtgaaggatatgagatgtgcatcgcactggtttccggtgctgggcacgccaaagtggacggctgctttgatgaggaaatgaagaagctagattgcgtgtatctcagtgcagatactggctgtgtgctgacagccagggaggactgcagcttttatgtcgcctttgccaagtacgaagggatcgggcagactcacttcatccgctttgatcccgatacacctctgggcgacttccacgaaatccatggtgagggaatattcaaacgggaagttttcctgatgatcaatgacaagactcctgcctcccgcctgatgtgcggctatactttcggcggagatgcttgctggaccagttggccgcctcatgaacatgccaaaacactggaggagacctactgctatttcgatatgcccgctcctaagcttggcttccaattcacttacctggagaagaatgggttttatgatgccgttgcccatccagtgcgtgagggtaacatggtggtcttccctatgggatatcatcccacggtcgcatcgcccggtacttgcaacaaatatatgtgggtcttggtagctaagcgcccacaagaccgggtgttcggggtctataatcaggatcagagctatgtgaagtgagcgagggaccgctatgaggacagaaatgattcggaaattcgacctgaccgggaaaaaagccattatcactggagtcgggtccctggagggaatcggccgctacctggctgaagggctgtgtgagtccggtgctcaggtcgttctgatcaaccgctcagagcgtatgtacaaggtccgggacttttttcgggaacggggattttccgcggacggtgtagtggccgatttaacagatcgggtccagttggatgacgcattccgtcagagtatggaactgttgggtggaagactggatatcctggtgaactgcgcagggatgcagaaacggatggacagcgtggatttcagtcgggaggactgggacgctgtggtagccttgaatctgaatgcagtctttttcctcagccagctggcagccagggagatggaaaaacagcacaaaggcaaaatcatcaacattgcctctatgctcagctatttgggcggctatcgcgtacctgcctatacggctacaaagacggctgtgatgggactgacccgcgcgctaaccaatgaatggattgcaaaaggcatcaacgtaaatgccattgcgcctgggtacattgctactgatatgaaccgacccttgatggaggattcggtgcgcaatcaggagatattgtcacggattcctgccggaggctggggagacccggaagccttcaaagctgtagtggtgttcctggcctctgaggcttcggactatatcagtggggtaacactcccggtggatggaggatttttatgtcgataaagttggattacaagccggtcgttgtgctgaccgactatatgtatgattccattcagccttttcaggatgtctatgatcgggcgggatttgaattccggccttaccaatgtaagacggcagaggagatcatccaggtagccaaggatgcagatgcggtccaggtacactttgccaaaatcaccaaggaaatcatcgacgccctgcctaagtgccgcctgatcgtccgcagtgcagtcggtatggacaacatcgatgtggctgcggcgactgccgctgggatccccgtggcgaatgtacccgactatgggatcgaagatgtatccacccatgccatcttgctgatgctggccatcaccaagaagttcaatatccttaccaggacagtgcaggaggggatgtgggactacgcagtgacaaagccggtccatcgtattcaaaatcgagtatttggcctgatggggtgcggggcgatcgcccgatgtgcagctaagaaggcccaagcatttggcatgcgggtcatcgcctatgatccttatttgaagcaggatcaggtgaacgatttggatatcatcttgaagtctgccaaggaagtggcacaggaaagcgatgtggtgtcggtccatctgccgctgaccagcgagacgaaagagataatcgaccgggagttctttggctggatgaagcccggcgcgttcctgatcaacacggcccggggcggtgtgatccaggagagagatctgctacaggcgctgcagaccgggcagattgcaggcgcaggattggacgtgctgtcccaggagtacattgaaaaagatgatcctctgctccaaatgaacaatgtgatcattactccccacgccgcatggtattcagaagaagcagaatttacacttttgaccagcgcggcggaggaagtggtccgcgggctgaacggtgagcctctgaaacacccattcaataaaatcccatatgcaaaacagctttaaatttgaaatcaaaataccggagggatcaactatgaaaaagtacgataaggagtttatcaagaaaaatatgtattccggcgtcctgtgtgatgtgatggatgaaatggggtaccgcaatcagtgtattgggaaagaactgatgccattgaaagatgacaccgtgatttttgggcccgcgttcaccagtatcgctaccaccgtgtattccatgccagagagcccgctgacggcccagtgcaaagtggtggatcagctggaggaagatgaaatctatgttctggtgacacggggggattataactgcgcggtgttcggagagttgtttgccacccgggtcaataacaaaaagtgcgccggtgttttgctggacgggtatgcccgggacctgaaggcgctgaaggagatggactttcctctgttttatgccggccatgacccccggacctctaaagggcgtgccgaaatcaatgagtgccagatccccgtcatcatgtacggcgtgaccatcaatcccggtgatatcatctttggagatatcgatggcgtggccgtgattccaaaagatattgccgacgaggtgattgaaaaagcttttgagacgatcaagagcgaggaccaggtgcgggaaagtctgcgtcagggagcaactatggaagccgtttacgccaaacatgggacgatttgatagttttcccccttcgggggttgaaattcccctaaaaagccattaaaatgaaaaaatagacaaggttttaccacaatctttcgtgtcaggcggaaaaggggagggcatgatatgagcagcaagaagcgcgtgacgattaatgatgtggcgatggcggccggcgtgtccaaaactacagtttcacgctatatcaacgggcatccagagttgatgagtgaaaagacccgggaacggatcaggacggtcattgaaatgaccaattaccaccccagtgacattgccagcaatttgaaaaagcggaccaccaatttaattggtcttctgatagctgatatctcctctcctttttcctctgcactgatcaatggagccagcaaattcttggacaagcggggttatacactgctgattgccgattcggcggacgacttggagaaagaaaagcatgcactgtcttccctgttgtctaaaggtgtgtccggtgttctggtaaatacgacttcttattccaacaactttttgattcaagtccgatgcggtggactccctgtcgttctgtgtgatcggcaggtgcgggattataacttcgacatcgtaacaactgaccagcatgaagccatgtttcatctgctcaaccatttgaagcagcaggggtatacccgcccgctgtttttggtagagccctgggagaataattcggtgcgcatgaaacgccgggaagcgtttttggagatcatacatacgttatatggctatgatgcatcggaagatgtgtatatgctgaaacctggaggggagagtgctgtccaggtcctgcaacgggcacttggccgtaacaatttggggattccggccgtgattggatgcaacagtattacaacggtccgggcattccatgcgatccaggaattgggactttctattcctgaagaaatcgggttatgcgggccggaagattgggattggtccaatgaaatgaattggccttttatcatagcccccaatattacgacagtcaagatccctgctacacagatcggcagtcgagccgctgctttgttgctggagaagctggagggaccagaatgtcccccaaaagagatattgctcccttgcgtgttctatgaacgggcttccacaatccggatgaggtaaaacgtgtccgtaacggagggaaaccatgagaaaaagcgtattgcttgtgggtgaaccgatggggctgtttatggctgactcggtaggagagctggagaaagtggagagtttctccctgaccacatgcggagcagaactgaatgtcgccataggattgaaacggttgggccataatgttacctacttgacaaagctgggaaatgatttatttggcagacgcatcaccgatgtcatgagaagtaacgggatatccactgatgagatactttattctgatactcatacgacgggatttatgttcaaatccaaagtcaccgccggggatccggcgatttgctatttccgtaggaacagtgcggcttcgactctggcggcagaggatgtggagacgatggacttttccaagtttgatatggttcatctcaccggtattacccccgcactttccaagtctgcccgcgctgcatccgaggtcctgaatgcacaagccaggaaagcgggatgcttcttttcttttgatcctaacctgcggcctcagctgtggacatctcgggaggaaatggcgaattgcatcaactcacttgcataccgatccgaccttttcctgcctgggatcaaagaggcggaactgctgattggtgagacggagccgagaaaaatagcggcccactatctcgagcgtggcacaaaaacggtggtagtcaaactcgggcccaagggtgcctattacatctgtgataacggagattccggatgtgtggacggcttccatgtggaacatgtggtggacacggtgggtgcgggcgacggattcgcagtgggggtgctctctgcatggagagaaggactgcctctcgacctggcagtccaacgagggtgcgcagtgggcgcgatccaggtgatgagccgtggagataatgatggcctgcccagccgggaggaactggacgcgttcatggccggacaaaaggattggaggcggcacagtgcctgactcagtgacacgtacattttttgaaagcggtttggtccctgtcgttgtcctgacacaggcagaaaaaggtgttgctttggcccgggcgatccaggcaggtggtttgaacagtatggaaatcacgttgcgaacaagtgctgccctggaagcgattcggcaaacagtatgtcaggcgccggacattctggtaggtgcagggaccgtgcatagtgtagcgatggcacaacaggcggtagaagctggtgcgcgatttatcgtaagccctggattggaccgagcggtagtggactggtgccaagagagagatatcccagtgtttcctggcgtttcgactccgactgaactggaagttgccctggaactggggttgactacagtcaagtttttccctgctgagcagtccggcggcgctgctatgctccacgcgttggcatctccctatcaaggtatgcggtttatgccaacaggtgggatccggctggaaaatttgtcacaatatctgcgccttcctaacgtgctggcctgcggtggaagctggatgtgcccgggacatatgatagaagagggcaggtttgatgagattacggatttgtgccgcaaggcggtaaaaacagtccaccaatttcagattctacgcctgatcctacccgcggaggacacacctcctattccgacttgtctggaagatgccctggaagccggctcgcagaagaaagtggtgctgggcgtgaaccatgtggcccgtgcactcaccgttttagagcggcttggttatgtccggataccaggcgagccggagaccgtggtttcggatcatggtgggcagctgatactggaattgatcgcgctttgattttcattccttctcttttctggcaggtcccgcagacgaccatctgttgtctgcgggacctgccattttcataatcaaacgctggcgccccatttcaaaaaattttaactatgacagagtgatggggcagaatacaggtgggcggtggggtctgccctacataaaaacggcgaactctccgctctgtggaacgttcctatatacttctaccaaatttcgacccactatacctaaaaaggtatagtagctgatacctccctgtaccatcaaaaggagacacaaattcgggaggaatctcaaacgtcttaaaagttcacattttaaatattgaccacaaggtctatttatgctatgatgcagaaaacagaccttatggtcaattattttggaggcagctctatgaagcgagaagaaaaaaatcagcagaccaggcgcaggatcatggacagcgctctggcagaatttgcagcgaacggctacggcggcagctcggtgaacaccatctgcgccgcccaggggatctccaaggggatcgtctaccactattttgagagcaaggacgaattgtatctggcctgcgtggaggagtgctttcagtgcctgaccgcacacctcagcgccgccctgccggaggaggacgccggagcggtggaggatcagctggggcggtatttcagcgcccgcatggcctttttccaggaacaccccatctatcagtccatcttctgcgaggcggtcatctcgccccccgcgcccctggcggaaggggtccgggccaggcggaaggagtttgacgccctgaccgtgtccaccctggagcggctgctgcgccggctgcccctgcgggccgacattaccgtggaggacgtggtggacctgttccgccagttccaggatttcatcaacgcccagaaccggtcgccctccatccccccggaggagcggtttgtccaccgggacgcccagtgccgcaagctgctgaccgtgctgctgtacggcgtgacagagaggggtaagtgatatggcagccaaacagaactcctccattctgggcgaggctaaaccatccaaggccatcgtcaagctggcccttcccgccaccctggccctgctggccaaggcggtctacaacatcgtggacaccgcctacatcggaatgctggattctgatattgctttgacagcggtgggcgtcaccgtgccgctgctcctcatcatggtgtccatcgagaacatcttcgccgccggagccgccgtcctggcggggcggcagttgggagccaaggacgaggagggggccagccgcaccgtcaccaccatcatcgggctttccgttgtcatcggcgcggtgctgtgtcctgttcatcgagccgctgatgcgggtgttcggcgcctctgacgcctccctccctctggccaaggactacgccttctggatgtttgtggcggccctggccaatctgcctgcccagagcatgaactgcgcggcacgggcagagtcctccgtgaagatctcttccatcgccgtcatcaccggggcccttttgaatgtggtgctggaccctgtattcatgtttgactggggcctgggcatgggggtggagggggcctccctggccaccaccatctctcagttcgtcaccttctttatcctggcctggttctatctcagtgggcgctccgtcatcaagctgcgcctgcgctccttccaccccagttggaaactcatcaagaccgtcaccgtcatcggcatccccacagctgtcatccaaatctgcctgtcggtggcctcctccctcaccaacatcgccgcagcccccctgccggacgcggacaacatcatcgccgcctacggcgtggtccagcggctggtccttatcgggtgctacgtggtcatgggcttcatgcagggctatcagccggtggcctcctacgccttcggcgcccggcaggaggagcggttccaccagtcggtacgctttgccctcaagggctccctggtgctgacggtgctggtggccgccgcctatatcctgctgtcccggccgctgattttgctgtttaaccagaatcccgtcatcgtggactacgagcggtggctgctgatctcccaggtggccctctatccggccttcggcctgtgctatatgatgaccatcacctaacagaccatcggggcctccgggtacggcctgttcctgtctatgatccgccagggactgttctatgtgcccttcatcctggtgctgccccggctgctgggcgtcaccggcatctatctgacccagcccgccgccgacctgctgaccattctggtatgcctttgctccatccgctctatgaagcgcatcgcctcggccaacatgaaccggacgccggagggaggctgatacaaatgagctactccatcatcaccatcagccggcagtacggcagcggcggccgggagatcggaacacagctggccgagcgtctcggcatccccttttacgatagagccctctgtgaggaggccgccaaacgcagcgggctcgacccgacgtttctggagctggcggagcggcgggagggccgcaagctggcctatcagtttcagtttcccggcgcccccttccgcctttctttggacgattaggcctttctggccctggcggccgccatccgggagctggcggagcagggaccctgcattctggtgggccggggcgcaaaccgaatcctgtcagaccggaaggatgcgctgcacgtctacctctacgcggacagacagacccgtctgaagcggatcgttgagcagtacggcgtgcccgcccagcaggcggaaaaggtactgcgggataccgacagggcccgggcggtctatctgaaggagtataccgaccaggtcatggggcactccgaaaactatcacctctgcctggacagcggtgcgctgggaatcgaacataccgtcagaattttagaagcagtctaccgcatcgcgtaaatgaaagtggaatttggaggagccgatgacggcctgaacggcctcaatggggcaggaggccgctgcggccgggcaggagtagcagttcagtccgggcacgcagatccctttcagactcccccgggagatcttcccccgaaaaaagttcagaagaaatgggggcgtggccagggtcgcccacagctggatctgttactagccaatccttacacactccgtgcacagattgatccccttggacaggaccgccgcccctcctccccgccacaggccgaagcccatcatcagcagggcggtggccagcaaaccggcagtcatttttttcatatcagcccatggggaccatggtggccgctccgctgtcagcgctgtcggcaccggaaagttcctagctctgggtcatctccacaaaggcggccgcatcctcgaccagatcctcggcgtccaccttcagactccaggcagagagaaaagagccgttcacataccaggaggcagtgttggcagtctcctcatcctcaatcatgacgctgttttttccaaccgccgccttcagagaatcattgtaaagaatgactgggaagggcgcatcggcaaacagtttatttccttcctcagatttggtacacaaaacgagacccgctccatttgcggtcacgccctcatatgcctggaccagagcgttatagagctcctgcacaccctcgctggcagaggtggaaaaggcaaaaaagaccacgctgcccaggtcggctttggtaaattctccgccattctagcagcggggcttttcacaaaatgctgtccatgaatttcgtactccactggctgtcctcaagacccgaatcggcctgttccgcaaaaagcaggatttttctccgcagacaacagaggattttctcctgtatccattcctggtaaaatttaatttgattgaccatgggcggagcttccgtttccatcggatatcagatgatggtggactgggcacatggagctgcctggcggtctttgcgatgtggtcctatggtccaccttggccaccgatagaaaatactacagcaggctcagcttcatcctgctaaccttcctgtcacatcagttcggtatctccatgatcagccgccgcggaactgaatctcacggcggcggaagtgtgcctatctggagggggtctaccttccacattccttggtggggatgatggtccagaacacagcagcctctgagggggagaaaaagatctgagggagagcctcacggaagttcggattgcgggcgctggcccttcccgtggctgtctcggactgttcccaacatagaaaaaagcagaagtatggaagagcgccgtgtgtctaccttttttccgtctggacgccttatccggataacaaaattcaccgctatagttgttggattttcgtggacctaaaatcatgtaaaaatgatatgaaacaatcgaaaatgcacattagaaaatagagggtggacatagtataataaaaaagaaaaaatatgagaggaaaattatagaaaatgaccaaaatgtgaaggggcaaacaaaaatataaggaggtatctgagatgaaaagaaagatgcagagatttgtgactgtgtccactgcggcggcgctgtctctggccatggcggtgcctggaagcgcggcgtatcagccggagcagaagttccaggacgtgagccggagcgcatcctactacgaggatgtgatggacgccaactactacggcctgatggcgggcgtgagcgggaagaccttcgatacggagagcaccatcacccgggccatgtgggtgacgatgctgtacaagatggcgggacagccagcggtgcagagcaaggacaccttcaccgacgtgaagacgggtgactggtttgcccaggcggccacctgggcggtggagcaggggatcacggcgggctacgaggacggaagcttcggtgtgaaccagaccatcacccgccaggagatggcggtgatggcgtccaagtttgcggcgcagtataaggatgcagcggtcagcgcctctgggaacctggccggttacgccgatgccggggagctggacagctgggccagcgaggccatgtcctgggcactgtccagcggtgtgatgcaggcggtagacggcaagctgtcccccaagagcacggtgagccgggccaacacggcgggtgtggcggtgcggctgtatgagctgggcggcgtggatctggacaccatcacggcgctggagaaggactggacccaggcggcccagctgccgctgaccggctggttcacgaagaacatcgatgtggagggtgaccgccaggtgacggtgtacatctccgaggaggcgtccatccgctcctacttcaccgtgatcgcggtgcccaatggcgtggatacccagcagttcctggaggacgaggggtggatcgacctgatggaccagaagggcgaaggcctgtttgtactggagcccggcgcggagggctggggcagcgcggcggaggagaaggcctacatggacgccgccattgccttcctgaagagcggcaacaacgaagccggcatcaacgtgttctccaccttcggagagttttatctggcaggctacggcgagggtgccgctcccctggaggcctgggccgctgagaatcccatctttgtcatcagccaggctttcgtggacggcgagagtgccggagacgactatctggccagcgtgagcagcaaaacgtatgacgggaagagcgccaatggcgacatcaccgatgtgctggataagaccctgaagcaggtgggcattgccggggagatcgccccgaaggacgtgcctgtgcctacatggctggctgcctataccggcagcgacgcccactggaagacggcaaacgactgtgaggccgcagctgagggagacacctattaccagaagctggattctgacgcctatcagaccgactatgccaacagccgtctggaggccgccggggccgaccacggcatctctcaggtgaaggtgaccggcagtgccgatgtgagcgccgcagagctgtacgcctggatggcccagtacacccggtatgatacgaccttcgcatattccaatgccatcgcccagcgcctggactacacctccgcccgggtggccgcccagaagcaggccaaggccggacaggtgcagaagaccctcagtgacgggacccagatcctggcccaggaggatgtggccattgacggccacggcaccgtccaggtgggcgtgatcgccttcagtgacaacagcggagatgggctgtgggacccccgggagtatatcatctacgtgcctgagggcttcgagggcaaggaactgccagtgctgatgatttatcccggcaacacccagaccgactctatcttcctggactccactctgtggtggcagatcgccgaggacgaggggatcgtgctggcctttgtgtgcgagacctataatgccagtccgtgcagcgtgtcccatgccgactccgacaagttctaccactccctgatcaccatcctggaggagcagatcgacggcagctatgcagatctggacttcacccggatctatggctccggccagtctgcgggatccaacgcgacccagggattcgcggtgaccaaccccgagttctttgccgctgtggcatccacctctgctgccccccagcctaagaatgaagctaatgagatgatcccaaccatgatggtaacaggacagatggatgctggagacatggcaaagggatttgaggccgaggaactgcaacgctgggcgacctatatgttggaggtcaacggctttgacaatacctttgctgcggataaggcttcttctacgaccagtgttgatgcacgtcaccccgagctgcacacctggagtaaagagatggacggcgtagaggtacccctcttccagtgggcgcagtgcctcctgcgtccccacaactgctatccctctgatatgcctatgctgtgggacttcatggagcacttcagctttgagaaggccgcggacggcactgtgacccgctattacagcccctccgcctttgaaaaggacgatgcggtggcgctgaactgagagcagcaattttaaaaagacaacggttcgcttccatccgtcagagaacaaaaaggaaagcgcagggcttctcccccacacggggagaagccctgcgctcgtttgcacagaaagaactcaagggggcaggtccgcctgacggcgcaggatggagagggggggcaccgactggggcagctgcatgcggaagcgcatctggggcttgcggacctgggtaaggggcagtccgtcctcgtcccacagcgccgtgacctccagaggctgggggcggacgccggggcccaccagctccagccggtcgcccagggaaaacttgttgttcagggtgagcagggcgcggccctcctggtcacagctgaccacctttgcggtgatctgccagtcccggatgtagcgggaatcctctgtgaattggcctggctggccgtaaaagaaaccggtggagtagtgccggtggctgatgtgctctacctcatcccgccagacggggtccagaggcacgccgctccaggcggcgtcgatggcgtggcggtaagctccggtgacgatggcggcgtagtaagctgatttggcccgcccctcgatcttgagggagtccaggccggcgtccatcagctcgcccacgtggtcgatcatgcacatatcccgggagttcatgatgtaggtcgccccattctcctcatagacggggaagtattctcccggccgcttctcctccatcagggcgtactgatagcggcagggctgggcgcaggccccccggttggagtcccggcccgtcatgtagttggacagcaggcaccggccggagtagctgacgcacatggcgccgtgggcaaagacctccagctccagctcggggggcgtcttgtcccggatctcccggatctcgtccaggctaagctcccgggccaggatgacccgcttggcccccagttggtgccatgcccgggcggactggtagttgaccacactggcctgggtggagatgtgccgctccacatggggggcgtgggcggcggccagagccagggtgcccacatcggccaggatgatggcgtccacccccaggctgtccagatattccagccactccggcaggcgggccacctcattgtttcggggcatggtgttgcaggtaacatggacccggatgccccggcggtggcagagctccaccgcctccttcagtgcttccggcgtaaagttgccggcaaaggagcgcatgccgaaagtagtaccggccagatagaccgcgtctgccccataggcggcggccatctgaaggcgctccatgtcgccggccggagccagcagttcgatcttctttcgttccatcaggatcagcctcccatcagagcggcataggagccgcgccttttcaacaggtcgagcgggccccggaagtcgttccggggcccgctgtaaatcgtcagccgccgctgtaaagcgcctgggtggacatgaaggaggtcatctctccgtaagtgttgaagaaatggtgcttgtcgtcgtcgcccagggtataataatagtaggaggtgctctccggctccatagcggccttgatggattccaggccggggttggcgatggggccggggggcaggccgggatacagataggtattgtagggggagtcgatggacttgtccgcctcggtgggcaccttgcccccgttgaggtaggccagggtggcgtcgatctgaaggtagccgttggtgccggcggaggcaccggggttgttcaggcggttgtagatgacggaggcgatcttcccccggtcctcaccgtcagtctccttttcgatcatggaggccacagtgagcacctcgtggatggtgcgtccgctgtccgccacctcctggcgcatctcatcggtgaactgggcgtcgaaggtctgaagcatcttgttgatggcgtacaggggattgtggggcgtgtagaactcgtaggtggcggggaacaggtagccctccagccgctcggggtcacccaggggaatgtcctggaggaaggagaaggcgtagtcgtgggtggccgccgtctcgttcaggtcctccaccgtggccacccccttctcctccaggagctggaagatctgggctaccgtgtagccctccgggatggtgacatccaccactgcccgggaggcggaattggcgctgatgccggagatcagggcgcggtagtccatgtcggagttcagggtaaaggtgccggaagaggcgatcttgtccttgccgccggtgatggcggagaagagcttgaagagagatttgtactcgatcaggccgttgtccttgagcatatccaccacgtcgtcatagctgtcctccggggtgatggtgacggtgacggagtgctcctccttgttcagggccagcacgtcgctggcggcgatccagcccacacaggccagcagagcggatacgccgatgacggccacagcgtagagcacagcaaagctggcggagcgggcggcgctgcgccggcgccggggggcgggggaggaggaccggctgcgccggccggcctcccggtagtctgagtttctgcgttcctgaggcatagggtcagctcctaacaaaatttccttccccgtggaaccggggacaggggtgggccatagaatggtacagaggcgagagaccggcgacggtctcggccgactttgagtgaggtgaatgtttcatgtgctttggaaacaacggttgcggcggtaacagctgtctgtggatcatcctgatcctgatcatcatctggggctgcggcggaaacagctggggctgcaacagtaactgcggctgcaacagctgcggctgcgggaacaactgcggcaacagcggctgcggctgcggcgacagctgctgctgaggcggactacatccgctggagacaggcggggccctccggccctgcctttttcctgcggggccggcggacaggcaggggcttagaagcggaggacccgtcggtccgtcaccaggacatggacccccaggtcgtggggctctaccggcagactccgctggaggacgcactcccggcacaggccaacggtggtcccggagaagctctccagccagcggtcgtagtagccgcccccgaagcctaggcggcgtccgccctcatcatagcacagagcggggacaagggcaaggccgatctcctcaggtcggatcaggggggcccgctccgtgggctcctggatgccgaagtcggagacggacatgggcagctccgggcggtagacccggcactccatcccgaagccggggactacccggggcagacagactgtcttccccagcctggtcagcgaggcggccagggagccagtgtccggctccaggccggcgatgccccagaagaggaaaaaagtgctggcctgccggacctcgggcagggaaagaaacgcctggaacatggcccggtccccagccgcccgctcctccggggagagggcggtgagcaggctgcggacggacttacgcagttgtttcttctgttccgcggtagtggatggcatgttggacctcctttgctttttcggcgccggcgaggatctcgatgagcttgagggcaaagtcaaaggtgcagccagcggagcgggcggtgatgatgcgtccgtccactaccacaggacgctccggacggaccacggcggagcccatctctccctccatgccggggtagcagaccgcgctgcggcggtccagcagcccaaggtgggccagcagggtgggggctgcgcagatggcggccagatagcagcccacagtgtgggctttctggatcagggccagggcaaacaggtccatctgcatggactccacgccccccttccctccgggcaggagcagcatgtcctgggaggagaggacgacctgctccagcgtcaggtcggcggcaacagcgatgccatgcccgccagccacggtggcggcgttcagccccaccagggaaacaggcagtccggcccggcggagcaggtcggcggggatcagggcctcggcctcttcaaagccttcggccaggagaatataaaccatggggagctccttcttaattcagattcaacaggggggagaccagggaccagacctcccggtggatctcctccaccgtgcgcagacggccgtcccccgtgacgcaggggatgacctgccagcccaggagccgggcggcctggagggcgctgtcccggcaggcggccagatagtcgggggccacctcgtggatgtccccctgagtgtgggtggctgcctcccggctgcggagcagctccagggagcggtgggtaggcatatccagatagaggaccaggtcggcccggggcaggcccagcttgtcgtgctcaaagtcgtccagccagcccagaaaggcggggcgctcctggggggcgcacttggccccctggtggacggcattggaggtagtgtagcggtcggtgaggatcagccccccctgggaatagtattccccccatacttttttccaagaggcgtaccggtccaccgcatagaaagcggaggcggcgtagggattcacatcccctgggcgggagccgaattccccgcccagatacatgcggatgagggcggatgagggctcttggtactgggggaagaccaggcggcggaagggggtgcccgtctgttccacccgggcgcacagcgcctgaaactgggtggacttgccagagccgtccgtcccctcaaagacgatcagctttcccggcatcagctccggccccccttgccccggaggcgggcccccagagatctggtcagtaccagaggcagcttggccatccggccgatgcgcttgggctcccggctcaggcggtaggcccactccagccccattctgcgccacttctccggtgcccggtccacgttgccggcaaagacgtccagggcgccgcccaggccgatggccagcttggcaccggtgagtgcgccccaccgggccatccacttctcctgcttgggtgcgcccaggcagacgaacagcaggtcgggagcggcctgagacaccgcccggaccacgggggcctcgttatcaaagtagccgtcatgggtgccgcagaggaccagattggggtactgggcacagatgcggctgcctgcctcctccgccacgccgggcttggcacccagcaggaagaggcggccccccatctcgttgagctgggccagcatgtcagcggcaaagtcgatgccgggtacccgctccttcaaaggtgtgcccaaaattttggcggaataaaccacgccgatgccgtctggcaggaccagatcggcctcgttcaggatgcggcggaactctgggtccttctctgaggccaggataaattcagggttgggggtcaccacatagtgaaagctgccagagcggagcaggccggcgcccgcctgggcggcctcctcccgggtgaggtcatcgaaacggatgcccaaaatatctgttttcaaagtgcttcctccagaacttgaacagaatacagcccggccgggcagcgggcccgggggcgggatcatgcagcataaacagccctgcccgcaggccaggaccggaaaaatatcggggatctccgcgattctccgggtattatatcatgggaaaacggaaaagtctatgaaaaagcacgggaaaggcaaagcgtggttgacgccggggcggagaaggggcataatggagagaaaatgggcagaggcccgaggaaaaggaggacaggcatgaaacaggtactgtggatcaacagctgtatgaggggggcgggacagtcccggacgctggagctgtgccgcacatttttggaggaactgagggtccgccgcccggggctgaaggtggcggagcgggacctgaccagggcggagctgcccgtgatgacggcggagctgtcccggcgcagggaggagctggccgcggaggggcgggaggacccgctgctcctccccgcccgggagatggcccgggcggatctggtggtggtgggagccccctattgggatctgggattcccggcggcgctgaaggtctatctggagtgggcctgcacactggggatcacatttggatacacacaggcgggggagcagcgggggctgtgccgggcagagcggctgatttatattaccaccgccggcgggccgctggaggatcggaatttcggatatgagtatgtcagaggggtggccgggatgctggggatcatcaatacccactgcgtcgctgcccagggactggatatccggggcaatgacccggaggccattttgcgggaggcccaggagcgggccgcccggctggccgcagagatttaagaaaacacagccgccagtacgctggcggctgtgttttcttctgtgatgcggcgggagttcatgtctccacaacgagatagccgttgcccagcgcccagcagcgcaggccgcgcgcctccagagtggcggtcccgccccggtccagctctgcccggatggtccgggcctcctccggggtgcggaccgtgtactgcacataggagtttacagaaaagggggtgcacagagcagctgcctccgccaagggattgtcaaaggtgacggaggtcaaaacgcccccctcgtagaacttggagaaccccatgttctcatccgtgactgcggtgatctctccgttccggactgtgacgcggcatccggagccgccgtagaccgtggcgccgtccgcctcctgagacaggatatcaagctggccctgctcaaaggcccatagcggtccgtccccctgagtgagaacctccatccgcttggcgtgcaggcacaggtgataaaaggtcagagagaacaccacgatggtcaccagcaccacggctaacagcagggcggccagtcgcccacgggtgaaccggagggaagaagcctttcgctccattactcatcagcctcctgagaataaaagctatgacatattcgggggggaactctgtcctcagaataccatacaaggggaaaaactgcaaggagccaggggggcttttatcttgtttgccaggggaaaagctgatatactatacaataaatcattcgatcattcctccggctgcgggccggaaacaggaggacagaccctatgaaaaaactgatggtcctggatgggaattccattgtcaatcgggccttttacggcgtgagccagaacctgaccacccgggacggccagcccaccaatgcggtgttcggctttctggccatcctgaacaagctgctggacgagtgcgaacctcaggcactgtgtgtcacctttgaccggaaggcccccaccttccgccatctggcctatgagggctataaggccacccgcaaggggatgcccgacgagctggccagtcagatgcccatcctgaaggaggtcctcgcggccctgaacatccccatgtacgagctggacggatgggaggcggacgacctcatcggcaccatctcggtgaaggatactgccgccgggtgggagaccgtggtggtcacaggggacaaggactccctccagctggtgacagagaccaccaccgtcaagctggtgtccacccgcatgggccgtaccgccacccgggatatgaccccggagacctttcaggaggagtacggcttcgggcccatccacattatcgatctgaaagccctcatgggggatgccagcgacaacatccccggggtgaaaggggtgggggagaagacggccatggccctggtccagcggtatggatccatcgacctgctgtatgcggccatgccggagatcgagatggccgccggcaccccagccaagccgggagtggtcaaaaagctggccgagggggaggagatggcccgcatgtcctatgatctggccaccatccgcaccgacgctcccatcgagttcacaccggaggcaaacctgcgccgggagccggaccgggccgccctgtaccagctcttcctccggctggagtttgccaagctcatcgataaatacggactcaccgcaccccagggagagggggatacagagacggccccggtcaccggaacctgtgagagcgaggtggtggagagccgggagaggatggaggagctgcttgccctgtggcgggggctggaccaggtggatgtgctggctctgcccgggctggacaccgtgtgcgtggagtggcaggagagtgagagcctctcccgggcggcgctgtttttcgccggccggctggactgccacaaccagttcttgagggagctcttcgccccaggcatccgcaaggtggcccatggggtcaaggagctttggaaagccctgctggacgaggggatcgagcccggggacttcatctttgacaccgaagtggcggcctatcttctggcccctactgacggtagctacgagctggagaagctggggatgacctactacaaccaggagttccccaaggccgccgcctatctggaggagggggccttcggccccctggccgacccggcggccccaatgggcgccctgatatcccactgcgcccttatcggggccctccaccaaacgctgagaaagcggctggaggagctggacctgtggacgctgtaccagcagatcgagctgcccctctgcccagtgctggcggagatggagcgggaagggatgctggtggaccggggggcgctgatccgcttcggagagatgctctcccaggggatacagggggcccaggcagccatctttgcgctggcgggggaggagttcaacatcaactccacccagcagctgggccgcatcctctttgaccagctgggcctgccaccggtgaaaaagaccaagactggctactctaccaacgccgacgtgctggagaagctgcggggccagcaccctatcatcgagaccatcctggagtaccggcagctgaccaagctgaaatccacctatgtggacgggctctccaaggtgatcggggcggatgggcggatccacacctgcttccagaacacagtgaccgccaccgggcggctcagctcggcggagcccaacctccagaatatccccgtccgcaccgagctgggggcgcagctgcggaagatgttcgtggcgggaccgggcaaggtgctggtggacgcggactactcccagatcgagctgcgcctgctggctcacatggcggaggacgagcacatgatcggcgccttccgtaccggggaggacatccacacgatcaccgcctcccaggtgttcggagtggagccggaccaagtgaccggagagatgcgccgccgggccaaggcggtaaacttcggcatcgtgtacggcatctcccccttctccctgtcccaggacatcggggtgtcggtggcggaagccaaggagtatatggatcgatatttcctgaagtatgccggggtgcgggcctatatggaccgggtagtggagcgggctaaggaggagggctatgtctccacactgttcggccggcggcgctggctgccggagctgaagtcctccaacttcaatacccgctccttcggggagcgggtggccctgaacatgcctattcagggaacggcggccgacatcatcaagctggccatgctccgggtgcgggaccggctgagtacggaggggatggagggccggctggtcctccaggtccacgacgagctgatcgtggaatgcccggaggaggaacaggggcgggtgtgcgccctggtggaggaggagatggagcgggtgatcgccctgtctgtccctctgctggcggagacttcggcgggcaagagctgggcggatgcccactgaggggaaaacagaaaaaacaggggagcccggacggaccgttcaagtccgtccgggctccttgttttgaaaagctcagtccttctcacgctcaaaggagaggatggcaccgtcagaggcggcaatgtcgtagctgtactccatgccgccggccttgaactccacctggtactccagatggtcgtcctcccactcccgctctgcctccagcccatagacctgggactgggagagcccagcatgggccagagcgatggatacggcctgctcctggccgatgtcggcggaggaggcggagggatgtggctccctctcgctcttgcggatgtccccggtggcgccatctaccgtgtactcatactcggtggtatccacccagaacttgacctcatactccagacggccgtcgtcgtactcccgcttgaccgacagggagaccacatccccctccgtcaacccggcgtgggccagggcggcctccttcgctccctgctcaccgatgtcggcgccggagggagcgccgccggagggggcggagccccggctctcctgctgggatttcaccacagccccggtgagggcgtcgatgtcgtactcatactcgctgccattggcatagaactccagctcatagaccatccttccatcctcatagtcgaagtctatctccagtacagtggcctgggcggcggagacgccggcgtgagagaaggcggcagcctgggcggcttccacgccgatgtaggcgctgtcgctggcctggccggaggtctggatcatgccgctgctgggtagtgtctgaacggaagaggagccgtcgctgccgccgatgacgccaatgtcctcggggtcggcggggcggaaggagaagagggaggtatagagcaggttcaggtcgttgatgggcagacccaccagctcctcaaaggtgtaaaggccggaactgctgtctgcgatggtctggatcagggccgccttgccggcggagatgccgtactcgtccgccttctgctggagggcatcattgtgctggaaggtctgggagaggatggcaccgttcacctgggcactggccaggacggcgtccgcctggctggtcagctcctgctggagccgggcgccccgggcagtgtcctcatcttccaccgtaatgaggatggagttggccagctcgtccacatagccgtttttgaccagggagcccacgatggcgttcatggccacatccaagggggtccccttcagctccatgccatccaggatatccaccgcatcctcgttggtgggggcggcggacagcaccttttcctgccggttcaccgtcagctccacaccggggtttacgtccagggagatgatggaggctacggtgttggactggaggtagtaaccgacgccacctcccgtcacagcgagcacaaggcaggcggcagcggccagagggagccagcggtgcttcttgggtctggcccgggccgccgtgatggggatcgcaccgccctgacggggggcacagcgggagaggaccccctccacatcgttgggggccgcgtgttccagagcggcgcgcaggcgctcttccaactggcgttctgtcatcaggcgtcatctccttccagaagcaggttcagtttcttcagggcccggcggtatttggacaggactgtggcaagggggagctccagcagctgggcgatctcccggtgcttcaggccggtgaccgcatggagcatgaccacctgccgctcctgctcggacaggacggaaagggcggcgcggaggacgtggcggtcctccgtggtgacatcgggggcccgggcgggcagggcggaccactcctcgtcggtcagctcctgggtcttcccccgctcccgcagcctcatcagagccagattccgggccacggtgagcagccaggccataggcttgccctgggggcggtagctggcggcggtgtcccagatgcggacaaaggcgtcctgtgtcacgtcctcggcgtcctgggggtgcttcaagtaggagagcaccagaccgtagactgcggtccgggtccggtgatagagttcctccagactgtgggaatccccggctgccacccccagcagcagcgattccaggtcctcccgggcggagggggccccatatgtggttgtcaaaagtccaagcactgtcatggacacattctcctgtcatccttaaaatgcttgagacgggcgttttattgcatgcggaacaaaaaaatctgaaagcgtccgtacccataggatatctgtattatagcgggaaaacctcctccccgcaaggggcgaaaatcttcggagccccgctccagccgtccaggcaaaatgggaccgcccccttgtctcggggggaaaagcgtgatatgctggacacatctgagacagaaaaggggcgtacatacatgcagaccattggatttatcggcaccggcatcatgggacaggggatgatccgcaatttgatgaaggcgggctacccggtccagatctacaaccgcacccggagcaaggcagaggcgctggagcgggagggagcggtctggaaggacagcgccgcccagtgcgccgccggctgtggggtagtcatcaccatcgtgggctatccccaggacgtggaggaggtctattttggccccgggggactgctggagtccgcacagcccgggacggtgctcatcgacatgaccaccaccagccccaagctggcccagcgcatctatgaccaggcccgggagagggggctggacgccctggacgccccggtgtccgggggaaataccggcgcggccaacgggacgctggccatcatggccggcggcgatgaggccgtgttccaaaaggtgctgcccgtgctggagaccatgggggagaacatcgtgctggagggaggcccgggcgcgggccagcacaccaagatggccaaccagatcgccatcgccggggcgctggcaggggtgtgcgaggcgctgacctacgccaagcgggcaggcctggacccggcgcgggtctatgagaccatccgtaccggagcggcccggagcggccagctggacatcattgcccccaaggtgctcaacggggacttttccgccgccttctatctgcggcattttgtaaaggatatggggatcgccagccaggagtgccgggaccggggcctggagctggaggtgctggagcaggtcctggccgactgccggcagatcgaggcggagggccatgggggtgaggggacccaggccctgatccgccactacccctgggccgactgaggtgggcgtgccggtgacagggcgctttgctcccagccccagcgggcggatgcacctgggcaatttgtggtcctctcttctggcctggctggccgcccgcagcgcggggggaaggatggtgctccggctggaggacctggacccggaccgctgcacccaggcgtggtgtgaccaggtgatgcgggacctggagtggctggggctggactgggacaacgagccggtgtaccagagccggcggaccccggcctatgaggcggccttccggcagctggaggagaagaggctggtctatccctgcttctgcacccgggcggagcggatggcggcttccgccccccaccgctcggatggacaggcggtgtatgacgggcggtgccggcggctgacggcggaacagcgggaggatctggccaggcagcggaaccccgcctggcgcttggcggtgcctgaccgtgccagctccttccgggacctgctccaggggatgtatgaggaaaacctgctccgggactgtggagacttcattctgcgccggtccgacggggtgtacgcctaccagctggcagtggtggtggacgacgcctggatgggggtgacccaggtggtgcggggcagcgatctgctctcctccaccccgcggcagcggtatctgctggagctgctgggctgtcccgcgccggagtacggccatgtgcccctgctgctggcccccgacggccgccgcctggccaagcgggaccgggaccaggagctgggagcccttcagcagcggtttaccgcccgggagctggtgggccggctggcccatctggcggggctgatcccggaggcggcccctgtatccccggaggagctggtacccctgttcgcctgggagaagctgccccggcgggatatcgccatggagccctggtaaaagaggcggcggtctcgtttcgagaccgccgccgtgctctctgcttacagcaggaagaagcggacaaaggcaaatccgatgagaccgatgaggccgatcaggacgtagaggagaaaacgctccgccgtcccagtcccggcaccccagctctgatcgatctccgggtcctcatactcctgcgtgatgtcctccccctcctggtccagcaggagaaaagagtcggggaggcggacatgctcatccgggcctgtccccaggtccagctcgtccttggggacagccaggaggaaggtgtcctcctgcaccggaaaggtgactgggaccacccggtccagcccctgggagtcgtagacctcaaactgggcggtgaagccatagatctcccggcagcccaccccggcgaagagccagaggtcctcgctgctatggaggaagacccctccggtataggggaagggggagtagcttgcggaaacgaactgatattttccgttgaggccccggtccagctccgccacaccgtggacgttgtcctcgctgtcggaggtgaaggacacatagagggtgccgtccacctctgtggcggccagggcctctatggcgcagccctccagatgatcggtccagcccagatagtcctggagcccctgggtgagggaggggaggtccccacgccagtggtactcgctgtcgtacaccagaaagatgaggagcagggccaccactgccgacaggacggcggcgattagccgggtgcgcttcaccttttttagaaaggccagagcccgcttgggggcccgcaccaccggcaggctggcctgcatagcctcccggtgccgacggcactccggacactcctccaggtgggcctccacctgccgggtggtctcctcctctgtcagcccctccaggtaggcgggcagcaggtcccgtaccacgcagcagtccagtttatgttccatccctgtcacctcccatgatccgagccagctcctcttttccccggtagaaccggaccctggcccatacctcgctccggtccaggatgtccccgatgtctcggaaggagaagtcaccggccagccgcagatggatgacctcccgggtgtccgggtccagctgctgcatggcccggtacagggccagccggccctcccgctgctccgtctcctgcgctggatcgtcgggggcggcctgaccggccaggtgctcctcctccaggggaacgttccgcttccgccgctccagctccttgtaccacagccgcttggcgatggcgcacagccatacctgaggcgtgcagtccccgcggaaggagcccagctgtcggagggcctggcagaaggtctcctggcacagctcctccgccaggtcagcgtcccggcacagggagaagagatagcggtacaccagctgggcgtgctgttcatacaggtcttcaccccggtgggccatggcggtcgcctccttccgtgtccttctgtctattggtcccagggacgggacattcgttacaggatctgagcggaaaattttgggacgcgcccaggctcctgatgggggacggccttttagatatcagagagggggccggcgtccgccggccccctccgtctgctatgtgtcgccgtagatctcccgggcctgacggagaaattcggcgtctttgtcatccagggcgtgaaggccggccgtctcctccatgtggtgagtgaactcgtgagccaccgtggcgaagagctcatccttccacccctcctcgtcctcctccgggagcagggcggcaaaggagccgtagtataggacgatgtaccggcccagcatatcatggcagtattcccccatgatgtacatctcaccggggggaaaatcagggtcaggcagggcctcctcctccagttggatgccgccgtccagttcctcaaagaaggcgtcggggaattccccggcgatctcctccagccagtcccccatctgctcgtaagtcggtatcataggccgctcctgtccccggggaggggctgcccagcccggtagatttgggaccatgataccacgggcgccggggaaaaacaagggtcagactcccagggcgagggagatgagcaggtcctggagccatacaggggctgcagcggcggcctggcggatggcggccgtcaccacggcggggtcggcccccgggccgaaggtgagagcgccggaggcggcctggctcccgatggccaggggagcggaggcggagccgccgatggcgatctgggtgcccaccgccccgccgcccactgcgtaggcaccgaaggaaccgcctcccacggacagcaggccgatggccccgccgcccagggcggccagtcccaccgcacaggccccaatggcgatgcctcccacggacatcccgcccagggccagcagcaggcccagggagaccccgcccaggctgaacagtcccagggagatgccgcccagggcgaagagcccaaccgccacgttgcccacggcgaagatccccttggccacgccgaagccccgatcccccaggcggacgtggaccagaggcaggccgaacagggtgcgctggctcttatactcatagtgccagcgagggtaatagttgtggttgataatggtggtggggacttcctgggcatagggctccggctcccggccggtgaccagatagtccagcgtgacattgaaatatcgggccagggcggccaggttgtccatgtccggccggctgctgccggcctcccatttctggaccgcctgccgggtcacccccagcagatcggccagcccctcctgactcagccctgcttttttccgcagctcatagagacggttttgaaattccatagggactcctcctggatcaagtgataagaccggccggcacgccccggcggcaagaagaccttagcaaaaagaggcggacagggcaaccaaaagaggcatacaatttgacaactaacagttgcatccgggattttttcaactttttggtccaaaaacgggaaaagagacaggcgtccgccggggcttatcttaccacagcacaccgggcttgacaagcgcggtgggcggacagagcacggggaaaggattgacaaacacgatgcggaccgctagactggggaagatgaagtcccgggtgctggcggccccgtggcgtgagatcgggaggagagcgcggatggaagtgagctggctgctggtgcagcagatcgccagcatggtgctgatgggtctggccggctatggtgtgggaaaactgaagctgatcacaggggagcagagccgggtgctctcctgcatgtgtatctatctggcggtgccgtgcagcctgatgacctccttcaacacggccatggaggcggacaagctgaccggcctgctgctggccctgggggcggcagtgctgctccacctgctctacctggcgctcaatggcttgatgaaccggagcgggcacggacttgccccggaggagcaggcgtccgtgatctacaacaatgcaggcaacctgatcctgcccatggtaatggccattctggggcaggagtatgtgatctacaccagcgtctatatcctggtgcagaacatcctgatgtggacccatggccagaagctgatggggggtgcccagcagtttgattggaaaaagatcgtgaccacacccgccatcgccgccatcctggcgggactggcgctgttcatcaccgggctgcgcctgccggggcctctggtcaccgccatggaggggctgggcagctgtatggcacccttgagcatgctggtgattgggatcttgttttctgagctggacctgaagcgggtgctctgtcaggggcgcatctactgggtggcggggctgcgtctgctggtctaccccctgctctccatggcggtgctcctggccctgcgggtgctgtggccccacagcgacggggacaacgtgctgctggtcagccttctgtgcgccattgggccggcggcctccgccatcactcagatggcccagctctaccacaaccccaacagtgggtatgtctcttccatcaatgtgctcaccaccctgctgtgcgcggtgaccatgccggtaatggtactgctgtttcagctgggactggacctgctgtgagcagagggccggggcttttccggagacctgagatcagaaaaaagcgcctggacctcctttctcagaggtccaggcgtatctttttggttcagtccagctcctttgccagacggtcccgcagctggagcagggagtcgaagcgcccccagaggaggggctccagctcaggagtggggggcagcaggtcggggaccatggccacccgcatccccgcccgggaggcggagaggatgccgtttcgggagtcctccaccgccacagtgcgctccggggtggtccccagggccctgcaggccataaggtagatctccgggtcaggcttgctgtgcgccacctgatccccggtgatgatggcggaaaaacagggacccaagccggtcatctccatccgccgctctgtccgggggcggccggtggaggtggccagggcggtggggacgccccggctccgcagcagctccagcacctcccccacgccgggcttcatagggacgccctccgtctccatccgggcctgggagcgggcggaacaggccgccataaatgcgtccttgggaaactccgccccaaagagatcttccattttctgaaaaatgtcggcacggttctggcccacgaactccagataggcttctcccacctggggccagcccatttcccggctgacggccagccaggtctgctgggtgagacgctcggtgtcgaacagcaccccgtctacatcaaagacgacgccttctatcttcaagccggtcataccttcccaatgtccgtgcggaagtgcatgtcctggaaggagatgggtttgcaggcggcgtaggccttttcgatggcttcctccaggtctccgcccacggcagtcactcccagcacccggccgccggcggtgaggacggtcccgtcctcacccagcttggtgccggcgtggaacaccgtggacagctttccggctgcctccagaccggagatggggtagccgctctggtacttcaccgggtagccgcctgaggccagcacgatacagcaggaggcgccgggcttccagcggatgtccatctggtccagggtgccgtccacacaggcttggaaaatgtccatcaggtcggtgtccagcatggacatgaggggctgggtctccgggtcgccgaagcgggcgttgtactccaccaccttggggccgtcctgagtgagcatcaggccgaagtagatgacccccttgaagggcctgccctccgccttcatggcggccactgtgggcaggaagatctccttcatgcagcgctcggcgatctccggggtgtacttgggggaggggcagaaggcgcccatgccgccggtgttggggccctgattgccgtcgtaggcccgcttgtggtcctggctggacagcatggggaccaggtgctccccgtcgcagaaggccagcacagtcacctcgggacccaccatgcactcctcgatgaccacggtggagccggaggcaccgaatttgtggtcctgcatcatggaacgcacggcctcctcggcctcctccacagtggcggccaccaccacgcccttgcccagggcaaggccgtccgccttcaccacgatgggggccccctgcgcccggacataggccagggctccatccatatcggtgaaagtttcgtatttggcggtggggatgtggtacttcttcatcagctctttggagaaagccttgctggcctcaatgacagcggcgttggcccgggggccgaaggcggggatccccgccgcctccagggcgtccaccatgcccagggccagggggtcgtccggggccaccatgacgaagtccatcgcgtgctccttggcccaggccaccatggcctccacgtccgtggccttgatgggcacgcactgggccacctgggcgatgcccccgttgccaggggcgcagtacagctcggtcaccttgggactctgagccagcttccagcagatggcgtgctcacggccgcctccgccgacgactaatgccttcataaaaacacgacctttcagcaagttaggaattaggagttagaaattaggaattgttccgtcacggacagactttgtgatggaggagagcagttttctcaattcttcgcagtccgaatggagagagtcatattcagtgcgggaaatgtagtcgcaggaatagagcagttccagccagtagagagtctccgcacattccttcaaggcaatgtacagtttatttaagaagtccttccggctgcttccgtactgagcctctgcgatattagcgccaatgctggtgccgcttgcgcagcatctgcttggagaggacatattccttcttctcctccgataaatatcggtaagcaaagacaatgcgcttggcaaaagcaaggcttttgggcatcaggatacgttcgctgctcataaattcctaactcctcattcctaattgaattagtggtggaacagccgaatcccggtaaacgccatgaccatgccgtacttgttggcggtggcgatgacctgatcgtcccggatggagccgccgggctgggcgatgtactgcacgccggacttccgggcccgctctacgttgtccccaaaggggaagaaggcatcggagcccacagtgaccccggacatctgggcgatccaggcggccttctcctcggcggtgagcacctcgggcttcacctggaaggtgttctgccatacgccctcggccagcacgtcctcgtactcgtcggagatatacaggtcgatggcgttgtcccggtcggggcggcggatgttgtccacgaactggaggcccaggaccttgggatgctggcgcagccaccagatgtccgccttgctgcccgccagtcgggtgcagtggatgcggctctgctggccggcgcccacgccgatggtcatgccgtccttcacatagcacacggagttggactgggtgtacttcagggtgatgagggagaggagcatgtcgtgcttggcctgctggggcaggtctttgttctcggtgacgatgttctggagcatctcctcgctgatatccaggctgttgtatccctgttcgaaggtgataccgaagatattgcggcgctcgatgggggcgggctcataattggggtcgatctcaaccacattatagcctcccttgcgcttggctttcaagatatccagggcctcgtcggtatagcccggggcgatgacgccgtcggatacctcagcagccaggaagcgggcggtatccccgtcgcacacatcggacagggcggcccagtctccgaaggagcacagccggtcggccccccgggcccggatataggcgcaggcgatgggggacagctctccctccggggcaaagtagatgcgccgctctacgtcgctgaggggcaggcccagggcggccccggcgggggagacgtgcttgaaggaggcggcggcgggcaggccggtggcctttttgagggccttcaccagctgccaggagttcagggcgtccatgaagttgatataccccggacggccgttgagcaccttcaggggcagatcgccctcctccatgaagatgcgggcgggcttctggttggggttacatccgtatttcagttccagttctgtcatgatctgcacctctttttctcagtttgggactttggaggcggcgtgggcctgctctccgtgcttgttgaggatgacggtctcacgctccccggtggccaggtggatatactgcacaaacagggacaccttgttgtcctcattcaggctggcccacacctgactggccagggtctcagcgtcaggggcggagacagacacccggcggggctccccctcaaaggaagggagaggttcggcattctcctggtaggtgtggatgaagcggccctccccagccaggggggcgtcgtactcatagaagtagcggtggctgcaggcggggtcaccgtcggcggatttcaggatggacaggcagaaggagccgtcctggtccaccacgccggagatgcggggggtatagttggggccgtcgggctcatagcaccgggtgcgcagggcgtcaatgtagctcttgcccgccagcaggctgtcccggatggtgtcggtctggtccccgttggtgaccaccgtcacctcccccacccggcgcaccgggtggtagatgataagggaggggtccaccatcttgctcttgtcaaaggcccgggtgcggatgccgtccccggtggtttcaaagatgcggttgcggctgttcccgctgcggcccatgatgaagtagatgatgaccgccttctggccatcggcggagcggcccaggacgatgccacggccggggtaggggtgagcttgcaggagttcatttatatcaagaattttcatggggatcctccttgttgtcctcatttgtggatgatgggggagacttgtgataccatgtgagatagcgggaccccaggtggatgagcagggggaccgctcctgccagcgtgaacagcaggccaaaaagactgtagaaatcactgtaatccaggctgctgacgaccagaagcagggctccgcccagaagcagaaagccggaggcgagaatggtcttggcggacatgagatgctcctttctttctcatttggggtcctgatcttgtgtaaatgtgtgggtcctgcgataccaggaccaaaaatcacgccacaggcagagcagcagcggaatcacccccagcaggacaaaaatcaggctgagcaaagggatgaagtagctcagccagccgggcgcagccgcccaatagggcaggaagatcccgcccaggagcagaaagccggaggcaaggatggtctggatggacatgagggtgctcctttctttctcatacagcggcaaaaagggcgcaccgcgtttcggaaaacgggtgcgcccagacggtcggcatggtccacaacgatgctccctgtggtccattccacttccgtcagttacaccgcgtgtttgatctttgtgtggaggcgtattacaggcagtccaagatgcggaccgcccggccctccaccttcagccggtcctggcagaagagggagacggcctggggcagcagcttccactcgcactgctccatgatgcgccgctggaggacctccggcgtgtcgccgggcagcacctcagctgccttttgcaggatgatggggccggcgtcacactcctccgtgacaaagtggacggtggcaccggagatctttaccccgtattccagagccttctcgtggacatggaggccatagcagcccactccgcagaaggaggggatgagggaggggtggatattgatgacggcgttggggtaggcctggaacagctcctccgtgaggatggtcataaagccggccatgaccaccagatcggcccccaccgtctcccgcagcaggcgggtcagggcagcagtgtagccgcggctgtcggagaagtcccgccgggggagcacatagccggggatgccggcgttcttggcacgctccagggcgaaggcgtccggagtggaggagatgacggcggagatccggccattcaccagctctccccgcccctgggcgtcgatcagggcctgcagattggtcccgccgccggagaccaggacggcgatacgtttggacatagcgaacctccgagtgagttaggaattagaaagttagggattaagaatttggaatggatggagtgcgcctggggcgcacggtttgaaatcggtccggcggagtcggagacacaattcccaactcctcatttctcattcctaatgtgatcagaccagctccacgccggcctcgccggggatgacgcggccgatctgataggcggtctcaccggcccccttcagaacggacagggcctgctcggcctgctctgcgggcagggccaggatcatgccgatgcccatattgtaggtgttgtacatgtcacgctccgggatgcccccggtcttctggatcagatcgaagatgggcaggcgggggaaggtgctcaggtcgatctgggcggtgagcccctgggtcatcatccggggcacgttctcatagaagccgccgccggtgatgtgactgacggcatggatgtccaccccggccctcagcagggccttcaccgatcttacatagatgcgggtgggggccagcagggcctcgcccaggctcttgccgcccagatcctcacggggcgtcttcaggtcggcgtgctccacgtcaaacaccttccgcacaagggagaagccgttggagtggaccccagaggaggccaggccgatgagcacatccgcctcgctcaggcgtctgccgtcaatgatcttttcctcgtctaccagcccgacggagaagccggccaggtcgtactcctcctcggggtagaagccgggcatctctgcggtctcgccacccaccagggcacactccgcctggcggcagccctcggtgatgccggagacgatgtccgcgatgcgcccggggtagttcttgccgcaggcgatgtagtccaggaagaagaggggggcagcgccgccgcagatgatatcgttgacacacatggccacgcagtcgatgcccacggtgtcatgcttatccatcaggaaggccagcttcagcttggtacccacgccatcggtgccggacaccagcacaggcttcttcatgccggtcagatcaggggcaaacatgccgccgaagccgcccagggtgcccatcaccccggggatataggtggactccaccatgggcttgatgcgctccaccgcctcatatccggcggtgacgtccaccccggcggcggcgtaggactccgaatgggagtttttcatcttaaaaacctccaaatcactgtgttaaagcctcgcagactttccgccgaaagcggaaaggacaacaaagagtccgcaggcgaatccatttcgccgcaggacatcatgacccctggccgtggtggccagggccgcctttcctgtggaaaggcgaggggatatcgacgaggaagcgacgttgcgtccaggggggacatcgcccccctggaggggccttattccctgccgttccagcagtaggtgcaaaccttgtcccggtccaggccgatggactccagcagtccctccagggactggtagcccagggagtcgaagcccagcttctcgcagatggccttcagcatgcactggccccgctcagtatgtacgtcggcgtactcctccagatgctgctgcccctcatccccctccagctcctggatggtgcggcgggccagcaggtccatgtcggagttgccccgggagaagttcagatacttgcagctgtgcatgatgggggggcaggcggagcgcatatggacctcctccgcgccggactcatagaggaattccacggtctcccgcagctgggtgccccggacgatggagtcgtccacaaagaggagctttttgccctcgatgagctcaggcaccgggatctgcttcatcttggccacctgcttgcggacatcctgattggtgggcatgaaggagcggggccaggtgggggtgtacttgacgaaggggcgggcaaagggcttgccgctgcggttggcaaagccgatggcgtgggggacgccggagtcaggcaccccggccacatagtccaccttgggcagctggccccgggccacctcgtcccgggccatgatctccccgttgcggtagcgcatgacctctacattgatcccttcgtagttggagttgggatagccgtagtaggtccacaggaagccgcagatcttcatctcctgaccggcgggggagagggtctcgaagccgtcagcggtgatgcggacaatctcacgggggcccagctcgtaggcgtcgtggtagtccagcttgtggtaggcaaaggactcgaaggagacacagcagccgctgtcgttctgccccaccaggaccggcagacggccgagccggtcccgggcggcgatgatctcaccctgctctgtaaggagcagcaaggtgagggagccatcgatctcctcctgggcgtgcaggatgccggagactaggtcatccttctggttgatgagggcagcggccagctcggtggagttgacctttccggagctcatggccataaactgatggccgtggtcggaaaaataccgctggatcagctcctcggcgttgttgatgatgcccaccgtggtgatggcgtacagtcccaggtgggaccgtaccagcaggggctgggggtcagtgtcgctgatgcagccgatgccgctgcacccgtggaaatcggacagatccttctcaaacttggtgcggaagggggtgttttcaatggagtggatctgccgctggaacccatctttggcgtcatggatgatcatgccgccccgccgggtgcccaggtgggagtgatagtccactccaaagaagatatccagggtcacatcctggtgtgaaactgcgccaaaaaagccgcccatgtggtcctcctaaaaagtttagagtgaagagttgcgcgtggagaaaagggaaagaggagaacatactccctcgctccccaccccctgcgcctgcccagggagatctatttcctgtgtttgcggatcaaaagccaggccagggtccccgcgcccaggatcagcagcgccaggagcagaaggactggccccggagagccggtcacgattacggcagtgggaccgtccgctgagccgatgatccccaaggcttatttccccatcaggcggcgggccatctcctggtaggcgccctccacgttgcccaggtcccggcggaagcggtccttgtccagcttctccccggtcttggagtcccagaagcggcaggtgtcggggctgatctcgtcggccagcacgatggttccgtcagaggtcttgccaaattccagcttgaagtccaccagggtgacaccgcactcggccagggtcttcttcaggaagtcattgacctggaaggcgtacttcttgatggtgtcgatctcgtcccaggtggccagcttcagggctacggcgtggtagtcgttgatgaggggatcgtgcaggtcgtcgttcttataggagaactcgatggtgggggcgtcgaacacgatgccctcctccacgccgtagcgcttggcgaaggagccagcggagatgttgcggatgatgacctccagggggacgatggccaccttcttcaccacggtctcccgctcgctcagctcctccacaaagtgggtgggcacgccggccttctccagctggcccatcaggtagttggtcatctggttgttgatggcccccttgccggtgatggtgccctttttcagaccgtcaaaggcggtggcgtcatccttgtaggacacgatgaccagacccgggtcctcggtggaatagaccttcttggccttgccctcatacagctgctcgactttcttcatagtagaccgtcctttctttttctcaaaaatctagttgatcgggaagcagagacctgcttgagataggagttgaagagcggtgctggggtgcctaaaatgcgcgcgcagcgcgctccatcactccgatttcctgtctggatcaaagctctgcctggagcttggcctccttggcggcgatctgctccgccatcttctcccgggcggcgtccagcttggcggccagcacatcgtcggagacggaaaggatctgggcggccagcacagcggcgttcttagccccgttgatggccacagtggccacggggatgccgctgggcatctgcacggtggccagcagggcatccaggccgtccatggcgccccccttcatggggataccgatgacgggcagggtggagttcccggcgaaggcccccgccaggtgggcggccatgccggcggcgcagatgagcacgccgaagccgttggcccgggcaccccgggcgaactcggcggcagcggcgggggtgcggtgggcactgaggatgtgggcctcataggggatgccgaactccttcagctgggcgcaggccccctggaccaccggccagtcagaatcagagcccataatgacagcgactttcttcataaaaaactctcctttcaggatcccggccgggggacaggcgaaaaggagcggcccggaccgctctccccggggaaaagattcaggccgcccgcctggaacggacagcctgggatcgcttacctgttatttttgggcgcacaaatccccccgcaggatgctgtgctgccgacagatggaagacaggcacacaaacataggaggacctccttgcccaacaatgaatggactttcattttatcgaaaaatcccgatatttgcaagggggcagggcatttttgtcagcttccacaaggagcgggagaaaaaatgacagggaagtcgtcaggacggcgggggcgggctcacagcaggcccgccgtgaccaggatgcgcttgacctcgtcggcccgccgtgaccaggcggcggccgcaccgtagtcccggcggcgctgatccacccagcccgggtcctccgccagcgcctgctggcacagatggaggaactcctccggggagtgggcgccgtagaccacatcggggaagagctccacctgttccggccacagcatggatacgatgggcttgccggtggagagatactcatagagccggggcgggaccacgtcgttatagggctggctgtcccgcagcaggtccagcagaacctggcagcggcccaaatagtcggggacctccaccagcgggcaggggccggccagcatcacattggacaggcgggagagacggcgcagcagagggttttcttcccggcgccccagcagcaggaaggtccaggcgggccgggcctgggcggcatagaggatgggggtcagatccaggtcggcatggatggtgcctgcccagcccagcaggggcccgggcaggtggtccagctccccccgacgcccggcggagcccgcggcggcgaagagagggtaattcaccccgttgggaagcagcgcgatgttgccgctgcacggggagaggcggtcggccagccctggggaagcggcaaagaccacgtccgccgcaccagccagactgccctcccaccggtcgggcagctcgtcccacacctggtcgcagtcgtagaccagaccgtcgtactccagcgcatccagggcgtggatatggacaggggaggtggtccacagaaggggacggcggaagcggtgccgggccagcttgtcggcgagaaagcggatctggcgctgccgggagagccggaacagccggtcgtgacgctcatccacagggagggcggggggcatggtatagacggtgacgttggggcggaccttcctgcccggctggcgccagcgttgatccaacagtccgccgccggggcagaagtagaggacctgggcgtccttgagccgggtgatcaggtgctgggtccggccgggggtggggctccagggctcggtggagagacagacgacttgcttcaaaaaggaggacctcccgtgttctcatgatctaacaaaaacggcttgcctcgggcccgggagcagggtataatatccctgccggccggtcgggctttgaccggtcatatctcactttattatagtcccggggccccggcgggtcaagggaaggaaaggcaggaagtttttccatgttatccgtgcttcagacattggatggaggggccttgctctggatccaggagaacctgcggggactgttggaccccatcgtagagggatatactacactgggcaacaccggcctgatgtggatcgtgctctctctagccatgctgtgctggaagcctacccggaaagcgggggtggcggccctggcggccatggtgctggggctgctgtgtaccaacgtggtcctcaagcatgtggtggcccgcccccgcccctggctggatgtggcggggctggtgccgctgatccaggagccggaccccaactcctttccctcagggcatacctgtgctgcctttgcggcagcatccgcctggtggcgggcgctgcccaggagatggatgaggtggaccgggctggtgctggcggtgtgcatgggcctgtcccgcctgtatgtgggggtccactaccccagcgatgtgatcgcaggggcactggtaggcctgttctgcggctgggcggcctggaagctgctgcagctgtgggaggagcggcggggatctaggctccgctgaattgccatagaggagcgcagaagcgccgcccggcatctaaacagatgccggacggcgcttttctcttgggagttcatccccgctttcgcagcaggaaggtgaccagaaagatgccggccagatacagggtgatggaggcgccggcggaggaaccgatgtagtaggaggtcatcagcccggcgatcccggcgcccaccgcgaagagcagggagcacaggtggtattggaacatgttccgggagatgttccgtgccgcggcggcggggaggaccaggagggagttgatgaccagcaggcccacccaggtcatggacaccgtgaccaccacggcgatggcggcggagaacagggcctcctgccagaagacgcggaccccgcggctgtccgccagggcgggatggaccgcggagagcatcaggtggttgaaggacagaccccacagggccaggaccagcagcaggatcagggccagcaggccgatcttgccgggctccaccgagaggatgtcgccgatgagcagactgttgaatttggtaaaggagcggctgcccagggtggagatgaagatgcccagtgccaccgcagtggaggagaagacgccgatgaccgtgtcgctggccagccgggtgcggcggcggacaaagttgaaaagcagggcaaagaccagggagaagaggacggcggcccaggtgggctcggagaagccgcaaagggcaccgatggccatgccggtgaaggcggagtggcccagggcgtcggagaaaaaggacatccggctgtggaccaccatggtggacaggatgccgaacagaggggagatgaccagcaccgccagcagggcgtttttcatgaagtacatggaaccgggctgggcccactcaaagggcagcaggtccaccagtgcgtaccagagctccatcatgcctgtccccctttccccacccgcaggtggaaggtctcataaaattccggggaggagagcacctcgtccggcgggcctgacttgagcacccggcggttgaggaggatgaccttgtcggcgaactggcccagggtggcgaagtcgtgggtggacaggaagatggacaggtcatagctggtgcggatctcatccagcatctccagcagctggtgctccccctcgatatccacaccggacaggggctcgtccaggatcaaaatatggggcagcggctccagggccatggccagaagcacccgctggagctggccgccggacaggcctcccatgggcttgtccagcaggtcctccccatggactcgggccagacagcgggccaccagctcccggtggcgcctgggcacgggcaggcagacaggccagcgggtgacggcggcggcgaagaagtccagcacgctcaccgggtccccccggtcaaagctgggggactggggcacatagccgaagagggggcgggtcccccgggcggcgaggggagcgttggccccgtcggacagccggacggcaggcccgccggcaggggagaaggtgatggtgccggagtatggcatctgccccaggatgctgcggaacagggaggacttgcccgccccgttggggccgatgagggcggcgatctccccgcagtggaggtggaaggacacatcctccaggatgtcctccccttggatgtggaccgacaggccctccagcttcaggcagcaggcgtcggagcagcccccggccagcctgccgtgcttgatctttctcacagctgatccaactcctctcccccgaagaaggatacgatggtgttcacgttgctccgcacgccttccagataggtggacaggtccccctcctccgggccgtccatgagcatggtgagctgggccacctgacagccggtttcccgggagatggcgttggcggtggcgtcggagccgttgacctcggtgaagatgacgggcagctggtgctccttcaccagctgggtgatctcattgatctccatggcgctggcctcgctgccctcctcctcctcgatggaggccagcaggggcaggcccagtgcctgggcaaagtagcggaagccgtcgtgaaaggtgatgagggccgcgccttctgccccctccagggcctgggtgcagtcgccggcaaagctgggcagctggccggcggcctcctccccattgcgggcgtaggcgtctccgtggtccgggtccgccagggcgaagccctcctggagattgcgcaccatgacggcggcgtttcctgggtccatccagtagtgggggtcccagtggccgtggtcgtggccaccgtctccctcctcgtggatgtggtccgcgttttcaagcagcgccaccccctgagagcagtcgatgaccgccgcgctggaggcggccagggcgtcatccataaagtcctccagcccggcgccgttcatggcgatgacatccgcaccctcgatctttttcatgtcgtccaccgacagggtatagtcgtggaggcagctcacagagccggtgttcagccgctccacggtgacgccctccacgccctgggcaacggtccgggcgaagagatagaccggataggtggtggccaggacggtcagcccctcctcctgggaggagcccgagggggcctgggtgcagccgggaagcaggagcaggacggacaggagcatggataaaatgggtcgtttcatgggatacctcaaatttcatcagagtggatcgaatcatattattatagcgcgatggcggggatttgtaaacggatagcggggaaagtctctttttgccccggcagaagggagaagaacactccgcccgtcagggctcagaaggcgccggcttcgtcgccgaaccaggtcaccagcaggtccacgcaggcaccgtaggactggatgcccagatcttggccgttgctcttcagaaaggtgtcaaaggtctgggcagcggcctcctccacgggggactccagagcacgccaatagacgttgttgtcctcccaatcggtggacagctccggtgtaaaggaggccgccgcgatctgataccacagatccggggagacggcgtagagggcgttgcacagctggatcaggcccatcagccatccggagtactggaacaccggatcgccgcaggacaccgccgcggcgatgcccacaaaattggcctccagctcggagaagaccatccgctggtgggacatctcgtgggcgatggtggccggcaccaggcaggcgggagcgtccacgttgacgttggcctcgccggtgaaagggaagtagacgccggtgaagcccatcatgctctgcagccgggagaagaacatgggcttgcagggcacggagggcatagccagacaggggagcttctgctccagctcctcatagacggagaccccccggcggaaacagttgtccagatcctcagcgaagtggccctcgctgtctcggaccatctgggtggagaggtctgcggcctggcaggcaaagtacagcgtgacctgggccagggtggacacggtgtagggccgggtctccagaccgctcttttctgcgaaggaggcggagtagtagcccgcagaccaaagccagcagtagccggtccatacccaaagcagggcacagagcaggcagaccagccgccggcccagctcatgcggagcgtggagccggacggccagcaccgtgccgcggatgaggcagagagcgcaggcggtgagaaagaccgtgaccagcacctccgccagggagaaggggagcggggcagacaggcggcccagaagctgctccgccggtgccatgacatggatgacccagccgtccatcagggcctgacggccccgaaacaggtagaagagaagagagagcaggacaggggggagcaggggtaggagcggacgcaggcggcgggtggttttttccttggtttccatgggacctcctgggacgggtcagatcaggacggggccggtggtccactccagtccgccggggcggggagtggagaaacacaggccgtacaggtcggtgcagcgggcctccagctggaagagtctgcggcccggcccgtccagggaccgggcgtgggccggcttggtgaggatgggaagggaggccgctcccttcatggcccgcaggagctcctgcccccgtggagtgaagcccagaacccggaggtagggcggggcagccgggcggtcggcggcggtcaggcccaggaaggcccacagcaggagacggcgcaggcgggcgtgggagtaccgcttggtcttggccagggtgagaaattcctccacagacagggccctgcttcccgcctggacgagccgggcaggaagcccctcctccacactggagtccgggaggagggcccactccgcctgggacagagagcggacacgggccaggagggcacgctccaggtgggacagggaggcgggctccagctcctccggccagggggcgggcaggaaacagtctgccaggtcccgccggccggcggcgatccactcccggaggatggaggcggaggcgaagccctccgcggggcgcggggcgtcgtggcccgctccctggcgggggaccgccagcacctggggggaccagcccagggcggaggcggcccgcaggtactccacccccaggttgtcattgggacgggagaggaccttcgcccgctccgatcccagcagggccgccaccacagtctggcggcaggcggcgaagggcatcccttcgtccagaaagcggctcaggcccgcccggtatgcctcgctgtccaggcaggcggccgccgcggccagggcggccgggtccccgctctcgctgccgaaggagaggacgtccaccacgccgcaggcccggagcagggcgacggcgcccgtagcaaaggactcggcggaggaggccgcccacactgtgggcagctccagcaccaggtccgcccccccggccagggcccagcccgcccgggtccacttgtccgctgcggcgcaggcgccccgctggacccagttgccgctcatgacagcgacgacggcgcagtccgcacccaggagcccccgggtgcgggcgatctgataggcgtggccagtgtggaagggattgtattcggctacgataccggcagttttcaagcggaacgccccctgtctgataggatgtctgtatggagatgcttgaaaaaatgtatgatgaaattcaaaaaaatggttgtcctccaggggaaaaagcagtagaatgattccatcaggtacagatacagtttagtacattccgcccagataggcaacaaaaactgtgaaaaggagatcgtttcccatgaatattctggtcatcaacgccggcagctcctccctgaagtatcagctgctcaaccccgagacccagcaggtgctggccaagggcctttgcgagcgcatcggcatcgacggcaagttcacctataagccccagatggagggcaagcaggtgctggacgctatcgacattgccatgcccacccactctgaggccatccaggctgtgctggacgccctggtggacaaggacaacggcgtgatcggctccatgaaggagatcgacgcggtgggtcaccgggtggtccacggcggcgaggctttcaaccagtctgtcctcatcaccgacgaggtgatgaaggctctggaggactgcatccccctggcgcctctccacaaccccgccaacatcaccggcatcaacgcctgcaccgccgtcatgggcaaggacgtgcctcaggtggccgtgtttgacaccgccttccaccagaccatgcccgccaaggcttacatgtacgcgctgccctacgagtactatgagaaggacaaggtccgccgctacggcttccacggcaccagccacaagtacgtagccggccgcgccgccgccatgctgggcaagcccatcgaggagctcaagctgatctcctgccacctgggcaatggctcctccgtcaccgctatcgatgggggcaagagcatggacaccaccatgggcttcacccctctggccggactccccatgggcacccgctccggcgacctggacgccggcatcctggagtatatcatgggcaagtacggctatgacatcaaggagatggtgtctatcctgaacaagaagtccggcgtgcagggcgtgtccggcgtgtcctccgacttccgtgacctggagaacgcccacaaggaaggcaacgagcgggctggcctggcggtggatatgttcaactacggggtgaagaagtacattggcgcatatgccgccgccatgggcggcgtggatgccatcatcttcaccgccggcgtgggcgagaacgccgcctcccagcgcctggccatcgcttccgacctggagttcatgggggtcaagatggacgccgaggccaacagtgtccgggggaaggagaccgtcatctccgccgccgactccaaggtgaaggtgctgctgatccccaccaatgaggagcttatgatcgctatggataccgccgccatcgccaagggctgagcgcggtcctgaaaacaaaaaacgcccggcagtcacagactgccgggcgttttttgatatcgttccgggcccctttttgtgcccacacgctcttggggagaaagatggcggcggcagcgccgccagagggacgcaaaaggacttagggatctttacagggcggacaggaccagctgctcgccgtcggaggaggcatccagccgggcgaccgggtgctgccagctgtcgatgatgcgggaggcgatggcatcctccagctccttctggatcaggcggcgcaggttgcgggcgccgtaggcggcggaataggactttttcaccagatagtccagcaggctgtcctgccaggtgaagacgatgcccttctcggccagggagtcctggagctcctggagcatcagggcggcgatggccttgaagttgtcctctgtgagctggttgaagtagacgatctcgtctacccggttgatgaactcgggccgcaggaactcctgaagggccttcatggcccgctccctgccctgttcattggcggtgcgggcgaagcccacagagcccgatttggtgttgctgccggcgttggaggtcatgacgatgactgtattttcaaagttcaccgtccggccgtgggcgtcggtgatccggccgtcatccaggatctggagcaggatgttgagcacgtcagggtgggccttctcgatctcatcgaagagaatgacggagtagggcttgcggcggatcttctctgtcagctggcccgcctcgtcatagcccacataccccgggggggagccgatgatgcgggagaccgcgtgcttctccatgaactccgacatgtccagccggatcagggactccggcgtgttgaacaggtcgtgggccagctgcttcaccagctcggtcttgcccacgccggtggagcccacaaagatgaaggacaccggcttgcgcttggggctgatgcccacacggccccgccggatggcggaggagacggcgtggaccgcctcatcctgaccgatgatgtgctgcttcagccgctcctccagccgggccaggcgctggtactcacgttcctggatctggctggcggggatcttggtccacagctcgatgacgttggccagatgctccagcgtcagggcgggggtgggggcggcgtccagctgtcccttctcctgctccagccgaagctcctggctgcggatggcggcaagccgggcataggactcctcggtggcggcggccatcatgacctctttctccttgtccaggtcggccagctccttatccacctcggcccggcgggccagagtgcggttctccaggttcacattggagcaggcctcgtcgatgaggtcgatggccttgtcgggcagatagcggtcggtgatataccgctcgctcatggtgacggccaggcggcacatctcgggggagatgacgacctggtggtaggcctcgtagtagggggcaatgccctcgatgatctgcacgctgtcctcgatggagggctcctccacgatgacgggctggaagcgccgttccagggcggtgtccttctcaatgtgcttgcggtactcattgagggtagtggcgccgatgacctggagctccccccggctcagggcgggcttgaggatattggcggcgttcatggagccctcggcatcgccggcgcccacgatgttgtggacctcgtcgatgacaaggatgatattgcccagctttttgatctcctcaatgaggcccttcatccggctctcgaactggccgcggaactgggtgcccgccaccagggcggtgaggtccagcagatagacctccttgtccagcagcttatagggcacgtcgcccttggcgatcttcatggccagcccctcggcgatggcggtcttgcccacgccgggctcgccgatgaggcaggggttgttcttctggcggcggttgaggatctggatgacccgctccagctcccgctcccggccgatgagccggtccagcttgccctcctgggcgcgctgggtcagggagatgcagtagttctccagaaacttccgcttcacggggcgctcctgccccttgccgccgttcttgtccggccggggggcggcgtccttcttgggctcggcgtccccgccggcggcgccggcgccgaaaagctggttcaggaaggggaaggtggcggtgcgtccgtcgtcctcgtccccgtcctcccggtcctggggcatcagtccctccatcccctcggccccgccgaaggcggacatcatctcactggtgaggttttccaggtcctcgtcggtgatgcccatcttctggatcatgtcgtcgatgggcttgatgcccagctccttggcgcacttgaggcacagtccctcattcttggactggccgccttccaatttggtgataaagaccaccgccacatgcttgtggcagcggctgcacatggtgggctgcatctatgcaaacactccttccgggagagagaaattttttggaacaaagacaggataaccccgaaatgtgaacttgtcgtgaattcgcaagaaaaggctgggcacacagagagaaactcaacgaaagagcagaggcgccagcagggagagaggggtgtgggtgcagaaaaagcggaggagcaccgtcccctccaccgcctcctgggagatcagggagcccctcagaagccagcagaggatgaacacgatcagtccccccttcaccagcccgagggcggcgccgctccagtggttcagggtggacaggacaggcagcttgcaggccaggtccagcacccggctcagcagcagccagagaagcaggaccagggcaaaggagaccaggaagaggaacatccgggtcagctccagggccagataatccgccaccgcccgggcggcggaggtagtgacctccatcaccccatcctggatggcgtcctggatgggctggataaagtgctggtacaggctggaggcctgaagggcgtccaggacctcgtccagggggagctgggcgagccagtcctcctcgccttcctggccctcttccccgctgaaggcgtccgaaagggcggggggctgagaggcctcggaggtctcaggcggggggagcaccgcatgggtctgttcctccagcacctgagtgatgctccgttccagagcgggctggatcaggcggctcatgggccgggccagctggctggagatgacggtggcgccgatgaaggccacaaagacggccagcagggagcacagcgtcagcacaaagccgcggcggtagcccttccaggcggtgaggaggagcaggatgaggatgacaacatcaaaaatcacaaaagacatcaaaatacctcgcttggatcaggagaaaagggaactcaggaggggatatagagccaggcctgctggctgtcggccagcagggcgctgccgttgggggagagggcggtgaagcgggcgtcctgggtgtcctccagggcgcggtagagggacatgtcccgggtgtagatctccaggccgctgccggtgagcagggacaggtagcgcccggcggcggagaaggagagcacctgcccccggaggggggcctgggcgatgagctggcactgggggtcgatggtgagcacctgctcggcgccgccggcctggtagcggcccagcaggagcactgcgaagccgtccccgcccaggtggcagcccttgaggtagctgcggccaaaggagtaggtctcataatcggagccgtcggcggccaccgagagcaggcggtcctcccccagaacccacagctgctccgcctcatagtccaggtccagcaccgccaggttgcccagggagagggtggcggagggctcactgctgtccaccggatagaggaggagctgactgaaaaaggagccgttctcctgcccgatggtgatcacggccaccgtcttgctgtccggagagacagcggcgtcggccacgaacacgctggaaaagttcagctggatgatctccttccggctggtgctgttgacgttgtacaccgtgaccgagcccttatagccgctctgctgggcggtaacagccagccagccgctgtcgttgacccgggcggagaggagggtgccgtccacgtccagggaaaaggcctcctgaccgtcctgaaagagaaacaggctctctccgccggcgtcatagaccacgcctgcggaggaggaggcggacaggacgggctggctgaggggggtgacctcctcagcgtactggtcgccggagaaggagtagtagtgggcgccggcggcggagcactgaaggatgccccccttcagataggcgaaggagatgctgtccccgcccgcgtgggtgaagggggcggcggcgccggaggcgtcggtctccacagagcgcagggcgagccagcgcttcaccgcgtccaggttgaactggtcccggtagaccaccagggtcagggctcccagggccaaagcggcggtgaccagcagagccagcagccggaccagaatattcggtttttgggaggcggatgcctgttttgttgtctgatccttcatgttacctctctcccccggggcgggagggggcgccaggcccccttacacaacgtcctcgtcataccacagcctggtcatatacagcccgccgggtgggacggtggggccggcgagggtgcggttgcccgagtccaggatggcggggatgtcctccggggccagcttgccctcggcggcatagaccacagtgcccaccatggcccggaccatgttgtagaggaagccgtcggcgcacacccggcactcgatcagctcccccttccgctccacctggaagtagtggacggtgcgtacggtggtacgggtctcggtgcccacggagcgcaccgcccgaaagtcgtgggtgcccacgaactggctggcggcccgctgcatcaccgactcgtccagatgcttggggtagaaccaggcccggtccacatagaaagcgttgcccaggcgggagttataaatgcggtaggtgtattcctttttccggcaggagccgatggcgttgaattccatgggcacctggacggcccggaccaccacgatgtcgtcgggcaggcgggtgttgaccgccaggggcaggcggtcgcaggggatggtggaggtggtgcggaagttggccacatagacctgggcgtggacgccggcgtcggtgcgcccggcgccggtgcatttgaccgggtggcacaccacggtggacagggcccgatccagcgtctcggccacggtgacggcgtttttctggacctgccagccgtggtaggcggtgcccacatacatcagttttaaagcaatgtttcgttccattttatcaccaaaggggggcggatcttgtctttttcgggggcggtcagcggctgatctcccgcttgtcggtgcggcccatgagatagtccagactgacgccgaagaagtccgccagggccaccaggcccagtgcggaagggtaagacacctgatactcatagtcctgatagctgcgcagcttcaaaccacagatctccgccatttcccgctgcttcaagccgcgttctttccgaagaagtctcaggcgggcagaaaaattctccataataactcctaaatacatagttgacacgcggtaaaaccgtgctataataaacgtggttataccgtgtaaaatgtgagggaggaatgaaccatgaatacgctgttatacgcagtatttcaggataatccgctcttgtcaaatgaaatttacgaattttgcaacggcgtccccgattatgtcagggcggagcgggaatatctccagatcgcccggcaggtggcggaccggctggggtacgacctctataacgactttgaggagaagctgaacgactatatggcccagcagctcgacgcctgctacctcttcgggctggggctgcggcgggagctggccgccgggctgatgctggaggagtgagggctcacagcccgaagcggcccagcacccccacccccgccgtgaggaccaggaagagcaggatgacggccgcgtcattgcgccggtatttcagctggcgcaggcgggtgcgcccctcgccgccgtggtagcagcggcactccatggcgatggccagctcgtctgcccggcggaaggcggagatgaacagagggacaagcagggggaccagcgccttggcccgctggatcaggttgcccgactcaaaatccgcccccctggcccgctgggcggacatgatcttgtccgtctcctcgatcagcagggggatgaagcgcagggcgatggacatcatcatggccagctcatggaccggcacatggatctttttcagcgggcccagcaggttctccagcccgtcggtgagcaggatgggggaggtggtgtaggtcagcaggaaggtgccggcaatgagcatcaggatgcggaccaccatgaagaaagcgttgaacacgccctccagcgtgatggtgaagatccagaagcggaccagcaccgtgtcccccggcgtgtagaacaggttgaggatggcggtgaagatgacgatgaacaccaccggcttcatgccccggaaaatggacttcaccggcaccttggagacggcgatggacacggccagcagcaggaacatgatgccgtaagtgacaaaggacttggccaggaacagggccacgatatacagcaccaccgcgatcagcttggtgcgggggtccaggcggtggacgatggaattgccggggaagtactgccccagcgtgatatccttcaaagccatttactccacccccttttcccgaagcctgcgcagaatggtctccttggcctgggggatggtgtagacggaggcgtcgatgtccacgcccatggcccgcaggcggctgaacacccgggtcatctggggcacgcccagccccatgcgctccagttccgcaccgtggcggaacacctcccggggcgggccctggaaggggatgcggccgtcgttgaccaccaccagccggtccaccgtgcgggccacctcctccatggagtgggagaccaggatgatggtggcattgttggactggtgatagtcccggatgttgcccaggatggactccactcccaccgggtccagcccggcggtgggctcgtccagaatgagcaccctgggctccatggcgatgacccccgcgatggccacccgccgcttctggccgccggagagctcgaagggggacttttccagctggtcgtcccgcagtcccacgaagcgggcggcctcccgcacccggcggtccacctccccctcgtccagccccatgtttttcgggccgaaggagatgtccttgtagacggtctcctcaaagagctggtactccgggtattggaacaccagccccacctggaaccgggtctgacgagtgcgcttggcatccgcccagatgtcctccccctggaagagcacctggccggaggtgggcttgagcaggccgttgagatgctggatcagggtggacttgcccgagccggtgtggccgatgatgcccaggtattccccggcgtaggcggtgaagtccacttccagcagcgccccccgctcgaagggggtgccggcgctgtaaatgtgggagagctttttggtctccagaattgcttccatccgttgtgttccatcctttttcagtgaagtggtgcacgccccgcggggtcgcgcccgaaaatatcacagttacggcaggacgccggtctgttttgccagatcatccagctgggcctggagatggcgggcctgcatctccagccgcttgacccgctgccggagggagaccagacacacgaccgcccacgcggcggccagagcggtcagtcccagcagtaccgtgggaaagctgttatcaaacatctccagcagcagcctgggggcagaaaagaccaccagaaatgcggcgatgcccgcaaagacccgggtgcttctctctgtactgttcatggctggcttcctttctttgatgcagcgttcagcagctgacagagagcctgggcgcactcctcgtcgctgagggcgtccagggggacgtccagcccctcctgccgcagttcccacagcagctgagtggtgtcagggacagtgagccccacggagcgcaggccctccacgtcctggaacacctgccgcggggggccgtcggcaatgaccctgcccttggtcatgaccaccagccggtcggcctgggcggcctcatccatgtggtgggtgatcaggaccacggtgacccccttcttccggttcagatcccggatggtgcgcagcacctcggagcggccgatggggtccagcatggcggtgggctcgtccagcacaatgcaccggggctgcatggcgatgaccccggcgatggccacccgctgcttctgaccgccggagaggagatggggagcgtgctcccggaactcatacatccccaccgcacgcagggcgtcgtccacccgctcccggatctcggcgggggggacccccaggttctccggtgcgaaggctacatcctcctccaccacattggcgacgatctggttgtccgggttctggaacaccatgcccaccgtgcgccggatgtccagcaggcggtcctcatccacagtgtcgatgccatccacatacactttgccgccgctgggcaggaggatggcgttcatgtgcttggcgagggtggatttgccgctgccgttgtggcccagaacagccacaaaagtaccctcctggatggacaggtccaccccgtccagcacgacgggggcgacgccctcggcggaggtgtaggagaagcggagagcttccgcgcggatgatcgcgtctttcaatcaaaacaccccttgttttgagtcaggaatgagaagttggcaattgagaatttttttcgggagctggagagggcggcagtgaacggccgcgcccataactcctaactggtcaagatctgctccagcgcccggtggcgccgcaggggaggaccaggccgctctcggtgacggggaggcccagctcctggctgtcggtgcggccgccgaatttccgggagagcagggtctccaggatataggtgactacgctgggggccagaccggtggtataggagttgaggatcacgaacaggggctggtcggacagcaccccccgcaccagctccacaaaggggtagaggttctcctccagccgccacacctcgccggtggggccccgtccgtagctgggggggtccatgataatagcatcgtactgccggccccggcggatctcacgttccacgaatttggcgcagtcatccacgatccagcggataggagcgtcctccagtccagagctcctggcattctcccgggcccaggacaccatgccccgggcggcgtccacatggcacacgctggccccggcggcggcgcaggccaccgtggctccgccggtgtaggcgaacagattgagcacccggatgggccgtcccgcccgccggatctgctcttgggcaaagtcccagttggccgcctgctccgggaagaggccggtgtgcttgaaattcatgggcttgatgttgaaggtgaggctgccgtagcggatggtccagcgctccggcatgtccttcttctcccactgccccccgccggaggaggagcgggcataccgcccgtggggatgcttccagcccggatgggtccggggcgtgttccagatggcctgggggtctggccgcaccagcagctggtccccccagcgctccagcttctccccacggccgcagtcgatgagctcatagtccgtccaccggtcggaaacccacataacaggcacacacctctctggataagatcacttcaaactaaaactataatagtatatcatccgcctccccctccgtcaatgaaaagggaggggaaattcccccgtttttgtggagaaaaggggaggagaggagtggcttttttccaaaacagagggccagggttgtgtttttcctccgcctgtgatagaatcagacaaagtcagacaaaaccatccgctcccgtccggggacggagaaaacgaggtgccccatggaccatcagttcagaaacgccgtcttcggcggctttaaccggcaggatgtgctggattatttggagaccctggcccgggagaatgcccagaagcgccaggagctggagcagagcatcggccgggccgaaggggagcgggacgagctccgcgcccagaagcaggcgctggaggagcagaagcgggccctggagggggagaaggaagaactgctgcgcagcgtgcagcgcagtcaaagcgaactggccgccctccgcacccagctgggcgagcgggagcagaccgcccgacagacgcagcaggccctggaggagagccgccgggaggcggaggcgctgcgggagcaggtggcccggctggagccggacgcggctgcctacgccgcggtgaaggaccgctccgccggggtggagctggaggcccaccgcagggcccagggggtgctggaccaggccaacagccaggcccggcatctgcgccagcagatggagcagtggatgacccgggtgggccgggagtacgacgccctgcgcaccgaggtggaggccactatctcccacgccgccgatcagctggacaaggcgggaaagtgcctggagcaggtgtccgccctgctctccgaccaggacgtggctctggaggagctctcccgtgcctatgacagcaccgccccggacaaggtgcccgccccggttccgctggaagaggagccctgagctctctgtcgtgtgacgctgcgcccggcactccagccttcccctgggggaaggtggcgcggcgtatgccgagacggatgagggggcgtcttttcgccgggccgatcaatataggacgggagagtctgagatttgcacctgtccgccccggtcactgaatgatctcatgtgggaaaaaacagaccgcgggagccgtatttcctgatcggcccgctttctgcgctcctcatttgacaaagggggagggctgtgctatactgtcaccgattttaagaaaagggtggtggcttgatgtcggcgatccgctgaaaacaggacaagaaagacctggttctcatcttttgctgggatgggccgtcttgctgtgcctattttgcggatcgatcatcaagctgtctccgaagggagggggagctttgccgcgcctgtcaggcggcagggtcccctaagcagccggagggatggctgctgccgcaatatgggaaaacggatggcccgggaccagcggggccatccattttttgttgtcctgaacagaagacgtgcaggccggccgtgccggcactgtcatgatatttgatgagatgagggaccaaaccatgaatcgggaacataaaagacagaaatacgaaaaaggatattataagacccacccctgtacagacagcttcacctgcaaggcgtgcggccgcctagtggtatcggatggggccgggagcggccaccggaaccactgccccaactgcctgtccagcctccacctggacaacgaaccgggagaccgggcatcagactgcggcagcgtcatggatgcggtggcggtgtgggtgaggaagaacggggaatgggcagtgatccaccgctgccggcgctgcggcgcactgagttccaaccgcgtggcggcggacgacagccccatgaagctcatgtccattgccatgaagcccctgtgcctcccgccctttccgctagagaggatcgaggagctgactgagctgatgggtggaacgatttgaggaaaacgcgaaggacgccgcgggctcagcccacggcgtcctcttttttcatcaggcgtagacaaagttggccagcatgacggacagctccccccgggtgacggccccctcggggtccagccgcccgtctggctgtccggccaggatgcccttctccagggcccaggccacggcggcagccccctccccggagagctctccgccgtccggataggccatcagtgccccggtgtccgtcagggtctcggcacccagagtgagggcaaagcggtagaggaccagggccacgtcctcccgggtcatatcctgctggggcaggagcgcatcctcacggaccagcccggcggagagggcgaagttggccccgccggcataccacgccccgtcccagggaccggacagctggggggcgccggccacctgccagagcacggtgagcagctccgcccaggtcacaccgctgtccgggcggaagttgccggcctcatccccggaaaagaggccggaggaggcgcaggtcagggcgtagcgggcagaccagtggcccgtcaggtcgggaaaggacagaccgcagatctcccgatagaaatactgctccaccgcctccaggacatcctgagcggcaccgggctggagcatgtctgtgagacccgcctgagcgacggcgtcccggtagccggctgtgtctgtctgggccaccagggccagataggtgtcggcggcggcatcgaagtcctccgcggagtccacaaggagctccagggaattgagaacagaagtcacatagctgatggtgtagcagggctgttcaaacagctgggagttggcggcccagtcataggcctcctccccgccgatggagtagaggaagccgtaggactccgagatagagcggtagagccggttcatcccggacaccgtgaggccgtccgcctgatagaccgcctgctcaaactcgtcgtacatgcagaagtacagcatccccagcaggtcggagagaatggccgcccggtaggcgtccccgcccgcctggcccgccaagctgtcagcaaaggtgaggtacagggcctccagcccctgagagtgggtctcggccacgtcgtagcagaactgctcatcctcagccaggcagtggttggcgaagtggccgaactcgtggatcagggtctttacgtccagatagctgccctgggcggagctgaggatataggcagagcggtaggcgggcaggctgacagtgacgcccagcgtgctggagctggccagtatgtccagatcgtagagaccgttgtcccgcatatagccgtacagttccctgtattcgctggagactgcatccatatagggctccacagcgtccagcacctcctcctgggtcatgtcctccagggaggagagccggacgggggacagggagctgaggcgggactgggcgatcagcagttcggactccagacggggcagaagggccttgaccgcgcgatggaggagggcggcctcctccggcgtatagtcccggccgtagacagtctgataggcgtactggacatagtcatcatagcccttggaggcggcgtactgattgcgcacctttaccagctccaggtagataggggcgaggaccccattgcggacggcggccagctcccccaccagggtcagataggcatcctcctccagtgagcccaccagataggcggcgtccgcctgggcacgggtccaggtcctgccgccggactggacagagggctcctggaccaccgcctcccagtattcgttgaccagagcagtctcacgctccagcagggccagctcctcccgcgtattgggggaggtggacaggagggactgagcctgcccctcccccagcagcccggccagaacggagccgtaggcgctgttcagcacctcctggacggcggagaggtagtcgctctccgcctgaccgcagacggagctgtaacggacatactcctgggtgcaggaggcgggggagcgcatatagtccagggagcagaagtagtactcggtgagcagctcgttgaagcggtccgtcatcctggacagcagagagaggaccgagcgctctgaggcatcctcctcccgaacggcggtcagaagtgcctgccgggccgcatcaaagctgctggggtcggcggggctccagtcctgggccgaggcggggaccggctccgggaagtccgggaagaactcggtctcccgggccagggccgccggagcgagcagcgagacagacagaaggagggagagcaggagtggcagaagacggccgcacttcatagagatgcctccaatacagacgatttcgggcccggaagcctgtctccatcctatcatatccggggtggaaagacaagcgccaggccaaggggcagagctgaaaaatacgccgcggaaggggaaaacagcgtcaaaaaggcccgctcccgtatgagagatgtcacacgggagcgggccgggggctgatggtccgggggcggctcagacggagaccggatccatctcaacggtcagctgctccatcaggtccaccacgtcggcgccggcggggggctgggtctggggctgggtgctggaggcggagtaggtgccgtccatcgtcacggtgtaggtgaagccgggaatggagacgccggaggcctcgtcgatgacggcgggcgtgctcatctccatggtcatagccagctctttgcccttcatggaggcgtccacggacacaatggccccctcctggtccgccttcatggtcatggaatagccggtgaccttggagtcggaggtgaacagagtaaaggtgatgtccatgtcctccgcctgggtggtggagatataagtggtccccttctgctccagggcactgtcggagaacatgctgttataaagagccaggagatcacgagtggtcatggaggcggaggtgagggggacctcccgcaggataagggccagagagtcggcaaagctcatgtcctgagcggcccgggccatgagcaggaggtcggtgtagtccaggccggtctggagggagagctggtccatcatggacttcagatccatcttaaaccacaggccggtgacgctgggatcggacatctgggtcagtgcatcggaggaaaagtagaacaggccctcctccaggtcgccccgcagttccaggtcgatgggatcgatctgggcggatacctcagcatcaggagcggacagttccatatccagctctgtgctgaactggaaggcggagctgtcgctctggagcatggagtaatctccctggatgccgccggtcatgagggaggagagctccatctccactgccagactgccctccaccttgcaggtgccgccggtcagatcccgggtgtactccagataccggtccatcatggcgtaggtctcggagttggcggccaggatggcatctacgtcgtcgatgatgacagtagaagtctgggcatcccagcctacgttgtaccccagggcaccggccaccagtcccacggggacgtaggtgcgggaggaggcggcgtcgatgaagggagcggcatcggtggtgatggtgtccgtctcagcggcgtcctcctgcccacgggtcacagtgagctccttctggtcgatggtcagggtgatggaggtgccatccttggccgcggtgacactgcgggtggcggcgtcccaggtgatatccccctgggcgaagcccagggcgtcaaaggtctccaccatgggcaggaaagaacggccgtccttcagcaggggggcggcgtcggtaaaggtgacggcctccccattgaccaggacggagaaatccccctcctgggctgcggaggcgggcaggcagagcgccagaagcagggcgccggcgcacagggcggtgcggaacgcgcggtttaacatgacagatccactccttaaaattgacatgggccgccaggcggcccgaaagccgagcttttttccggtctcaatatagcatatccggggggaaaagacaaggagcgagagggagaaggaagaaaaaatccggcgcgggcccgcaggtccgcgccgaaaaaaggaggaataggggaggaatcaggcgtcgatgacctcgccggtgagcacctcccggctgtccacggtgagctgtccatcccggcagtccacggtgatgcgggagccgggctccacctggtcggcaatgatcttcttgctgataagggtctccaccgtatgctggagatagcggcgcaggggccgggcgccgtagatggggtcgtaggcgctggcaatgatctcctccttggccgcgggggtgaggaccacggtgagctgtttgtcctccagccggcggttcaggtcggcggccatcagatcgatgatatgggtcacgttgtcctttgtcaggggcttgtaaaacacgatctcatccagccggttgagaaactccgggcggaaggaccgcttgagcagatcgctgacctgctcccgggcctcctggctgatctccccccggctgtcgatgccgtccagcaggaactggctgcccaggttggaggtaagaatgatgatggtgttcttgaaatccacggtgcggccttgactatctgtaatacggccgtcgtccaatacttgaagtaatatattgaatacgtccgggtgggccttttccacctcatcaaagaggataacggagtagggtttccgccgcaccgcttcagtgagctggccgccttcctcatagcccacatatccgggaggagccccgatgagccgggacacggagaatttctccatatactcgctcatgtcgatgcgaaccaggttcttctcgctgtcgaacagggcctcagccaaggtcttggccagttcggtcttaccaacgccggtggggcccaggaacaggaaggagccaatgggcttgttggggtcagcgatgccggcccggctgcggaggatggcctcggacaccaggcgtaccgcctcgtcctgacccaccacccgctggtggaggatgtcctccaggtgaagcagcttctcacgctccccctccatgagccgggagacggggattccggtccaccgctcgatgatgcgggcgatctcctcctcggtgaccttgtcccgcagcagggaacgctgccgcccctcattggcgatctgctcctccgcctccagggcctttttcagctcggggatgcggccgtactggagctgggcggcccgctccaggtcgtactcccgctgggccttctccagctgggcgttggcctcctccagctcctccctgagcttctggaccttgccaatggcattcttctcgttctcccactgggctttcttggcgttgaactcatcccgcatgtcggagagctccttctggatctccgacagatgctcctgggacagcttatctgtctcttttttcagagcggcctcctcgatctcgtgctggatgatcttccgctggatgacgtccagctcggtgggcatggagtcgatctcggtgcggatcatggcgcaggcctcatccaccagatcgatagccttgtcggggaggaagcggtcagtgatatagcggttggagagagtggcggcggcgatgatggccccgtcggtgatcttgacgccgtgatagacctcgtaccgctccttcaggccgcggaggatggcgatggcatcctccaccgtgggttcattcaccatgacaggctggaagcggcgctccagagcggcgtccttttcaatatactgccggtactcgttgagggtcgtggcgccgatacagtgcagctctccccgagccagcatgggcttgaggagattgcccgcatccatggagccctccgtcttgcccgcccctacgatggtgtgcagctcgtcgataaagaggatgatacgcccctcggacttcttcacctcgttgaggacggccttcagccgctcctcaaactcgccccggtacttggccccggcgatgaggctgcccatatccagggagaagatggtcttgtccttcaaactgttgggcacgtcccccttcacgatccgctgggccagcccctcggcaatggcggtcttacccacgccgggctccccgatgaggacgggattgtttttgctcttgcgggagaggatgcggatgacattgcggatctcgtcgtcccggccgatgaccgggtccagcttgttctggcgcgcccgttccaccaagtcggtgccgtacttcttcagggcgtcataggtctcctcagggttgtcactggtgacccgctggttgccccggacagaggtcagggcctgcatcactttttcccgggtgacgttgtaggtgcggaacagctccttcagggcgctgttggcactgtccagcaggcccagcaggatgtgctccacagagatatactcatccttcatggacgccgcggcggactcggcggatttcagggcacggtccacgtcctgagccacatagaccttgtccgcctcccggcctccaccggagacccggggcagcttctccacctcgtgctggacggcggcctggaagctggggagggtcaggcccatattggtgagcagctgggggatcagcccctcgccgtcctggaccagcgccatgagcagatgggcctgctcgatctgctggtgcccgtactccagggcgatgtcttgggcgccctgaatggcggccagcgatttctgggtaaattgattcatattcataaaaggaacacctcctagatccgatctatattgattcttaaaatttagcactcaataaacttaactgctaaaattagtatagagccattggacaagatttgcaagtcttttttcaagtttccatacttttgtgtgctgcgtcctgcaggggcacacaaactgaaaattgagttttggaagaaacgcgatttggaaaagtgtcagggggagccggcgtaccggctccgcctgaccgcggctggggagacctcactggatctggatcttgtggcactggggaaggacctcctgccgcttgggcagaatgagctccagcaccccgtcctgataggaggcccggatggcgtcctcctggatgccgtccagggtgaaggaccgggagaagctgccggtgcggcgctcccggcagatgtagttgtcggcggcggtgcggtcatcggcctggtgcttggcggagatggtgagcacgccgtcctttacatccagatcgatgtcctccttgcggaagccgggcaggtcggcctggagcaggtagtgggtgccctcgtcccggatatcagtgctgaagaccggcgtgcggcggccgctctcgccgaacatgctgcgctccaactcgtcaaacagatccatcatgctgctgttgctgcggcgggtgtaggggatcatatacataagtcaaaactcctttcggtcccgggcggagcatcctccggcccgggcctctctgaactttggctttattatagtgagggattatgaattttttgttacacagatgtgtcacaagtgtaaatattagcactcaataaataagagtgctaatattttgcaaaaaggctccccttgtattggcgaaaaccgggtggtataattgtcatacaattaaaataaggagggcaccccatgaagatattagtttttggccccagagaccgctatgacgtgtaccggcccccatttgcggatgagatgccggtggagctggtgttccgccgcccggaccagacctatgtccaggcggcccaggaaaatgcggacgcgaggatcatttttgtggatgccatcacggatgtgggtcccgatgtgatggaccagcttccagagctgaagatgatccactctgagggtgtagggtacaactgcattgactgccaggccgcccgggagcgggggatctatgtgtgcaacaataaggggtgcaacgcggaatcggtggcggagcacaccatcatgctgatgctgatggctctgcgcttcggcatccctggacacaacgcggtcatccaggggcagcagatccagatgaagcagaaggccatcgccgcccacgcccccggcctgttccagtgtgcggtggggttggtgggctttggagacaccgcccaggccaccgcccggcggctggccagcttcggctgcaagctatactattacacccgccaccgccgtccgcctcaggtggaggaggactttggggtgacctatctgcctctggaggagctgaccgcccagtgcgacatcatctcgctccactgcgcggtcaccgacgagacccgggagatggtggatggggccttcctggcccggatgaagcccaactccatcttggtcaactgcggccggggcgacctggtggacaaccaggccctgcggaaggcactcatagacgggaccatccggggcgcggcgctggatactattttcccggagcccacccccggcgaccaccctctggtggacctgccgccggaggtcagagatcgggtggtttacagctcccacctggggggcagctccgggggggcttttgccaaggcgcatctgaccatgtggaccaacgcccggcatattttgaacggagagcggcccaccaacgtggtcaacgggctgtaagagggggggcggcattatgatccgggctctccgtccggaggatctggaccaggtgatgcagatctggctgaacgccaacctggaagcccactgctttcttcctgagagctattggtgtgaccatatggaggaggtgcgggcggcgctgcccgccgcccaggtgttcgtctatcaggactgggaggggctccagggctttgcgggactgatcggcgactatctggcggggctctttgtccggcgtgccgcccggtcccgggggatcgggcgggcgctgctggagcgggccaaggaggggcgggagagcctgacactccacgtgtaccgggagaacagcccggcggtccgcttttaccagcgggagggctttgccatccgggccgcggagcgggaggagaacaccggccgggaagagtaccatatggagtggcacaggggaggacagcaccttccaccgcggcgcggggagccttgatccgctaagaccccgctgccccgggagcaggtacgtagctccgcttgacaccaggcgtccggggatggtaagatggggaaaagctggcatgggacgggaggagagcttatggcagaggagctgtttggcggacaggatgtgggggccacgccctcttataaagaacaggcataccgcctgatcaaggaggcgatcctcttcaaccggtttcgggtaggggccatctactcccaggacgacatctgcaaggagctgggcatcagccgaaccccggtgcgggaggctctgctggagctccagaaggacggctatgtctccttctcccggggcaagggggtgcaggtggtgccggtgtctgaccgggacgcccgggacatcctggagacccggatgtatatcgagtgcatcaacgcgaagctggcggcgaaccgtgctgcccagcgggaccttcaggccatgcgggagagcctggaccgcctccgggaccagctctccaccagggatgggcagcacctgtaccgcctggaccacatcttccaccgggcagtggcggcggccactcagaaccgcctgctctaccgggagtgcgagctgctcctggaccactatctccggtttgaggtcaagtcggtgtataacaactccatcgacgccaagatcgtctttgatgagcatgtggccatctgcgatgccatcgcggaagggagcgccgagcgggcagagcaggccatggcccgacacctgaccaactcctaccgccgcaccgtcagccgtttctgggcggaatagtggaagaaaacatggacggccgtgtcccgggaggatgcggccgtttgacctgtctgaatatgtaaatatatcccatataaaatgttttcaaccagagctcgaaaaagttcttgacattgcccctaaaatatcttatgataaggccataaaacaagtgtattggagagcgaacagaatagcggttctgcgcgctctccttttttagagctcaagtaatatattacatatttaataaaataggaaaaatgtaatatgttgcaaggggagggcacaggcaggtttgagcagctgcggtgggcggtatctgttccgcatccggaggcggggcggcgccggcatccgctgcaaataaacaaaagggagagagaaccgtatgttaatcgcaacatggatcgtgacctttgtcattatcgtggggatcggtgtctggtccggcaccaagatcaaaagtgccaaccagtggtcgggcggtgacaagaccatgggccccctgactctgggctgtgtctttgccgcctggcagattggcggcatggccgtggtaggggcggctcagaacggctacaccctgggcatctccggggcctggtactccatcgccggctccttctacttcatcgcgctggccctgttcgccaagctgatccgcaacaacatgcccggcgactcggtgcccatctatctgcaaaagcgcttcgacaccaagaccagccgcctgtactcctacgcctggatcgtctacggcttcctgtacatcccctatcagctcaagaccgtggcttccatcatccagatcgccatccccggtctgaacatcacgctggccatgctcatcggcctgaccatcgccgtgatctacaccagcttctccggcatgcggggcatgtccgctgtggggcgcatcgtatgcttcggcatctacatcctgctcattgccttcgtgctcatgacgctgcccaagttcggcggcttcaccgtgatgctctctgaacttcccgcagagtactcctccatgggcaatatgcccacccagcgcatcatcgcctggatcctgggcggctgcctgtccaccgcagtgatgcagtccgtgctccagcccctgctggccgcaaagagcgcttccgccgcccgcaccggctctatcctgggctatgtgctggctgcccccatctgcctgctcaccgccacctgcggcatctttgccaaggcgtccggtgcggacctgggcgacggtgccaccgcatttgcctactccatcaagaccttcagcaatccggctttcgctgggatcatttttgcctttgccaccatgatcatcgcggctaccatggccaccatgatgctggccacaggcaccatcattaccaatgtctataaaaacgacatcaatcccaacgtggacgacgccaagctgctgaagctgtccaagatcatcactttcgtctttgcctacctgactctgatccctgcggtcatcatgcccagcgccgccctcaccaacctgttcctcaccctgcagcacgtggccgccgccccggtgagcttcgccatcctggtgggcctgacctggaagcgctgcacccggcagggggccttctgggccatggccagcggcatggtggtaggtgtggcctggatgctgctgggcctgaccgacacactggaggcggtctaccccacagtgctggtcagctatacagtgggtgttgtggtatctctggcgaccagtaaaaagacgcatggtttggcgaaggaataatggaatccgaacaagactcgatgaaaacactgtccggcgcggccgggaagggaagcggatcaagtatgagtgaagcaaagaagcagcagtacatgtggccctcgcggtggagcaagccctccgcccacggggactgcggagcggtcagctgcaacaatatctatgccacccgggcggggttggagatgctgcgggccggagggaacgcctttgacgccgccgtggcggtctctctgaccctctctgtggtggagccccaccactccggcatcgggggcggctgtttcagcctgctgtactcccagcgggatcagaaggtcttggcgctggacgcccggggcgtggctcccgccaaggcgggggaggacctgttcctcaaggatggagaggtccaggacgagtggaaggacctggggggccagtcggtagccattccggggctgctgagagccatggaaaccatgctgcgggagtacggcactatgacgctggcgcaggcggcggctcccgccatccgctgtgcccgggagggcttcggcaccagttataccggagagctcaccatggaggacgactcggtccggcggaagctggatctttcaccccagttccggcggctgtatctgaagccggacgggagccgctaccgcttcggtgagaagcaggtgaactctgagctggccggcctgctggagctggtggcggcggagggggcggacgctttttacaccgggccggtggcccggaaaatggtggagcagatcaaccagcggggcgggtgctttaccctggaggacctgagccgatatcagcccaagtaccgtaccccggtgaagaccacctaccgggggctggaggtggcggccttcgcgccgcccagcggcggatgcgccgtggtggagatgctgaacattctggagcacagcgatctggccgccatgggacacaacaccgccgcctccatccatgccatcgcggaggccatgaagctgggctttgcggaccgaagcgtggctctgggcgatcccgacttcgtccaggtggacgtggagcggctgaccagcaaggcccacgcggcggagcggtatgccctctcctcaccggagacggcgggggaatacgctccggcggaggggatcgaggccaaggagtacccaggaaacacctctcactttgcagtgatggaccgctttgggaacgcggtctcccagacccagactgtacgggactggttcggctgcgggatcgtggtggacggctgcggctttgtgctcaacaacgccatgtccgacttcagcgccaagccgggcgcactcaccagccagggactgacctatgggagcgccaacagcatccagggggggaagacgcctctgtcctccatggcccccagcatggtgttcaaggacggacggccctatctggccatcggcgcggcgggcggtccccggatcatcaccggaaccctccaggggatcgtcaatgcggtggactttgggatgctgccggagcagctggtccgccagccctacctcaactgcctgacccgggagcaggggctggagctggagttcgggatctcagaggacaccatccggcttctggaacagaaggggcaccggccggtgcgggtcccggtggaccaggccatgagcaccatgctcaacagcgtcatgtatgtggacggggagtaccacgctgccggcacccagcgggtggacggctgcggcggagcccttctctctgacgggcatatggtgctggacgggatcagtcaggaggattgagcggcctgcctgaagcatcaaaaagcgaaaagagaaaaatggtcagcagaatttctgctgaccattttttgatattgggaaccaataaagagaagggacggtgcgtaccggggccagaacctggcacaggggactcactgtgcagagggctctccgatctggacatggggcagggccagacagggattttgcagcgtagtccacacctcgcggtcctctaccacgcagagggtggtggaaacggtggtggcggggacgccctcgtggggatgacggcagatacagttcggctcgttggtgtggtctgacataatgcggtagagatcctggaaccggagggagccgtagcgctcttccaccatctgggcaatgcggtcatagcgcttgtgagtggaggggtagttctcctccgggggattgaaatggctgagctggtcactgaccacgtggttggtgcggaagaggacccccctgccctcatccttttccacatagatctcgtcggaggtcatctcgatgacataggcctctgtggggtcggcggcaatgacgttcaggccgttcatacggggggcggtgcggcagaactccaccgcttgggcggcggtcctgcaggaggagaggaggacccgcacattgaggaagatatcggcctcctctacccggtcgatgcgggtggggtccttctctgtccagaagccggtggtggtcacagccagaccatggctgttgatgcctacagcgggataggtgaggataccggccccgcccacctcgatgatctcctggccgtcggggtagatgtggcggaccagagcctgctccatgggcatgcccatgtcccggttcttgatgatgtaggtgcatccgtcagcggcagcctgtccccggacacagagcatgctgcattcctgcgtgatgtgacggaaggactcacagaggaaataggcggggatgttcagcagcaggatgtcgtcaaggggcagaccgctgccttgggcgatgccctggagctcctcgtacatctcaggccgctgctcctggaagaaacggaggttttggttcacaaaggcctgataggcctggaggtccaccttctcctgctccagcttccggtggacggaagccaggttgcggcggatggcatcagagagctcctgcccctgctggacgccctgctcgaagggcgtgccgctcacttggcaataggcgtgctgatattgggaattcatacagaaatacctccttaagactgagactgtccgcacagcaggcagctgcagatatgtccgttctgcgtgatgtccctggcttccgggacggcagaggcacactctgccatggcggcaaagcatctggggtggaaggggcagccgctggggacggcgatggggctgggcaggtcgccctgaaggatgatacccgacgaccaccccgcccgcccagccgccgacccccccccgccccacgcaccccccccccccccccccaaaataaccccaaaacccagtcggcggcccgggtaatttttataaatcccactgtaacggggggggggggggggcccaaagagctcctgcttctccgcatattccaccactttgcccaggtacatgaccgccacatgggtggagatgtgctgtaccacacgcagatcatgggagacgaagaccagcgcgatgcccagcttctgctgcaggtgcatgagcaggttgatgatctgggcctggatcgacacatccagggcggagacgcactcgtcacagacgatcagcttgggactgacggacagggcgcgggcaatacaaagccgctggcgctggcctccggaaaactcatgggggaatttccgcatgctgtcctgggacagtcccaccagatcaagcagctcctccgcgcgcttcatggcggcctcccggctgcccagcttgtggatcagaaaaggctcagcgaggatatcggagacccgctggcggggattgagggaggcatagggatcttgaaagatgatctggatatcccggcgcatccggcgcaggctctccttgtcggcactggtcagatcctgaccctgaaaaaggaccgtgccctcggtgggctcgatgagccgcatcatggtgcgggccagggtagatttcccgcagccggactccccaacgatgcccagggtctccccctcccgaatgaccagggagacgtcgtctacggctttgacgtactgggcggccttggagaagacccctttgcgtaccggaaaccattttttcaggtggtcggcctggagcaggatcgggcgttcagacatgatcgctccccccttcctcgtcccactggggcgtatatttccagcactggacggtgtgttccccatccagggtcaggaggggaggctgtttctgggtgcagatcttccggcagcaggcacagcggttgtgaaaggcacagccctccggcatgtaatagatactggggaccgacccttcgatggtggccaggtccccctggctgtcatccatgtgcgggatggagcggagcagtccctccgtataggggtgaagagggtgctggaagatggtgcgcacatcagctttttccacgatgtggccgcagtacatcactgccacagtatccaccatagaggccacgacgcccaggtcgtgggtgataagaatgatggaggtgcccagcttttcgtttatggaccggagcaggtccaggatctgggcctggatagtcacatccagggcggtggtgggctcatccgcgatgagcagctccgggtcgcacagaagagcgatggcgatcatgacgcgctggcgcatgccgccggacagctcaaagggatattgcttcagtcgggtctccgggctggggatgcccacggtgcgcagcatctcgatagacatctcgttggcctgggcttgggagaccttcttgtggaggcggaccacctctccaagctggtctccaatgggaaacagggggtccaggctgaccatgggctcctgaaagatcatggagatctggttgccccggaccctgcacatctggcgctcggtcttggtgagcagctcttccccgttgaggcggatgctcccggtgatctgagcgggcggggtgggcagcaggcgtatgatgctcttggaagtgacacttttgcccgagccggactcccccaccagacccagtttctccccttttttcaaggagaagctgacgtggttcaccgcagcggcggagccgtatttggtcttgaatctgacgctgagatcttgtacgcaaagcataggttcattctgcataactgagctccccccttatacatccagtttgggatccaggtaatcccgcagccagtcgcccagcagattgacgcccagcacggtcagcgtgatgcacagaccggggaagatacactgccaggggtcggtgagaatgttgtcacgggcttcgctgagcatccgcccccaggtggggatggtgatagggacaccgtagcccaggaagctgagggaggcctcgatcagtacgatcttggccatctccagggtggcgataacgatgacagggctgatgatattgggcaggatatgtttgaaaatgatgcgggcatcggtgccgccggcagcgcgtatggcctcaatatactccatctccttgatgcccagaatctcgccgcggaccaggcgggcgtatcgcacccaactggtgatgccggcgatcaaaatgacattgcccaggctggagcccagcactgccgcgataaacagggccagcagcgtgaaggggaagcagagctggatgtccaccaggcgcatgatgaccgcgtccacccatttgccgtagtagccggccaggctgcccaggaccacgcccacgatgccgcctaccacggtgccggccagagctacgatcagggtgacgcgggcgccgtacagcagacgggagagaatgtcgcggcccagctggtcagtgcccagcagatggccggccacagggtcagcgccccagatggggtccttcagcttgatcatgacgtcctgagccagcgggtcataaggcgccaggagcggggcaaagatggcacagatgatgatgagcagcaccaggatcagcccaaacatgccggtcttgctgttcttcaggctggaccaggcgcttttaaatccttttttcactgatcctacctcctcattgcagccggacgcggggattgatcacgcaatacagcacgtccacgatgaagttgatcaccacgaagatcaccgccatcagaaagacgatgcactccaccaccgcaaagtcgctggtggtgatgctctggatgaccagacgtcccacgcccggccaggcgaagacctgctcggtgatgaccgagccgcccagcagagaggcgaactgcatgcccaggatggtgatgatggagctcatcgcgtttttcagggcatgcttgccgatgatcttgcttttgggaagacccttggcctttgccacatcgatatactccttgcccagcacctcgatgaggttgctgcgcaggagccggcagatggtggccgctgagaagacccccagcgtgaaggcgggcaggatcagggaacgcaggccatcctctgcgccgccagtgggcatccagcccagcttcacagcaaagagcatgatgagcatgatgcccagccagaaggcgggcatgcattggcccagcagggccagcacccggatcacggcatcggagacgctgttgcgcttcacagccgccacaatgcctgccgggatgcccagtaccacggagatgagcagggccgcacaggccagcgtcagggtggcaggcgcccgctccagcaccacggacatggccggttcattgtagtagtaggaggtgccgaaatcccccaccagcgcccccttcagaaagcggacatattggacgggcagggggtcattgaagcccatctcttcactgaggatctccatttcctctttggaggtggtgggggagaccatcagctccaccgggttcccggtgaggtgcaggataaaaaatacgactacggtaatgcccaagattgcgatgatggactgcccgagccgcttgagtaagtatttccccatgcttttcaacctttcatagcgagccaggatagtgagaaacggcgcacccgttccagatcacgggtgcgccgcctgtttctctgccattgaaataccgcaccagctgcggatattcagttaagggagcaaatcgctcagccggccacggagacgccgtccatgaggacgacttcgtcggtgcgggcagtccaattctggaccttcttggagttgtaggcatacagggtgtcctgctgatacagccacagggcgggggcctcgtccaccatcatctgctgcatctggctgtaaagcgccacgcgcttctcagcgtccatctcagaggcggcctgggaggccagatccataaactcgggggagacccaggtgcagtaccgggcaccctcggtaaagccaatggaggcgatcaggttgatatcgcagtaggggccgcccagaccctggaggaacaggggggccacagtgcccgcgccgatctcgtcccgctgcgtggcggagtcctcctgcttgatggtgacgttgatgccgatctgagccagctgggaggcgatggcctggaccacgtcggtgctgttgagcaggccgggagagacggagcactcgatgtcaaagccgtcggcatagccggcgtcggccatcagctgcttggccttctccacgtcgtaggtgtagccctgcacattgggatcatagccctcgtactcgggggtggagatggaggcgaccttgacggcgtagccgtccagcacgccggcgatcaacgcgtcccggtccaccgcatagttgatggcctgacgcacccgcacatcgtccaggggggtggggccgcctaccaggttgaactgcagccagaccacacgggtggagggctggcccaccacagagatgccgtcaaggctctccagatactcggcctgggtggtggggatattgcagatgatgtccacctcgccggcctgaagagcggctacccggtcggcggcctcggggatgacccggaagaccagctgatcgatctggggcacctcgccatagtagtcgggattcttctccagcaccaccttctggtccttctcccaggagacgaacttgaaggggccggagccgatgggggcggcggcaaagccctcgtctcccacttcctccacataggcactggggacgatcttgatatagttcaagcgcagggggagagaggggaaagcgtagtcagtgatgatgttgaactcgaagtcgcccagtacctccacctgcatgaaggagaaatcgccggacagagcgtagtgcttctccgagtcacgcaggctgttgatggtgtaggccacatcgtcagcagtcatctgggtgccgttggtaaagtacacgtcctgccgcagagtgaagtgccaggtagtgtcatccacctgctcatagctctcagcagcgtcgcacacgatctgcccctgggggtccgtcttgaccagggtgctgtaaagggaggccagaatgctggcggtgatggtggagttgccgtttctggggtccaggccggtgatgtcgctggtgctggcccatgtcaccgtcttaacagtttccccgctgctttgcgcgggctggctggtgctgttggagccggtttcagtgccgcagccgctgaacagccccatacagagcgccagtgcaagggcaagagagagtgcttttttcatgttggcgttcctccttttttagtggggtaagcatattcagaccaccctcggtgcgaggggagatcccataagagaagatcagcgcttgttccgctcgaagtaagggttcaaaagatccaggcgcttggtggcggtctcgtccatctggtctgcgaccagagagacaagaagctccagaagaaaagtggcggatacattggagttgaaaaagctgacgctgtatatgtccgccaacagcagcacatcagtaaaatcggagaagggagtggagggcttatcagtgagcaggatgattttcgccccgcggctgtgggcaagatcgatccagcgccggacttcctcaccatagggattgaaattgatgacgaacaggcagtcctctggggagatgtccagcagctgttcaaaggtgacgctccctgtggccgatacgacaccggggacaaccatgcgcatcaaaaagctgaatttctcagcaataggtgcggtgggccggcgcccggcaatatatttgatgcggcaggagcaaagcagatccgccgccgcatggatggattcttcggagtttttttccaaaacgctctgtaggttcttgtaggtaagggtggaaaactgtgctacgatattctccttggcatccaggctctgatgggtatgaagacgctcaatgggagggaagaagccacgctgtgcataatccgctttctgagagacaaaggattgtatctccttctgaaggtccagaaaggagcggtagcccagcactttgctggtacgggagaccgtggcgtcgctgacgcccaagatgcgggccagttcactggtggacacatagcatacggagagaaaattgttcaggatgtattccgccaccaaggcttcctttgcggtaagaggagtggacttgatccgctgggaaaaggcggcgggaagctccatgtcgaaataccatccttttttgcagtttctttggttagacctatgataacatgaaatgttgaaaagtcaatacttcaaatcgaaaatatcgaatactcgatattttgacgattgagtaaacggagggaacatctgaacaaggagagagatgaaggggggtggacagcacaacaggcaagagaatagagaagggtgccgcagaaattgaatgttttgaccaaaaataaacccagaagaaaggcgaaaaaaagaaaagagagggaaaaggttatgcgttcttacatggaaggaaaaaagtacagagaaaacaaaggagaaagtgcaataatggagaaaatgaaaaaatatattaaatttgcaaggggaaaaatatttttttcattttatgaagaaaaaacggagacgtcccggaaattctgccgggatgtctccgcttgataaaataagagcttgaataggactgttttacagttccgtcacatggaggtcgctgaagaaactgcggcccatagacagagcacccaggcccaccattccgctgctgagcgtggagcagaagaacggcgccgtggacagggggaactactccgcctttcggtccacccaggtggccttgaatttggagtagatgatcttctgctcgctgtaaaggccgtagtacccggagagcatgtaggagatggcacagcacagggcgtaaagaggcaggccccggctggtaaatagttcataggccaggaggatggaggtgatggggcagttggtagcgccgcagaataccgccgtcatcccaagcgccccgccgaaggactgggacaggcccagcagcggtccgaccaccgtgccaaaggcggcaccagtgaagagcactggcacgatctcgccaccgcggaagccggcccccagagtgagggcggtaaagaccagcttgagcaggaacgcctccgagatggtctcgcccgccagcatccggcggatgacagcatcccctgcgccgttgtaggtctgttcccccaccagcagggtcagtagcagtaccagggcgccgccaacagccgcccggaccaggggattggggaagtatttggcatagagcttgggggccgcatgcatcactttgcagaacaggatggagagcagagcgcacagcacccccatcacgcacacctgggccatggaccagggacccaggacagccacatttccgatgagatagcctgttcctatatgaaggccgaagaagcgggccagctggaccgagaccaaagaggagacgacacaggggacgatggcggcgtagtacatcactcccacgcttaccacctccatggcgaagatggcggcggtgatgggggtgccgaacagcccggagaaggcggcggacatgccgcacatgaccatgatcctgcggtccttctcatccaggtggatctttctgcccacccaggccccgatggagccccccagctggagggcggccccctcccggccagccgacccgcctaccaggtgggtcaggatggtggacaggaagatgaggggggcggtgcgcagacggatgggctcggcctcccggaccgccgtcagcaccagattggtgccccggtcccgctccatcccgctccagcggtagagcaggacgatgaccacgcctcccaggggaaggaaaagaatgacccagggctggtgcgcccggaactgagccgcccagtcgattccgtaatgaaacgccaccgcaacagcgcccacgatgagcccgatgttgcaggcgtacaggacccatttgagaaaggtcagcgcctcgtcgatgtggccccgtatccggggggaaaatgcgggcatgggatcggcctcccctcagaccggccctgggggccggctctgatcattctgcctctatcataccataagatagcaggattgccacccttttttcatgattctgactttcgctctctgttccgggagaccaagacagagagggacggccaccgggcgccgccccggtttccttgacttttgttccggaaaccgctatactataacaatatataatataaaaggggagatatagatgcgaccaaaagatcccggcaaaactgcccggatgcggcgtgagctgcgggaagagctgaaggggaaaaaaacggtggtcaccatctacatcattcttcgagtcttggtcatcctgaccatggtggcccaatttctcaacgggaactttgaaaacgtgttcctgtgcatcctgacgctggtactgttcaccctgcccaccgtcatcgagcggcgggtccgcatcgatctgcccgacacgctggagatcatcatcctgctcttcatcttctctgcggagatcctgggagagatccaggcttactacacctatttccatggctgggacaccatgctccatacgctcaacggcttcctctgcgcggccatcggcttctcactggtggacctgttcaaccgcaacgagcggttttccctgtccctctccccggtgttcatggccatcgtggccttctgcttctccatgaccatcggtgttttgtgggaattttttgagtgtatcatggacagctttttcctgctggacatgcagaaggacaccattgtccacgacattagcaccgtcatgctggaccccaccggcggcaacaagatcaccgccatccggggcatcacagacgtgatcgtggtggcaggcggggaggagatccctctggggctgggcggctatctggacataggtctgctggataccatgaaggatctgttcgtcaatttcatcggcgcctttgtattctccatcattgggtatttttatgtgaaaaaccgtggccggggcaggtttgcccgccgtttcatccccaaggtgctgcctgaagagccggtgcaggccgatgaagaagattccggcccggaccacacataaaactgccgcggcagcttatactaggaccgtccacaaaaggaggtctttcagatggataacaaaaagagctgcaattccaatattcagtgtactgtcaacagctgcgcctatcacaatccccagaactactgctccctgagccagatcaaggtgggctgcaccgacgcctccccctgcaattgtcgggagaccgagtgtgcctcctttgagctgaaataagggagaagcaaaagaccggccccggacatctgatgatgtccggggccggtcttttgcttgccttacggatcaggacaggtgcagcccgtagaagccaaccagggccagggccatcaggccggcagttaccatctcgatggccgggccgcggaagggccgggggcagctggtgaggctgatctcctcccgcaggccggcgtagctcatcaggaccaccaggacgcccaggccgccgcacagggcgaaggtgagggcctgggacagggtgtagctgcgctgggcggccagataggccgcacccagcaccgcacagttggtggataccgaggccaggtcggcgtcgattcgatgggagagctccggccagagacgggctgcctttcgcagcaggaagacagtgaggagggcaatgagggagaagaccagggtgcgcagatacacccacccaaaatgccggagcaccagaaagtccgcacaccaggtaaaaaatacggtgaccaccatggccagggtcaggctcaggccggtgcggcgggcagctgtggtgctgtggaaggcctccacccgggtgccgatgcccaggcagttgaccaggatgaaattttcagacagcagggcggccagtgccacccctgccagttgtacggaatccatccgatccgctcctttctttcccgctacacgtcgctgtccacatattggacggagccgtcggtctccaggttggccacgatggccagagcctggttgaccccggccgtgatggcttcagaggttgcggtggccccggtcaccacatccaccgagttggcaccagaggtccggatggtgcctgacatgcccacatactttcgcagctgggcattctccatggccatggtccccatccctgtggactcactgtggtccgtcaccgccacaccggtgacctggccgttcaggtccacgcccaccaccatggtgatggggccgctgaagccatgggtctggacctccacacagtaccccagcagctcattttcccggtaccccgccgtgatgctcagggcatttggggcgcggtaaggggtctcagtgctgatctcagcccccggcatcacctgggccagcagggcctcctccgcccgcagctcagagcgctgggtgtccaggctggtgagccagtaggtggagtagatccccagaccggtgaccatcaccaccgccagcaggatgccggcggccttggcctggggccggagctggtccagatagcgctcgccgggcatggtcccccaggacagggaggaggggcggcccggattgacaaatttgatctcagacaggctctcccctgcggcgcggagcccctcccgcacggcggtgaagcgctccaccccgaaccggcggggcatccccgcccggtccatgagccacaccaggcagttcatggtcaggatagcccagcccaccccgtcggggtaggagccatagtaccggagcagtacggtgaggaggccgcagcccaccccgtatagtacctgtccccggggggtgacaggggaggtggtgtagtcggtcgccataaagaaagccccaagcacaagcccgccgctgcatagctgggccgtcatccattccagggaggtgccatcccgggggaagaggaaggtgaggacggccacggtccccagaaaggccgccgggatgcgtggggagatgaccctgcgcatgatcaggtacaggccgcccagcagcagcataaagatagatacctccccgatggatccgccgtgctggcccagcagcatctgccccatgtccagctcgggcagtctgccgctgtgcagggcggccatgggggtgggggaggtgacggcgtccatctcaccccaaacggggagatagtccagcgcgtccacccaggtggtcatcaagaaggggaaggtggacagcagcatccgcccagccagagccgggttcatgaagtttttgcccagcccgccgtagaactgtttcaccaccacgatggcaaagacaccccccagcagggggacccagtagggggaggccgccggcagacacatggccagcagcaggccggtgacacaggcagagcaatcccgcagagtgttggactggtgggtcagccgccggtagagatactccgacaggacgcaggcgcccaccgagatcagggtgagagccagcactctgggaccgaagagatagacggacatgcccagggcggggatcagggccacgatcacatccagcatgatggaggtagtgctggtggcctgtgccagctgaggcgggacagaggtgcggagatcagccatggaggtccccccctttctccagttcccgcacctgaccagccgcctggcgcaccaggtcggccagagggatatgggccggacagatataggtgcagcatccgcagtccatgcagtcctgcggatggagggagcgcaggcgctccgccgcgttttccttcagggcccggaccacaaagatgggggagaggtgcatggggcagacggagacgcattgcccacaccgaatacagacggtgggagcctgttcccggggctgctcccagggggccagacacagaaggccgttggtgttgggcagtaccggggcctccaggctcttctgggtcacccctgtcatggggccgcccaccaggatcaggcccggctcctcccggaagccgccggcggaggagaccagctccttcagcggcgtgcccagggggacccacaggttgcggggccgggctaccgcgccccccgtcaccgtcacggcccggtgggtcagggggaggcctttgttcagtgcctcgcccaccgcaaaggctgccgagacgttgaagaccacacagcgtacgtcctccgcccggcctcccggcgggacctcccggcgggtgaccgactggacgatctgtttctccgcccccatggggtagcgggtgcggatggtcttcagctccacccggctccgcttgcggctgatgcggcgctccagcgcctccacggcggtgagcatgtcgctctccgccgccagcaccacccggtccacacccagcaccttggcaagagcgcgggtccccttcagaatgggctccccccgctcctggagcaggcgcaggtcggcagtgatatagggctcacactcagcggcgttgacgatcagggtgtccacccggccccgggcccggaggatcttcacctgggcggggaggggatcactgcccatatccacgatgccggcggcttctatccggaccatcagctcctcctgggacgcctggctgagcttgatgccctcaggccgctctggccagggcgtattgtccccatcgttggcgatgacgatggcgggggcgcggccgccccaggggtggggcagctcccggatggcctccacccgtccggagacgctggcgtggagcaccgccccgtcctcgccctccggacgggcgataggctgtcccgcatacacccgttccccagctttgaccagggggagggaggagggacctccgtgaaaagccagaggcagggccacctgggccggggggtgctccagcagcatcagcggcttgcgccgggtattttcttttcgggaagcggggtgtatcccgccgaacatggaactggccatggattacctccctgcacaggggcgcggccctctgtgccgatggatgggcgcccgagggcgcgtacatagtgacaatatcatactcgtgtcccgggaaaatgtccagtagatccgggaaaattcacattttgctcaaaaaatgacgaaccgtgcccgcggttttgtcgaaagagagcggcgcccggccaggcgccgctctcatatccatttatcggctgcgctgtgcccacattccggcggacatcagctctgcgcctccgtctccagggcggctggccgtccctccaggatggagcggtaaaacagggcctccgccgccgtgcgatagggggtcagccacagggtgaggggcagattgatcaggagggccagaccagtggccgggatgagactggacaggacggagtagaactgcgcgaccgagttgacctgggccaggataccggggaggaagggcagataggccagcagggtgagcaggacgcccagcagttcccagcccaggaaggaaacatacagcttgaacagctcccacttgcgcccccgcatcatctccacgctgcggcggaccgcagcccctgcgccgtcgtccgggtagtcggccagcaggtagggggccatggcatagcggagcatgatggcaaagactgccgcatagattcctgccatcaccagcagttgcagaaacagggaatcaaggacaaaaaaagccaggatggtggtcacaaagatcagaagcagggaccacaggaaggtgaacagcaggatcagcaggttcatggcaatgacccgccctgcgatgccgaaaccctccagcagcgtcccataccccgcctgctggctgcgggtgacgcggagggcccacaggcgatagccaaagtccatcacccacagatagagggtcagcaggatggagataaacaagctgagccatcccacagttccgccccaaagcaggtccgcaggctggaaggtgggggcgagccagcctaccacagtgctcaatccttcggtcagcagcagatacaccagggtgaccagccagaacacgggggccgccgcacggatggcctgcttggcctgcgccttcaggccttttcggtcgatcttcatatacgctcctctctcctgcccggtggcagatcaagcatcccatttctccatgatggccttcagctggtcggccagccgtcccaggtccttgttggcccggccgcggctgcggcccaccatatcctggagctgtttggtcacgtccaccaggcggacataggccgccgaaggggcggaggcgccgccagtggtccgcttgctctccagcaccacgcccttggccagcatccggtccgcagccaggtcgtagacctcctggtacagaggtgcgtgggcggggatgccccgctggttcaggtcctcagcaaacagctcggtgaccggcgcgtctccgtggaccacaaagacctgccggggcgccggcgcgatgcggcccacccactccagcaggtgatcccggtccgcgtgggagctgagccccttgaagttgacgatacgggcccggacggcgatctcctcgccgaacagcttcaccgtcttggcgccctccagcaggcggcggcccagggagccctccgcctgatagcccacgaagaccaccgcgcactccggccgccacaggttatgcttcaggtggtgacggatgcggccggcgtcgcacatgccggaggcggagatgatgatcttgggggacgggtccatattcagtgccttggactcctccgtggactgggtcaggatcaggccggggaaggtgaacaggtcatctcccccctggagcaccgcaatggcctcctcgtccagatagccgtggaggtcgccggagtacacccgggtggcctccgcagccagcgggctgtccacgcacacggtgaagttgggggcgctcttcaccagcccacggtccttgatctcccggaggaagtagagcagctcctgggtgcggcccaccgcgaaggaggggatcacgatgttcccacccttggcgaacacctcgtcgatgagctgggccagagactcggtgtagctctccggcggctcatggttccggtcgccataggtggactccataaccacatagtccgcatcctccacaaaggaagggtcacggatgatgggctggtcgatgttgcccaggtcgccggagaagacgatcttccgctccacatccccctcggtgagccacagctccacctcagaggagcccagcaggtgacccgcatcggtgaagcggacccggaccccctcgcacagatccagcacctggccgtactccacgggatagagctgctggaggacggcctccgcgtcagccacagtgtagagaggctccactgcgtcacggccggcccgcttgcccttctggttctgccactgggcgtcgctctcctggatatgggccgagtcccgcagcatgatggacaggagctgggcggtgagacgggtggtgatgatctgcccctggaacccctccttgaccagcagtggcagccggccggagtggtcgatgtgggcgtgggtgaccaggcagtaatcgatctggccgggggcgaagtccagggcgttgtcgtcatgctcgtcccggccctgctgcaagccgcagtcgatgaggatcttcctgccgttggcttccagacagtggcagctccccgtgacagcgtgggccgcgccgaagaaactcagcttcataccagtgtcctcctttttatatgccgatttttcagttttattgtacaccttttttgtcgaaagttccagtacaatctctcgccgccctcaaatcaggccgaaatggaccagcgcctggaccacgccgtcctcgtctgccgttccggtgacccagtccacctgccgcttcatctccttgtgggcgctccccatggccaccccgatgcccgcgtggagcagcatggacaggtcgttttccccgtctccgaaagccatagcgtcctccaccgggatgcggaagtagtccagaagcgcgtccatcccccggtccttgcccccgctgggcgggatcacgtccaggaaattggggtgccaccgggtagtcttcaggtgaggggcccggtccagcagcagatgctcccgctcccgggtcaggaaggtcaccgcctgatagacctcccggccccgggcgtagtccgcagggcgctggagcggcatagggatggacagatcccggatgaactgccgggtcatctcgttgatgcagttgatatagatctcctctccctccaggaagatgcaggagaaggcgtcggtccgggcggcggccaccagctcctccaccgcctcagggggcatgggagtgctccgcagcacctgtccctgggccgtgcagtactggccgctgagggtcacatagccgtcgaagtcaaagacctgtcgcaccggatccagcatggcgaggtgccgcccagtggacaggaacagcttgatcccccgctcccgcagggcctggagggcctggcggacggctggggagatctgatgggtcttgaagctgaccagcgtgccgtctacatcgaaaaagatcgcctttgtcatgggtgaagttcctttctctctgatctgcccgcccggggcggaaaaaacaggaccgccgcaggcaaggccgcggcagtcctgaagcgcgtctctattcgcaggcggcagcagcgggcgcctgcttttccaccagggcccactccacccggcggtcgcacagctcctccacccggatgcgcaggcccagggcctccaccacggggcggctcccgtcctccgggatgaccgccagctgggcaaagaccagcccgcccagggtgtcatagtcccggtcctcgtcctcgggcagctggaagtccatggcctcggccagctcctccaggtcagcggagccggagacccgccacaggttctcctccagctggatgatctcctgctcggcctgggggtcaaactcgtcatagatgttgcccaccagctcctccagcaggtcctccagggtcaccagtccgctggtcccgccatactcatccaccaccacggccatgtggatctttttgctctgcatgtcacggaagagcacgtcagcccgcaccgtctccggcacgaagtaggccgggcgcagcagcgcccgcagctcctggggacgttccacatggaagttgagcagatattggcgggtggagaggatgcccacgatgtcgtccacgtttccctgatagaccgggaagcgggacagaccggactcccgaatggcggagagaatggtctcctcatcgtcatccagggagagggtcaccatgtcggtgcggtggatcatcacatcctccgctgtggtgttgttgaactcgaagacgttctcgatcagttccttctcgttgcgctcgatggcgccggactcctcgccctcctccaccatggccatgatctcgtcctccgagacctcctcccccctgcgaagcagcctcagcagagggcggtagaacaacaggatcaggttgccggccaggctgacaaaaaacaggatgggccatatatggtccgatgacacggaaattcctccttaatacccggggaataaaatataaactatcataccacgatttgccccgccccgcaaggggacaaaacagaggtcttgcctgtctttggacacttttccgttgaaaaatcggcttgtgcccgatataatgataaaaagacaccggtcgtcccgaccggaaaggagcgaatgaacatgatcaaattcaaccacttcaatttcaacgtcctggatctggacaagagcctggccttctacaaggaggcactgggcctggagccggtgcgggagaaggaggcctccgacggctcgttcaaattggtctacctgggggacggcctgacggagttccagctggagctgacctggctgaaggaccgggacaagccctacgacctgggagagtgcgagttccacctggctttcgtcaccgaccagtacgacgacttttatgctaagcacaaggagatgggctgcgtctgctttgaaaacccgggcatgggcatctacttcattgccgacccggacggctattggatcgagatcgtgccggagaagaaataaatggcccggggagagcgaaacgccggctggtctggctttttcctgaccttcaccgtctttgccgccatcctgctgctcctggcccgagagggccagggggaggcggtctccgccggggcgcggcaggtgctcgtcatctacgagggactcacctgctgggcggtgccggccctgttcatgtcctgggggatggctgccctggaggaggggaagccatccctcaccggggcgctggcggggctggtcctgccggccttctgcctgctgctcttctggggtgcggcgtacgccctggcggcccacctgctgggcggcggggcggtgagctggtccggcatcctgggtgccctgcggtccgccgccctgggggatgtctatttccacctgcgggtcctctacccgctgctcggcctgtatctggtacacccggtgctgcgccggttcaccgccgcggccagccggggggaggtgctgtattttctcctcctgtgcttcctctttgccagcctgctgccggcctggacggccttccacccggagggggtggtgggtgccctgctggagaggctccaggtccatctggtgctggggtatgcgggctattatgtggcggggtggtatctgcgccactataccatcgggcgggtgccggagttcctgctctacctgctgggcatcctggggctggtcctgactctgggtggcgacgcgctgctgggcggcgggcgggagctgtggtacagcgacaccgcccctggggtggccctgacggcggcggcgctgtgcgctctgttccgctatgtgctggggatcagtgaggagcggtcccgccgccgggcggtccatgccctgggcagctatgtcttcggcgcctatctgatccaccagctgtggatgctgcttttccggtggctggggctgacggtcaccgccttggagccggtgttctttgttcccctgctggccctggtgctgctggccctgtccctgcccatggcctggctcctgcggctgatcccaggggccggaaaatggctgacctgagacgacaaaagggggccggcgcatggcgcgccggcccccttttcaaatggagtggttctaaatttttcaagtcactcagctgggccggagagcggaggcgatctgctgggcgacctgataaatggtccgttcttcccgcatgagacacttgatgtcctggagaaagagcggcaggcgggagatctggatgccccggtccagaacggagatgacccggacgtcctcttcgatcagcttcttgatgaaggcccgcatctcaaatttacaccagcgggaatccagaaagtgctctgtgatccagaagagcacgatgctggactgctggatgccctcctggaccttgtcggtgatggaatcgccaagggcaatgctgtatttgtcgaaccagacgggcagatccatcccattgagcagcgggatgatctcttcgatctccggcttatccagagaggagtggctgagaaagaccatctgttcccgtccaaagggagtcatacggtagcctttctcctccaggacccggatctccgggaagaaaaagaggtgctccatgatggtgggaacactgtcctcatccagcagagaggcagagttgaagcgccggtccgccatggcccgcatgatattcagcgcggtcaggtccttccgctgccgcagtccagcgtcctccagaagacggaacatccggtccagatgctcctccttggggcggtcgtagctcactgcgatgaaaaattccagattgtaagggttgttgttgacgaacagggagagcatctggagcgaggaggcgtcctgttcccgcagcagctgctggaacaccgggatcaggtgggaacggcggccgtactccccctcccagatatagtcacggtccatgggtcatgcctcctgcctgcgctggtaggtcacataccggaagcgtactccgttctcctccaggagttctgactcctccaccgactcccagcgagggtcggcatccaggtccgggaagtaccggtctgcggggtactgggccaggatcttagtgacataggcggtgccgcaccggtccaaaagggcgcggtagacggactccccgccgatgacaaaggcatccgccggagcggcggcgaggagggcgtccagggagggatagacctcaccgccctccggggcgaagcccggcgtggtggacaggatcaggttgcgccgtcccttcagggggcgtccgccgggaaaggtagagagggtcctgcggcccagaatgaccgcgtggcccagggtcagggccttgaagcgcttcaggtcctgggagagatagagaagctgctctccgtccttcccgatggcccagttctggtccactgccacaatgagatccatactgtgcgcctcctcttagaccgccaccgggatcgttcccggcacagggtgggcctgatacccctccaggcgcacgctgtccggggtgaaggcgtagaaatcggtgacagcggggtccagggagaatcggggggcgtcatagggctggcgagtgatgatctcccgcaccgcgtccacgtggcggtcgtagatatgggcgtcggcgatgacgtggaccagttcgccggcctccagcccggagacctgggcgaccatgtggagcagaacggcgtactgcatcacgttccagccgttggcggtgagcatgtcctggctgcgctggttcaaaatgccgttcagggtgttcccgctgacgttgaaggtcatggaataggcacaggggtagagggccatctcgctcaggtcgtggtggttgtagaggctggtgaggatgcggcgggagccggggtcgtgcttcaggtcccacagcaccttgtctacctggtccatgtccccctgggggtagtggtgtttcacccccagctggtagccgtaggccttgccgatggagccggactcgtccgcccaggcgtcccagatgcggctgttcaggtcgtggacgttgttggacttcttctgccagatccacagaagctcgtccaccgcggacttcaaaaactgcctgcggacggtgagaatggggaattctctgcgcaggtcataccggttgaccaccccaaagagcttaatggtatgggcgggagtcccgtcctcccagcggggacggacctcccggtcggtgtcccacactccccgggaaagaatgtcctgacagttttgaataaagacctgatcggcgtagctcatggcggcccctcctgatattggtttgaaggtatcatatcagaagcggggggaaaaagcaataaggcggggacgcggcatcctgccgcgtccccgccgcctgttccggaagccggacgccaggaggaaagcgcccctcccccggctcaggctcctttgtatttccgtcgggtggcgatgccgccccggatatgccgttccgctttgttctcctccagcacgcccttgacctggagatagagaggctggttgaaggcgggaaggcgctcggacaggtccttatggaccgtggacttgctgatcccgaacttctgtgccgccgcgcggaccgtggtccggttctctatgatgtaaagggccagctgacaggcccgttcctcgatattccctttcacacagcaacaactcccccggattttgcatctgctgtacatgtatatgcgggggagaggattttatgaggccggaaatgcctcgactggaagaatttcccgatgaaggcccagtcgtggagaggattcagccgttgagaaaggtctgagcaagggagacgtagagggcggcccctttccaaagcactgactcgtccacgtcgaaccggggactatggtgggggcggtccgtccccttggcgggggcggaggaactgagaaagagaaaagccccggggacctgctccaaatagaaggcgaaatcctcacctcccatgttgggggctgggatgcgggtgacgacgtgctccgggctcacgacttcggcggcggccccggcggccagctccgccatagtgggatcgttgaggacagggggagcgccccagctgatggtgcagtccgcactggcgccgaatacggcagccgctgcctgggccacctcaccgatgcgccgggcggcatactgccgcagaccgtcctccagagtgcggatggtcccctccagcactacctcgtccgggatgatgttatactggtcgcccccctggatcctgccgatggtcaggaccagggagcgagcggcgctgatctcccgggtagtgatggcctggagggacagaacgatgtgggcggccgcattgacggggtctacccctttttccggggtggagccatggcagccgcgcccccggacccggatggtgaacttgtcaaaggccgccatgcagcagccggagggggcaatcacggtgccgctggggatgtcggcccccagcagggtgccgatatggaagccgaagatggcgtccactccatccagcgctccctgctccagcatgactttggctccctcacactgttcctcggccggctggaagaggaggcggacggtgccccggagctccttcctgtgtttctgcaggacttgggcggcccccatgagcatggcggcgtgggcatcatgcccgcaggcgtgcatcacgccggggcggcgggaggaaaaaggaagtccggtctcctcttggatgggcagggcgtccatgtctgcccgcagggccaccgttcgaccaggcaggccgccctggatggaggcaatcaggccgctgtcccggggagagcggatgaaagggatacccaggcggtccagatgggcggagagacaggcggcggtctcgggcagctgtgcccccacctccgggatctggtgcaactcccggcgcagggcagtgatctcatcttgcagggcttgacaatccttccacatgttagacgggctccttccaggtgtgaagatctaaaatttccggcaggactgcctgccggcacatgtctctattataagcggcgccgggcaggaccgcaagggggacggtgcccagggagatcagcaggaaaaaatttctcttcttcgaaggtgggatatggttgcaatgggtcaaaaaatgcggtattatgtcaacatatcacgggcccgcggcgccgggcaggaaaggatgatcccattgcagcagaagagaagaaacatgaggggaccggctctgctggcggctctgtccatggtgctgacagcggtgcccgcggccctggcggtcgagacagcggccgggaccccgcccgcagtcacggaggccccctattcggatgtgccggcggaggcgtggtacgcccccttcgcggcggacctgaaacaggacggggcggtgagcggctatgaggacggtaccttccggccggacaacgccgttacggtgggggaggccctggtgatggtgctggcggcggcaggctttgaccgccgggaggccaccggggagcactggagcagcggcaatgcggactttgccctggagaagggctttgtcacccgggagcaggtgaccgatctggacagtgcggtaagccggctgacggtggcccagatggcggccaaagccctgaacttgaggccctcccggaacgagacgcccttcggagacgtggacgatggctatgtcaccgtgctctatgaaaagatacagctctccggggagctggaggaggatggcacgctgtcttaccatccggaggacagcatcacccgctccgagctggtcgccatcatctggcggatgaagaacaccgatgtccacgcggggcagatcgcctatgaggggtacagccagaccttctacctggatgtgctggagacagtccccgccttctcctacatcccccagctgttccgcatggagggagactacctcacctatgatgatgggacggttcaggggcaccttggggtggatgtgtcccagttccagggggagatcgactgggagcaggcggccgatgccggtgtggagttcgctatcgtccgggtaggcggccggggctacaccgagggcaagctctatgaggatacatactttgaccggaacgtccagggcgcgctggatgccgggctggcggtgggggcctacttcttctcccaggccattaccgtggaggaggcgctggaggaggcgcggttcgtcctggagcgggtccgagactatgacttgaccatgccggtggtctttgactgggagatggtcagcgacagcagcgcccgcaccaacgccatcgacagcgacaccatgaatgaggtggcactggctttctgcggcgccatccaggaggcgggctatgagtctatgatctacttcaactcctatcaggggtatgtgaagtacgacctgagcaagctgctggatcacagcttctggttcgcccagtaccaggcgcagcccagtttctactatgacttccagatgtggcagtacagctccaaggggagtgtgccgggtatccagggcgaggtggacatgaacctctatttcggagccctggagggcggagagcgccccaaactgcccaatggccaggaggccccgctggacccgggcatcaacccggagaccggccggccctacggatattgagagaaagcgagcggtccgccctacggggcggaccgcttgactgattttgttacacatatccgtacataccgcggacagacacctctcctgcggagagggcctcccggcggccgtcgtcgtactccaccaccagacggaactcgtcgtcgatggacagggcggtggcctcggtgcgggaggcgggggtgatgagctgtacccgattgcccggcgtgaggcagtcggcccggtaccgggccagatagtccgccttgccctggggaaaggctgagtacatccggtccagagcccggatgatctggaccgccagctcggagcggcgcaccgggcggcccaggacattgaagagggaggctgcgatgggccgcacgtcggggctgaagtcctcggggcgctggttgacattcacgccaatgccggtgaccagatactggagggcgttgatctcgttctccagccccatctcggtgagaataccgcacagctttttcccttccagcacgatgtcgttggtccacttgatcctggggcggacgccgcaggcggcctggatgccgtcgcatacagccactgccacccaggcagtgaagtccaccacctctatgggggggagctgggggcggagaagggcggtcagatacagcccgcagccccggggggactggaaggagcggcccagccggccccggccgccggtctgctcctccgccagcaccaccaggccctccggcgcgcccgccatagcctggcgcttggcctccgtgttggtggagtcgatggtgtccagacagagcaggcggctccccaccagacagccggccaggtggccggacagctccccctcccgcacccggtcgggggcggactccaggcggtagccccggttgggggcggaggtgatctcatatccctcctggcggagagcctcgatggccttccacacggcggcgcggctgacgcccagtgtgcggctcatggccgccccggacagatattcccccgggtgcgccagcagcagggacagaacggtttctcggctcaaggcagggccctcctttaaatcggcgatcagaacttgtggtctttattatacccgtgggggctgggtggtgtcaactgaggctggcagacaggcataaccccaggtcctgtcccatataaatgggaaaaacgggaaagggtgaacgcaatggcgtatgaagagaacatgcccaggatggagggggcacaccatgtcattctggaggggcgggaacagctgtccgtctccggcgtggaggaggtggagagcttcgatgaaaacaccatcatcatgaccacagtgaaggggaccctggtggtccggggggaggatctgcacatcgagaagctctctctggacgggggagacctgcgggtggagggcgtggtggattccctatcctatgaggacgacagccgggagcggggcggattcttcgcccgtctgctgcgctgacatgaccatttcggtggcgcagcaggccgccgccctggcccaggcggcggcgctggggctggcggtggggctgctgtatgacctgttccgtgtcctccgggtccgggtggccctgcccctgctgggggcggtgctggatctgtctttctggatcattgtgaccgtggcgctgttcgtctggtctcagcaggcatggcggggggagatccggctgtacgggatcttctttctctttgggggcggggtgctctatttctggctcatcagtacctggatgctgaaaatcggctattttttggcagatgcggcggccctggtgtggcgcatccttaccctccccctggcggcggcgggaaaattgcagaaaaaaactaaaaaatttgcaaaaaatagctttcattttgcgcaggaatggtttagaataaatcagataactgaggaactggatgccgccgcccggagacgggagcggcgggagacgggagggagtgcgcatgcggttcaagcgagccggtcttttgaccaaggtcgtggtgatggtcctgctgatctacatggccacggccctgctggatctccatgggcagatccagaccatccaggtggagcgggaggagctgaatcagcaggtggccgcccagcagctggaaaaccagcagctggccaacgccatcgaaaacagcgacgatcctgacatgctggagtcggtcgcccgggacaagggctatgtgaagtcgggggagaccctctacatcgacgtggccaactgaccacccaggaaacggcctcagggggaaatttacaaggaggatatatcagtcgcttatggagtttggtgttgggtccattgtggatgggaaggttacgggaatcacaaaattcggtgcctttgtggccctgccggaagggagatccggcttggtccacatctctgagatcgcttattcctatgtgaacgaggtgtcggatcacctcaaggaggggcaggaagtcaaagtaaaagtcatcggcatcgatcagaacaaccggatcaatttgtccatcaagaaggtgacagagccccctccccgcccggccggcggcggacagggcggacggccccgttccgggggagggcggcctggcggcttcgcgccccggcctgccgcgcccaaggagcccactgactttgaggaccggctgaagcagtttatgcagtcctctgacagtaagctgtctgagctgcgctacatagaaaaaaagggaaactcccgccgctcccgccggtgagaggcaccgggaccgcgcagctgcctgcgcggtccttttttatcccggcatacaaaaacgccccggatggatctccatccaagggcgttcagcaaatgcaggaacagattcgcagagaaaaccagtttggttgagctgcctgacaaatataccatataattacaaatatgtcaactaaagaattgccagaaaggagcaatatatgctgatcattcacggaacggtgcacaccatggacggaccggccatcgacaacgggtttgtagccatacgggagggaaagatctggaaggtgggaccgatggaggagtgccccgccgactggaagggggagacgctggatgcccggggggggcacatcctgcctggcttcgtggacgcccactgccacctggggatgttcggggacgccatgggctttgagggggacgacggcaatgaggccactgacccctgcaccccccacctgcgggccatcgacggagtgaaccctatggaccgctgcttccgggacgcgcggctggcgggagtgaccacggtcctgaccggtccgggcagcgccaaccccatcagcggccagttcgtagccatgaagaccgccggccgctggctggacgacatggtcatcaaggccccggcggccatgaagctggcgctgggagagaaccccaagctcacctaccacgagcggcatgagggacccatcacccggatggccaccgctgccgttatccgggagaatctggccaaggcagtggagtaccgggacaagctggagcgggcggctgccgacccggacgaggagaagccggagtttgacgccaagctggaggccctgctccctgtggtccgccgagaactgcctgtccatatccacgcccaccgggcggacgatatcgccaccagcatccgcatctgcaaggagttcgggctggagtatgtcatcgtccacggtacggaaggccacctcatcgccaacgagctggcccgggagggggcccgggtcatcaccggcccctgcctgggggaccgttccaagccggagctggctaacatgagcctggagaccccggtgctgctggcgatggcgggagtgaagatcgctatctgcaccgaccacccggagaccccggtccagtacctgcccctgtgtgccgccatggcagtgaagggcggcctgccggcggatgcggccctggcggccatcaccatctgggcggcggagatcggcggagtggctcaccgggtgggctccctgacgccggggaaggacggtgacgtggtggtgatgagcggccaccccctcaactggctcagccgggtctccgccgtggtggtggacggccggcgggtgacggaatgatgttctgttagaaaagggaaactcttgagaaaaattcacaaaaaagtctagaattttttgacgcctgtggtataattgactcatcggaggccagatctccgatgaagttggccctccggggcgaaaggagcggaatgttatgaagtttgtgtttacggacaaaaaggtgaacctgcccgccgtgattcatcggtacgcggagaaaaaggtggggaagctggaccgtttctttaaagaggacgccaccgcagctgtcacattcagcatcgagagggaccggaacagagtggaggtcaccatccggtctggcggcaccatcttccgcgcgtcggagagcacctccgacatgcacgcatccatcgacgccgctgtggccacgctggagcgccagatccgcaaaaataagacccggctggagaagcggctgcgccagggggcttttgagcgcagcgtggatgaggagatctccacttttgtgcccgacgggccggaggagggggagtacaacctggtccgcagcaagcgctttcccatcaagcccatgacccgggacgaggccatccttcagatgaatctgctgggccacagcttcttcgctttccgggacgaggatgcggacggtgctttcgcggtggtctactgccgcaatgacggagattacggcctgatcgaagacgaggcctgacccagcttgaatagagcggaaagggccggacggacagaagtccgcccggcccttcttccgtgatccaaaacgggaggggagtttccccccggacagaatggagtggctttatgaatcccaaagcgctgatcgatctgcactgtgacacgctgacagactgccggcccacccctgcggggaatccggacacgctggacgacccggagcgggtgctgtccctgtccgccatgccggaggatgtgcactgggctcagttttatgcggtctttattcccgatgagtatcggggacaggcggccatcgagtattttgagcagaaccgggagaacttctttcgacagatgaagaagttttctcagcgggcagccccctgccgcacctatacggacatggagcgggcatgggccggaaatcagacagcggcctttctcaccatcgagaacggatcggcgctggccggagacctgagccgcgtccaggtgctggcagaccagggggtgcgggcggtgacgctggtgtggaacggcgagaatgagatcggctcgggccacaccacggaccacgggctgtccgccttcggaaaagcggtgatcccagagctggagcgatgcggcatcctggtggacgtgtctcacctcaacgacccgggcttctatgatctgctggaggtggcccaaaagccctttctggccacccattccaacgccagggcggtgtgcggccacagacgcaacctcacagacgagatgattcgggagatggtggaccgggactgcctgatcggcctgaactactttgtgaaattcctgcgggacgagggcagggtggagagcttggatgacctgtaccgccatgtgtcccacttcctggagctgggggcggccaaaaacctggccctgggctccgactttgacggggccgacctgccggactacctgaacagcccggccaaggcggcggggatctatgagtatctgctgtcccggggtatcggccaggaactggccgacgggatcatgttcggcaacgccagccgctttttccagacccatttgacgtaacaagacgccccctccctccacggagggggcggacttcttctgtagggcgtgagtgccgacacgctagagaaaggagcgaagtgatggaagggctggatgatctggaatttttgtcagagtaccgggaggacaaccgtatcgaggccaagcgggcccagggcggcctgccccacagcctctgggagacctactccgctttcgctaacaccctgggcggggtgatcctgctgggggtggcggaggcgaaggacggctccctgtattcggtgccgctcctggacccggaggagctggtggaggagttctggtccatcgtgcaggaccccaagctggtcagtgccaacgtgctccggacggaagacgtgcggctgatgcggagcgggcggaacacggtggtggccatctttgtgcccagggcagatttccgccagcggccggtgtatctgggctccgacccctatcggggcacctactaccgctgtggggaaggggaccgccgcagcccccggcacgaggtggaggccatgctccaagaccggggaaacgactgagcgtagggagaatagcgaggacgcagggggggccctgcgtcctcgctgtatccgggagctggtcagctctccatgtgttttcccaggaaggcggccgccgcctgggccagcttgtagtcgatctcgtcgggggactggctctccccgtcctccgcaaagatgacgcagcccagcacatcgccctcggacaggatgggggcggcagtgcccacatggaacgcggtcccgtcggcgcagaggggaatggtctcggctcccggcttgtgctgatagatctgacggccctccatcagccgctccagctcaggggagatctgcttgtcttggatctcacgcctgggggcgccggtgacggccacgcagttgtcccgatcggtgatgactgcgatcttgccggcggtgcggccgatggtctcacacagctggccggcgaactcggacacgccccccatgagggaatactttttgaagatgaccccgccgtcccggtccgtgtagatttccagcgggtcgccttcccgaatacgcatcgtgcggcggatctccttggggatgaccacccggcccaagtcatcgatgcgccgtacgattccagtggctttcatatatcaaattcctcctgcggttgcattttgtagacagagagtagtatccgcaaaatctggttgcctatgcaaaaatttgcggaaggactttgcgggcagagtcggaagatccggcgcgagagcgccttgcggcaggaggcttttttgctttgatatgagaggcacccgaagggcctccgccttgacggaggctctccatggagaaaaaagtgctgccgtccccctgggacggcagcacgggaacagcagaatcacaggaggaacatggccactagtggcagggttatcatgcagaacagactggtgaggaacacgatcttggcggcaaggccccggttgccgttgtaggtctccgccagaatggtggtgaccgagggggcgggcatggccatggtgatgaggacgatggaggcgatcagcgggttagacagggggagcagggacatcaccgcccaggtgagcagggggacaacgatgagccgcataccggtggcggtgtaggcatccttgtcccggaacagctcagtccccttgccggaggccagggtcatgccagtgacgaacatggacaggggcgtggtcacgttggacagatgggtgacgggggtcatcagggcctccggcagggggatctgccccacatagaagatgaggctgaggataagggcgatgttgatgttgctcagcagggtgcggaccaaattgacaggctgggcgtcggtgccgcagtcagcgcacaccatccgcacacccagggtatagaccagcaggttgaagggtacgccgaacatgacggccagggccaggccctcctcgccaaacagggccagggccacggggaagcccataaagccgttgttgcagaaggtggcaccgaaggaccagatgccccgccggcccgccggtaccttcagcaccttggagatgccccaggacagggcggcgtacagggggaagaggacaagtccgatgacgatgatgatgaccccgtccaccaggaaggcggagtcaaactcccgggtggccagggaggagaagatggtgcagggcagggtgaccttcagcaaaaggctggacatgggggcggaggcggagggggggacaatctttgcctttacggagacccatcccacgcccatgagaagaaacaggccgatcaagctggaaaataccattccgatgtctagctgcataggaacccctcccgggccggccgatggccggcgttctttctgtaagcctagtttatcagagaaggggagggctgtccagagataccggggccgggagcgtgaagatttttcctggatctatgaaaaacagacatgccagtgctcagtgggtcctgaaatccaccgcaatgcggctgaccaggccgtcttcaaagaaaaagaggatggccggcttgaggcgcccctcctgggagctgtaccagacgcccggaaactcctggccgttgaaggggggatcctggagcgtggggtaggcgttctccacctccgcacgggtggaacccactcggatgccccgggcggtgtaaaaggccgggtcagtggtctccagataccagactgagcggcggtcatactccggctggcagtaggtgacggaggtaaagccctcccagctcagctgctcgagctggaggctgtcgctggagtcgctgccccgccagctcttcaggacggtgtggacggggtggtcctcctccccgtaaaaggagatctcgctggaccagaggccggcgggcatggggaagccgtcccgccagagagcggcgtacacgtcagacagcacgccctcccaggaatccgtcagggcggcggtgaggagatggccgcccggcaccgacatgacggtgcgcaccccaagaaagttctccgactggtccagatcaaaaaagaggtagtcctccaaatcgtgcggatcggtcagacggtccccgctgccgtacagcagatagcagatgcggtagatcccacacagggtctcataggtggggtagagggcggcgggctggatgtcctggatcaccaggtcgccggcctggggggagagcccctcccccaggaaccaggcccgacctgagaccggccggaagcggcctgaggcgaagtagtccagcaccatctgctccgcctcctccgtgagcgccggggggcggggcgtgccgggggagacggggagggcgggggaggtgaagccgccctccggcttctcgtccgcgaagtgccattgccgccacaggggcgggtccaggtccaggcactcctccgccggaaccagcggggacaggcggaggtcgtactgttcatagcgggtgaaggtcccagcggaccagatatagaggtgctccgccccgctgacggcgtccgccgcgctgtcctcccggtcgtcggagcgggcggtgaggtagaagaggggctggccgtccccgcccatgcggaagccctccaggtccgggtcctggatgcagaggtcggccccggggacctcctgggccagctccgggtcgtactgctccgccagggccagatacagcccctcctccgtcaccccggccagtgccagggcgtcctccagggacacctgccgccgctcctccttgtcgtacaccagggagaggacatggcccgtgttcagatcgctgacaaagtaggtctgaaagaagagcaggttcagataccggtcggtctccgcggggtagagcaggcaacagttgtcatacccatccgtaccggatggaagggggccctccaggagcgggaggtagctgtcccgcaggccggacagggcccggttgatggaggtcagcccctcgtcggctttctggccgtccggcaggaccagagtggggatctccaggtagttgctgttggtgtcgtagtgctggacctccatcaccaccagggggtcggcgggctggctccggcaggagaccagccagccgcaggagaggatgagcagggcggcaagaaagaggagggggagaggcggacgctttttctcacactgaaacaggttacggatgcgagcctccgcctgccgggcggagccggagaggggagtggagaagggggtggaaggttggggctgtttcatggtctcatctcctttcggtatgcggagggggctcagagcagccgggtcaagaagatgcggctgacatgctccccttcaaaaaagaacagaagagccagcccctgatcgttgtccatgtcctcacagtaccacatgcagtccatctcattcagggaggggttcctggtgctctcggacttcagagctggataggaggccaggacctgctggcggctgtctcccacccggatgcctcggagggtgtacacatcggtccgggtggtctccactccccggagggtctcggaaccgtcggaggctaggtggtaatagtcggcggaaaagccgtcccagctgtatcggacccacatgtccccctcgttctggaccagcccctcaccaggcagctcctcccggacgccggcctgggagaaaaacagagctgtatcctggagcccgggcccagcgggggtgggccatccgtcccggaacagggctatctccggatcgtacagatcccggaagggctggcgggcgacctcgtccagagacatggcggcaggatcggagatggcctcccccgccacggacagaaagactccgtccccggcgcttcggctgaggacgagggtgaagggcgcctcctgagggacccagctgccggcacggaactgcatggcctccatggtatagaccgagcccacagtgttgtccgccagggcggcggagccgagatagtccacccgagtcaggagcagatccccctcctggggaggaggaagctggtcccagccggaaaagaagatctggtccgcccccagacgggcagacagatactgacggaccagggcataaaattctccgctgttcaggccggagggtacggtgtcctcctccggcagagcctgcatggcggcctctacctccgaataagagcccatggaccagccctggacgacagagatgcatccctcttcggggctgtaccggatgcgggcggccaagtagaggtcactgtctgcgtccgcccgggccagcaggtcgtaggaggcctccgccatgtcgttccgccctggataggacccgtccgtcggggcgagggagaggatctgccaggaggcggaggcattgtgggcgttccaggggttacgcccgctgcgggtgaaatcctccagccacacccgggtctggtaatagatgccgatgttcagctggtcctcaggggccgtatagaactgctcattgtgatcggggagccactgggggccgtctccgtcaatgacggcgtagtccgtccgggcaaacacgtccacgccgcctggagcaaggagcgccagagcgttctcccagtaggagtcataggccgcccgggcggcggagccctcctcccggacgtctccctccaccggccagacccaggtgaactgagtgccgtcgaaagcgagaagaccggattctccctgagagagccactgggaaaggctgttggcggtgtacaggagataggaggtcccgtcctgctggaagggaacggcatggggctggcatccctggccctgcaccagaaagacagggccgacagccccgtcggactcctgcaccacgccgatggccagtatatagtgggaggacccgtcggagagagagacagcggccaaggtgcacccgtttcccgggagcgtggccaggacctggctgactggaggagaggtgagatccagggcggagagcccctggtccagaacggcctgtatcagccgggcactaggggcatcatgctcccctgtctggacgcagtccccttccagcggcggagcctcctggctctggcaggccaccagcccgccgcaggacaggatgaggagcagggccaggaccatcagccagactggcggtcgccgcttggggccctggaacaggttgcggatgcgcgcctccgcctgccgggcggagccggagaggggcgtggagaagggggtggagggacactgggatctggccataaaagcacgtcctttcagaagaaatggagcggggagaacggcgcggggtggtcaggagaaggagaaaaagccgtatccccaccgcagatcacacaggccgtacccagagagaacagcgcccgcctcaaacagcccgtaatagccgccgcgccaagagcagcagcgcggggaaatattctccgcaggagtgccggggaggtagagacaaaactcgtttccaccatccagcccatagggggcggcggccacatagcggatgccgccctccgtccactccgtcccctccgggcggccggtggtcacctccaggtccgtgagggtgagggaccaggtgcggctgtctaggggggtcagcatggagaaggccccctggaactggcacagataggtgatatccatatcgcggtcgtggaacttcccggagaaggtgccgtcagggaacagggtcaggtcggtgctccaagccccagccccgctggaaaaggtgaaatggacgccctcctctgggatggggagcgtgctctcctccggaggaagagccccccgggataccacgccggtgagcagggggacgccgtacctggagaaagtgtaccgacggcggatgtccggatagttggagacatgctccgtctccaccacgccgcctgtgtcctccagctccaggggggcaaaaaacaggccggaaaacaccagctgccccatcgcctcgttccagaggaagtgggcatagttcacgttgtggggaagaccgcagttgaccagcaggcccaggtccacggagccgtccccgttcaggtcccgcaggtcgggagcgccagggaccttgtccgcatccgggaggcggtacaggccttcatagaggtggagcccgtcctccaagacggagccggcggtgatggactggagcaggacagggccgtcccacaccttcacctgacggatgagcaccgtgctctccatgccgtcgatgggagactcgtcaaactccagggtgagagtgcggccatccgagagggggagggggcagcggggaggttccccgtccagccccagctcttgtggcgtgcctattgtccactctacggcctgaggtacttccccggtcccgtgtcggaggcgcaggcgggcagtgaggcacaactccgggtccgagtctgcctgggctgtcaacagatagtcagcttcctcggagacggcaggggaggacagcaggtagcggccatcggcgggggtgagggcacggatctgccaggcggcggggaggccctccgtctgccagggattgcagccctcctgagcgagcccctccagccagacccgggcctgctcatacaccccgtcgggcaggtccagctccggggaagaccagaaggagtcagagtggtgataggtccactgggcgggagagcccccgtaggggctggaggccgtttcccgggagaacagctccacaccggagggggacagcaggggcagataggtctgccagaattcctcatattcctgagcggcacgggagccctcctccaggatgtccccctccgccggccacgcccaggtgagccggctgtcctccaggcacaccaccccggcggagccggagcggctgccctgatccagggtgttgaaggtgtagagcaggcggagctgaccgctgccgtactcccggaacgggaagatatgggcggccccctccggtccggagaccacataggccgggccccgtagggtgctggtcgcctgttccactgccccgatgaccagccaggaggcggagtctttctggaagagagcggcggccagggtggtcccgtcctggctgtgggcacagagaagctgggggatggattctccgtcctctgccgtacccatctggggagcggcggccccgtacagggcgtctaccaggaggaggtcctcactggagagaggctgggaggtggcggaggcagagagggcgctgatctccgccttttccggcggaaccttttggtcctggcaggccaccagcccgccgcaggacaggatgaggagcaggaccaggaccatcagccagactggcggtcgccgcttggggccctggaacaggttgcggatgcgcgcctccgcctgccgggcggagccggagagcggggtggagaaaggggtgcgaggggaggttcggtccatggcggtatctcctttttctaagcgaggggctgaaagtgggaatagatccactggctggggaggggtaccccgctgtaatccgggttatgaaactggaactcatactgaggattgaaggagtagagatccagtcctccctccctcgggacggccttgtaatcctcgtcatagtagtcccagctggccagctcctccagggtgctgccgtcaaagcggtagtgggcggcattgctggggccctcccacccgctatgtgcggaggtattggcacacaggatgtggagggcgccgtcctcagccgtccaggaggaccagagcccgttgtcgccccccaaaaggtggacctggccctgccactgctgtggctccagatcccagagcccaaccatcagattgcccattccggcggagtgagtgcccccttccaccagggccagtcccaggacgcagccatccccctcccgggacaggagcagctgggaggacatgtacggggcgtcataggggaagttatgatgttccctcatgagcagataggccagatctgggacaggctggggggtgagggtgaaagcgccgtcctcccaggcgagcagatgccagcggtctgcctgcccgtcggggtccttcagaagcacccgcaggacctgcatagagccgtcagggagacgggtcacctgagactgggtggtgaactgccccggggccagggaggcagggtcgtcctccgccagccgtccctgttccgtcagacggccgttttccacctccagaatgatgtactgggccgcatcatggtcagagtgggagagggccgcctggagcaggagggcctggtgatctttggtgctcagataggcagacgtgaggacctgccgggagaaggcaagatccgggtggtcataggtccaggagagctcctccccggtgcccagccgcacctccacggtggtggaggcgtccccccggatgaaaacggcggccctgtcgtcgatgctccccacgccatccaagatccagccgatggagggagaagaccaggcgtggggcctctcccttgactggagcagagggcgtctcccctcgacaggacgcaagcgctccgcaggcgagaaggagggacaggaccagggaagccgtccgccgggcagagccggaacgggaagaggggagcggttcaggcagagcgcgcatggcagatacctcttttctaattttttaatgtcgaaggcggggcctcagaaaagaccatccgactgggaggggaccaggaccagttcgccccggctgttgtaggcgagggcgtggtagacgggttcaggcccatgggtccaccagccctccaccagctgcccggtctcgggcaggacctccagccggccccccagggtggtcagatagcggaaggagccagaggcttcgtcccagacgaaccagcagtgggcctcgttgtgggtggtgtcacagagaactccaaagtcctcactgccgtcaaaatcgatgtcccgtacatccacatagtccagcaggggggagaaggccacgaacccctgaaaggcggcccggctgtcgggggtgaaggagtctggggtgatggtctggagaagagtgccgccgtccaggacctggatctggtcatagcggagctgagatgagtcgtccggcgcggggatggggcagcggagcgccagggtcagcgtgcggcccggtccaacggtgacggtctcagtgtccgtcagatagccgtctcgggtcaagtcccaccccgcctgtgtccaggacagggtggcccactccggctggtgccatttgtcgtacaggatgggtacccgcaggacctgaaggccgtccggcctggtatggaggtaggcggaccagatcaccgggcagtccggggcgaggtcgtctgcgttgtcctcccaggtgcccagccggacctgctctgtcagcgccccctcctccacggccagcacgaaacagctggctgcgccgtaattggagtagcggtcctcaaggaccaggacgacggactgcagccccgagggggtaaaggaggcgggcagcagcctgggatggccggtggaggggagttcccaagtcagcacctctccggtgcccagggcggcctccaccacagtgaggggaccggaggcgctgtcgtcatcataggagaagaccgtgacagaatcgtctgttccccctgtcccgtccaggtccagtccctcccggaacaccgcataggtcccaaatggaagagtatcactgagagggataagatcttctccctgctggccggaggaggccagcaggatattcccgccgcaggcggcctccagcagctgagacagggggagggtgaggaggatctgggacgggtcggcggcggagcggatggagaccatctcgtcctgagggtggaaggtcaaggcgaccagctcccagggggtgccctccaggcccagcagctcagccgccgcctggcgcagatcctgggagcggacggagccgtccggccacctccgccagaccaacagccagccgccgtcggggtcatgggccagcagatccgggtggccgtccccgtccagatccaggtggtacatcaggccggaggtgtccgccaaggagaaagaggtcccgtcgggcagacggatctggtattcgtaccagtctgaaaggtcctcccgcaccgtgtggatggcggtgccggagaagcccaaaagatcggagaaggggaccgactccttgcccggggtggtaagggagaatacgggggcgccctcctccgggggcggggaggctgcggtccggcaggtgaccagtccgccgcaggagaaaatgaggagcagggtcagggccatcagccagaccggcggccgccgtttggggccctggaacaggttgcggatacgcgcctccgcctgccgggcggagccggagaggggggtagagaggggcgtgtaaggacatgggcgggtcaagactggtcctcctcctttctgttttggacggcgctgacggcctgaaggatggaacggccgtaggcagaacgctggtccccgggcagcgcgtgcagggtgctgtcgtcacaggccagctctgtgtcctgctccaccgcccgggccatgagccacatcagcggattgaaccagtgcagggcctttacccagagcaccagggccttcagggggatgtctcggcggcggaagtgggtcagctcgtggcgcagggcgcactccagaggggcgctctgggggaggggctccggtagaaggatcacagggcggagcagaccggccagcatgggggcgggcagagaggggcagaggaccagcctgggcagacggcgcaggcccatctggtcccccagcgcccggtaccgcgccagcagggaagtctcctcagcctcccggccccagcggcggagccagcggcagaacctgaggtgacagcccacattccacaggaggacccccgccgcgcccagcagccacaggatcaggaggagctgggcgagggagagggaaaatcctcctgattccgccggggcctccggctggacggcattctggaccggctcagaccgggagggcgcggcctgggactgggctgggcggctggaggccgccgggggctgggagacaggcggcgaataggtgaagaccaccgggttggaggggacggtcagctggactggtgcctcggccggccccagatgggggagcagggggaaggggacagccagccgcagggagaggagcagccaggcagtacagcgccaccgggcggcgtagcggccccgggtgagacgggcagccagcagcaggagcaggaccactgccccgccgcccagggagagggcggccagatcaaggagaaatcggttcatttggcgcccctttccagctcatccagcagggccctgagctcgtccacctcgccgggggccagcccgtcccgggccagggcagccacgaagtttcggggggaactgccgtacaggcgggagaggacggagcggctgtcaaaggagaggtagtcctctcggctgaccaggggggtgtaccggttgctcctgcccaggcggcgggcggatagaaaccctttgtccgccagccgggtgagataggtgttgatggtgttggcggcccagccgtggggggccagagcgcgctccagggcggcgcggggggtgtcggggccggagtcccaaagggccttcatgacctccagctcagtgtcggggagtcgtttcacagctatcgctccaatctactacttttgtagtttgtaataatatactacatttgaagtaaataaaggtcaagttacagtgtggttacagagcggccggggcagggctctggcagaacaaagcaggccgcctgccaaaaggcagacggcctgaaaatagggaaaagcggtgccgcggaggggagcggggcactaaagcaggatctgtccgttgatctccagccggaatttgaggtccagggtctcggcagctttccggctgaggagcatccgctggagaaagatctcaaaatagtccatgacggcgcacacctccgtgttgatggagagggagagagtcacggtccgtcccggcaggtccagcagcacctcggagcgctccacggagtagttcacccggtcgtggatgtcaaaggtggacatgtccttgttccgcacccggctgcggcgcacatcggtcttgtcggccaggatcagggcggcggcgatggcgttcaccgggtaggcggtggagtcgtcgtggtggccgatggcagtgatgacggcggccacgtcggggggctccatccccatcttgtccaggatgcggaaggccatggtggccccgctgagggcgtggtcgtggcggttgaccacgttgccgatgtcgtgcatgtaggcggcgatcctggccagctccacctctttcggggtgtagcccagctgggtcaggatgcgggcggccacctcggcgcacttggtcacgtgggcgaaggagtgctccgtaaagcccagcgccgtgagcgaggcgtccgcctgggtgatgtaggtgcggatctccggagaactcctcaccatctcaaaggtaacattcatagggtgctcctttcttctccgccgtcccacaggcagcgggacaggtccaccctgccatcgggcaggaaggggacgccctctccttccagcagcaggcgctggatgcccgttccgccgaacacgtccgcggggctgaggcccccatcccggtacaggactcgatgacagggcaggccctccggcgcccgggccagggcgcagcccacgatgcggctggccctgggccggccggccagaaaggccaccagaccataggtggccacctgtcctgccggaatgcgggccaccacagcgtagaccgccgtaaaaaaatcaggacgcccgggagtcacagggcacagcggcgggggcgccccgcttgggcgggacgggcccctctatgggccgggcagaaaaacagataaaacacagacaccaacactccatcgatcataagcggcctggaagcaggtgctccccgcccttgcaggttggaaaaacagctggggacatccctattgtatgggatgatcctggtaatttcaagccccaagagcatcaggacagaaaatttctcctaagctgggcatcgttcccgcaggcggatgagggaataggagatcgttgcgggagaaacggggaaatggaaacgggctcccgtggaaatgcctgatgcccgctgcatgtgcggaagaaaaaggggaatttccaccataacaggtggaagtgtatgctggactatgatatagtagtttcaaacaggctgcgggcaggccgtccggcgggcgctttggagagggggagacaggatgaagctttcttcatttctgcattttgccgcctttggggtcaggaccattcttctgcggggaaaaaagcccatcctgggcacagtgatcgtcacagaccggtgcaatctgaagtgcaggcactgctctgtccacgatctgacatcggtggaccatccctatgaacagatccgccgggagatggagctcctctaccatatgggggtgcgcatcctgttcttctgcgggggagagaccttcctgtggcatgacggggcgcgcacggtgcgggacctggtggtggaggccaagaaaatgggctttctcctggtcaacgtcgtgaccaacggcaccttccccattgatctgccggaggcggatctgatcctgctcagcctcgacggtgaccgggcacgccacaatgccatccggggcgacacatacgacaccatcatggaacatgtggagcacgccacttccgacaatatctgcttctatatggcgatcaaccagatcaacaaaggcgcggtccgggatgtctgtctggcggcgcaggagaccaaaaatgtgcgggcggtctcctttaatttccacacgccctatcccgataccagggagcttgccctcacccgggaagaaaaggcggagtgctgcggcgttatcagggagatgatgaaagcgggcgcgcctgtattcaatctgcccggcgctttcccagccctgatcgagaaccgcttccccacgccgtgccaccagtgcgtggtggtggaaaacggaaaactgtccacatgcgggcgctgcattgaagtgcccggcctgtgcagggagtgcggctacttctttgtggcggaatacaccctcttgttccggggacatcccaggatcgttctggagatgctgcggacctacctgaagtatatttgaggagcatcatgagtatcatcacagacctgacgaggatgtggctgacccgctcggccaagccctttctctttcaaaatgaatacgaccagcagctgcccttttcccagtgtgaggggctgggactgtatgtgcatatcccgttttgcagggagctgtgcggcttctgcccgtattgcaaggtccagtatgacagggcggcctgcgaccgctatctggaccggctgatccgggagatccacctggtgggcggccagctccccggcaggaaaagggtcaccagcctctacttcggcggcggtacgccggcgctggcggccggccggctgaaagaggtgatggaagccatcgaggcgcattttatcatcaccgagggcgtcggggtggagctgcacccggaggatgtggtgccctccgtcctgcgcattctgcgggatgtgggggtgaccaggatcagcatcggggtccagtccttccagagaaagttccagggactgctgggacggaggcctgtggacctcccagccctgcgggaggcgctgtcccaggtccactttgaaacggtgtccatggattttatttttgccctgcccggacaggacctggaggatctggagatggacctggagactgcattccaggccggtgccaatcatgtggcgatctatcccttcattgatttcaccttcacgtccagcacggtgcaggctatggggaagggggagaagcgggcgcttttggacggcatcacccgctggtgcctggaccggggatacatccgcagctctgtgtggacctttgcaaaggaccaggacgcagtgtattcctccatgacaagggaccattttctggggtttgggtgctcagccgccaccctgctgagagatcagtttaaaatcaacaccttttctgtggaagaatactgcagaaggatcgacgaagggaagctccccacctccctgacactccggttttctctgcgtcagcggatggtctattatctgttctggaccgcctacagcacagaggtggatgccggtgcctttgaacagtttttcggcgtcccattgaaaaagatgtacggtatggagctgaggctggcacaatggatggggctggtcacccggcgggatgagagatacagcatgacgctgaagggcgcgttttactaccactactatgaaaatttctataccctggcctatatcgacaagatgtggggggtgctgagaaacgaggcattcccggaaaagatcgagctgtgatctgagcacggcgggagctcgcagagctgtcctgcacttgatttttgaaaaaaatgtgttaaaataagaacaaattatagaaagtgtttttatttgagggggtgcgggtgtgccaaaggtggcctattctgaggaggaccgggagcggatcagggcggcactggtcactgaggcgctggagcggatggccaggcagggcatccagcataccacggtggagcagatctacaaagcggtgggcatttcccgtacctttttctattcattttttccgacgaaagaggacctgatcgtggagaccctctatctccagcagcccaggatactggcctacgcggagcggctgatggcagatccggcactgacctggcgggagggggtccggcagttcctccatgcatgctgctatggtgagaaaaacggcatcgctgttttgaccattgaggagcagcagctgatcttccggcgcctgtcagcggacaactgccgcgtgttccgggagaagcaggcccgcctgttcgggaagatcctggagtgcttcggggtccgggcagaccgggaccgggtggagctgttcacaaacctgagcctgacggccatgatcgtgcgccgggctatcccggaaagtctgccgctgttcgtgccggaggccgctgatgcgacggtggccttccagatcgacgccatcgtggaccgcctggagcgcctgaaggagcagggatcctgaccggagcggggatgcggcccgccgggatatctggcacagcagtccggacccggcgggctttcgactcctctaaataaatacaaaatatgaagaatatctttattttggcggagccggcagagctccgaagcatgtccccaagcacccgaccgggcggaggacaggaaagcactgtgtccggcggagatcacatactatcattcaggaggaatctattatgggatttttcagcaaattgtggaaaggtccggaagtggatctggagaagagcggagaaaacgcgaaaaagatgcggcagatgttcgaccgggttgtggaaaacggaggcgagtacaggctgatctccggctataccgaggatgtgagccgattcaactatgggttcgtccacgggagcaggcggaaggtgggaagcctgatcgtggggtggaacgaggaaagccagaccatcgtggtcgtcccaactgtcccggatctctccggctgcggcgagccagtgtattaccgacgcgcggatattctgaaggcctaccgcaaccgctaccccaccgacgcctttgtcatctaccccgacagccggggctatatcgccatcaatgcctacgactggctggaagacgagtcactgtacatctatgtatcccaggaggaggaactggcggccttcaccaagttcttcctggagcgcttcgcaaaaaaataaggcccgcaggggctggggagcacccggggaaacggaaaagcgcaggcgaaggggacttcgtctgcgctttcatggccggtatggtcaaggtcatttttccgggctgaatttcaacagaagatagggttcaatctccaggaccgtggcgatgttgaaaagcagctccagagagaggccgcggttcatgttcggggcctcgatggcggcgagatgctggcggctgatgcccagctcctccgccagctgctcctgagacatgcccctgcgcctgcggtaatagctgatggcgaagaacagatccgccattttttcgcggttgtcaaattgccgtgccaagccccatcccccccttgtctatagtgtacccaagatgagggggatacaaaataatttaaaacacggctattgacgtgttttaaatatcgatttataattttgacatggcaaatatcaaatcagacacgataaatgacgtgaaaagcgggggcagggaaattcagaggggggatgttcttttgctacggcctctgttagaatagaggcatatcccaggcccacgcttcggacacgcctgggcggatcagagagaacagagaggagcgaggcgtatggagcagtacggcccctttgcggggaggagcggcacagcgcacctgagtgcgccggctttttgcggacttttttgatcccctgcgcggtgccggctggatcccggcaccgcgcaggggacctttgtttcacggcctggggtacggcccggaatgtcacagggcggagacgatcaatggaacgcctgcgtaagctctgtggggcgctgggggaggagatatctgcttcccgcaccctgcggagcaggaagacagatagacaaacgaaatagcaaaataggaagaaataaaggagagcacccatatgactttgctggaccagtgtaagatctggaacgaaaacgacgagtatcagaagatcatcgaggccttggaggccgtccccgcccaggagcgcaccccggagatggacagcgaactggcccgggcctacaacaaccaggccgcgccgggggaccgggaactgttccgcaaggccattgccctgctgaagccccatgaggcgtatttcgcgggggaccattgctggaacttccgcatgggttattcctactactacctggaccaggagggccgggcgctgccctatttccaggcggcgctggaagcccgccctggtgacggggatacccaggagttcattgaatggtgtcaaaagggagtcgctctgccccggttctcggagtgcttccgggagcgggcggaggcagcatgggagaaatttgctcagcaggaggcacagctgcgtcaaaggatggatgaggacaaggaccatcagcggggggatgaactggtggcccagatggaggatgttctgcacctggcctttgatgacatatccttcgaaatgggcttcaacggccagaagcacgagctgatcctcaccccggagggggacaaggtcaagctgtttgaactggtctacttccagaagcacgcaccgaaaaaggtgctggagcactggaatatcctggcgggccgccagcccaaccccggcatcggactgcgtaccgacgacggctgggaggtctccggggaggatgtgcaggtctggctggaggagcggggaaaaaacagcttcgccctgtccgcctattgcgaaaagctgctccccctgctccgggaggaggagggccgggcctggtggatgctcaccaccctcaccgaccaggtcttgggcgagatttcccatatgcggtacatcgacgccttcgacgtgctggaggagcccaaaggggagccgtctattctcctgtcggacctgccggacaagctgaagggcatgggcctggatctggctgccgacccggaggactatctggagaactacatcggctatgagatggagcccaacgaggacccggaggcggactggcggctggatgtgatcgccggctccaccaactgcgcgcccctcatcaacggctatctgagcgctgaaaacgactccatggatgacctccacgccgacggcgtagtggcgggcttcttctgctatccactggacaccctgcgggaagaggagggcagcgacaagatctttgctttccgggacgagctggaggactatctgagcagtgcctgcggcccggacgtgctcaccctcactggcggggccaccggcatcttctgcggctatgtggacttcatcgcctgggacctgcccgccgtcctgaacaaggtccaggactttttcgcggacacggatctcccctgggccgacttccacaccttccgccgggaggccgggacggtgtccctcaaaagaccggaggaggacgagctggaggagacgctgaccgggatggactacattccctacaccctggagaacgccgacgccttttaccggcagctggaacagtggaacgacgaggacgagtacacccgctgcatccaggccctgaacgccatcccggaggactggcgggactaccgctttgcctacgccctgtccagggcgctggaaaactacgccatcatcggggaccgcgaagagggcacccccggccgcaagggggacaaggccctcctgcgggccatccaggtgctggaggccgtccgggaggagggccgggacaaggcggagtggaatatgcgcatggcctatgcctatcaatacctggaggggcaggaggagaaggccatcccttacgcccagcggtggatggagctggacccggaggacaaaaacgccccggcggtgatccgggagtgtgaggaggagctggccaaacggagcggcggagagctggagaacggagcggaagagagagcaccggctggcccggtgctaacagctgaggatgtgcgggagctggagtccatgtgcgaaggggtatccggctacttctacaaaatgctgaacttcctggaggagcggcttcaggacggtgtccgccgggggcgcttcacctgggagcgggtgcgggcggatctggacacggccctgtggtactcctacatctgcaacaatgtggatgagtacgagtattattaccgggcggcccagtggatgccggattcggagcaggcggcagagcaggcccggagcggggtctggtactatcggtacgcctgcgccctgacctactgcggacggctggaggaggccctgaagtacgcggagaagggagtcggactggacccggagtatgtgtggggctggctcatgtacggcaggctgctcagccactttggggaccgggagggggccctggcggcggcggaccgggggcttgccctggagccgggagactatgaattcaccaccctgcgccgggagatccagaaggggcgcacgctggaggagatggagttccactggatcgacccggaatctgacagaaagctccaggcggggatggacgagagcgccggagacaagaagcgggcgatctcctgcatcctctgccgccgggaggcgctggaggagatcaaggcggcccttgcgcctgtagagtgggaggcggacgccccttactgcacgttcaccatgccctatcaggggagcacggtggaggggcggttcttcgggaacgaggccgccctgtccaaggtgccggccgagtgggtgtgggagctggtccggcgcctgccggagctggaccgccggggtctgaccttcctctcagcccgggcagggctggggactgggggactggccctggagcggttcaccatccagatggaccgccggctctgcctgttctaccagcggggggaggagcagcagatggtccggttcgcccccgactttgccctgtgcgaggaggaccagcccgctctggcgcagcctgagggggggaccttcctggccttcgtgctgctggagcagccggagtgggacgcggaggaatttaagcggaccctgcgggacgactggggcatcccctgcatgacggaggagaaggacagcggggaggggggaagcaccctggtctttgaggcggagggctttctgacggcggtgagcctctaccccttccccgtgcccaaaggggaggcggagcagaatgcgggccgcaactacctgtggagcgaggcggaggagaccacacgccggcaccgggggcagatcctggtgtccaccatggcacgggacggagatgtggggcaggccgcccgcctccaggtgaagctggtgtgcgctgcctgtggacaggacggcgtgctgggcatctacgccaacgggaccgtgtaccagccggagttctatctggaggcggcccagatgatggaggacgggagccttcccctgctgaatttggtgtggccggggctgtaccgccgggagggaggcctgtgcgcctacaccgaggggctgcgcgccttcggcaaggacgagctggaggtgctggacacccgggcggagcccggggacctgcgggggtttgtgctggacatcgcctcctatgtgctggagcaggatgtcaccctccgggacggggagaccatcggcttcagcgaggggcagaagctgcccatcacccgcagcgcggggatctggcacgacggcatgacgctgaagatcggatatccgtcaaaggaggagggagaggacgagaacagcggagagacctgaaacatgacctgcggaccgctggaagccgccgggggagtctgatttcatccactcaatgaaaaacgccgtggcgtatcggaaacgatacgccacggcgtttttcatgaacagcttaccgggccgcccggtagatatccttgatctcctccaggcccagcaccttaaaggagccaatggtgcgcctgccctcaaaggtacacatccaggccagcttttcgatggcctgctcgtccagcgtgatgcccagctgccccacggtggtgggcatgccgatggagcggaggaagtgctcaaaggcccggatgccggccagcgcagtctcctcgtcggagccgggagtatccacccccatcaccgcccgggcgaagcgggcgaaccgctccggggccgcgtccatgacataccgggaccaggccccccagacggcggccagaccggccccgtgggtgacgtcgaacatgccgctcagctcgtgctccagctggtggctggcccagtccccgatgcggccgcagccgccccggccgcagccggtgaggctgttatgggacaggctccccgcccacatgatgccggcacgggcatcatagtcccgggggtcccggaccacccggcgggagagctccagcatggagcgcatcagcccctccgccatagagtcggtgggctccaccgtctcagggtcggagaagtagcgctccatggtgtggtagatgatgtccacgcagccggaggcagtctgataggcggggagggtgaaggtgagctccgggtccatcacggcaaagcgggggcggcacaggtcggtgttcaacccccgctttttccagccgtcctcgttggtgatgacgcaggagttgctcatctcactgccggcggcggcgatggtgagcacagtccccaccgggaggcagttccgggcaggctggccggagaacaggtcccacacgtccccctcgtaggccagccccagggcgatggccttggcggagtcaatgacgcttccgccccccacggccagcaggaagtccacaccctcccggcagcacagctccatcccctcccgtaccttggacagccgggggttagggaccacgccgcccagctccacgtgggccacgccggcccggtccagactggccagcacccggtccagaaggccgctctccctggcgctgcggccgccgaaatggaccagcgccctggtcccgccctgctccttcaccagctggcccgcctgctcctcggtgcccctgccgaataccaccttagtgggggtatagtactgaaagtcgttcatacagctctcctttttacagtcgataagatgtgtctgctggcagctctcccacaggagagcctgcccgctgatgcagccggccccggttcaggcctcccagcccgccagataatccttctgctcctgggtcagcgtatcgatggaaagccccatggcggccagcttcacccggccgatctggtcgtcgatctcttcggggacgttgtagaccttcttctccagctttccggcgtgcctggccatccactccagggaaagggcctggacggcgaaggacatatccatgatctccgccgggtggccgtttccggcggccaggttgaccagccgcccctccgccagcacgttgagaacgcggccgtcgggcaggcggaagccctcgatgcctgcccggcgggggaagcgctcctccgccagctggcccaggcgggccacgtctacctcacagtcaaagtgcccggagttgcacagcaggacattgtgcttcatcacctggaagtggcgctccacgatcacgtccttgcagccggtggcggtgacgaagatatcgccgtatctggcggcctcgtccatgggcatcacccggaagttctccatggtggcctccagggccttgaaggggtccacctcggtgacgatcacattggcccccatgcccttggcccgcatggcgatgcccttgccgcaccagccgtagccggccaccaccaccgtcttgcccgctaccatcaggttggtggtgtgcatgatggcgtcccaggtggactggccggtgccgtatttgttgtcgtagtagtgcttggccttggcgtcgtttaccgccatcatggggcaggggaggatgcccgcccgctcccgggcgtacaggcggtggatgccggtggtggtctcctcacagccccccagcagccggtccccgtagggagcgcaccgcccccccagcagggagatcaggtcgccgccgtcgtccacgatcaggtgggggcggcacttcagggtctcggtcagcaggtcctcatagccccgcatgtccaccccgtggacaccgaaggtctccacccccaggctggccatggcagcggccacatcgtcctgggtggacagggggttgcagccggtgagatacacctgggcgcccccctcccggagcaccagccccaggttggcggtcttggcctccaggtggacagagacggcgatggtcaggccctcaaagggcttctcccggcggaagcgctcttcgatgccgcccagggcgggcatgaagtcccggacccactggatcttctgcaggccggaaggggacagagacaggtctttcacgatgctcatatcatttgctcctttgatttgatggggatggggatcagcgttctcccctgcgctcccgctccttggtgatgaagcccaggaagtcggccaggatccgggcggccagatagcaggtggtgcccgccgcgtcgtcataagggggcgagacctccaccagatccacgcagatgacctcgcccagctgggcgatgccctccagcaggtccaccgcctcgtcatagagcaggccgcccagcatgggggagccggtgccgccggcgatggagtagtcgaaagcgtcgatgtcgatggtgacatagtagcgcccgccctggggcagctgttccagaaccttctgggctcccatggcccggatctggcgggcggagaggatcgttgccccataggcccgggcgtcctggaagtcggagcgcttgctgctgccgatgccgtggatgcccaggtgagccatccggtccacatagggtagctgggacatgtagcgcatgggatggccgttgaagagccggttcccgcccagctgatcggtccagtccaggtgggcgtccagctggatcacatggaaggggccggactggtccagcccccgggcgaccgggatggagatggagtggtcgccccccagcaccacaggcaggcagccccggctgcggagcaggcgcaccgcggcctcgatgttgccgaaggtctgctccagatcgccggggacatagtcgatgtcgccgcagtccatcaccgaccacttctcggtgctcaggtagtagtcgtcccgttctggatcataggaaccctggggactgaagcgaaagcgggtggactgggtacgtatgccccgggggcccagccgggcgccggggcggccctggatagccatatcgcagggggcgccgatgacagcgatgtcagcctggatctggcggatgtcagggcagatgggacatttggcaaaggtggcgatgccggtcggggccatgttgacaggggcgctctggctgaaattctccataaagaccatcctttcatgggcgaaactaaaaaatttctttctttactttacaatgtttcggagacaaattcaatgctgaatgagaaaactttccggcccatgggagacaaagacaaataatttacagatttgtcatggacaattcccgaaaaccggggtacaatgaaaaacgatttgacacaaatgttaggaggctcctgtatgggcgcgatttcccgctggctggaccgcttctgctacaagcatccccggctcggcatcccaggtctgatgaagtacatcgtcatcgccaatgtagcggtctatctgatggatatgttcagcaacggctacttctccgctatgctgcggttctacccggccctgatcatggaagggcaggtgtggcggctgctcacctttatcttcgtccccaccagcggcggtttcatcctgtggtttgccttgaccaccctgttctactactacatcggaaacgctctggaaaaccagtgggggtctacccggttcaccgtgttttacggggtgggcgtcctgctgaacattttcaccgggatggtgacttactggatctctggtgccttcctggagactgccagcatgtactacgtgaacatgtccatgttttttgccttcgccaccctgtacccggatatgcgggtgctgctctacgggatcctgcccctgaaagtgaagtggctggcctgggtggatgcggccctctttgcctttgatattggtcattactttatgaacggcaactgggtccagggaatggtccccattgtggccatcctgaactacttcatcttcttctgggacgatctgatggccatcctccgccgggggagcagccgggctgctcaccgggtcgatcctcagaccatcaacttcaaaaaggctcagaaggaagtccagaaccggaagggctatctccacaaatgcgccgtgtgcggcatcaccgacgcagacgaccccaacatggagttccgctactgttccaaatgcaacggctactactgctactgcatgaagcatatcaacgaccatgtacacatccaatgagggcgggcgcccccggaccgacggcccgggggcgcctttttgcgtgagagctggggcgctccctccgatgggaaaaggccgtgaaaaatcctgttgataaattctgccggatgcagtataatatatcccagctttgttccagacctcggtgtggggcaaggccgcactagtcggggagatagcggtgccctgttcctgcaacccgcttcagcagggatgaatcccggcccccggacgtgcattgtgctgtctgacctggataagcagcgatgatagaccggtcccgcgcaacgcggctccgtgaaccgtgtcaggcggggaaccgagcagcactaagcggcccgccgcgtgtgccgcggggttactgttcttgagccggctgtccaggtaacgggtatagtgtacgcttcaaaggccggtgtgcggccttgctctgcatcgagtattttttgcccggatgggcagagaaaaggatttgaggtgatatcgtgtatcaggccctgtaccgcaaatggaggccccgcacttttgacgatgtggtgggccagagccatatcaccgacactttgaagcagcaggtggcgggggggcggctgtcccacgcctatctgttcactgggacccgggggacgggcaagaccacctgcgccaagatcctgtcccgggcggtgaactgccagagcccggtgaacggcaacccctgcaatcagtgcccggcctgcctgggcattgaaaacggctctatcctggatgtgctggagctggatgccgcctccaacaacggcgtggaccaggtccgggccctgcgggatgaggcggtctataccccggcggcggtccgtaagcgggtctatatcgtggacgaggtccatatgctctccaccccagccttcaatgcgctgctgaagatcctggaggagccgccgtcccacctgatgtttatcctggccaccacggagctgcacaaggtgccggctaccatccgctcccggtgtcagcagttcgcgttcaaacgcatcctgcccggacagatcgcccagcgcctggagtatgtggcggggcaggagggcatcgacctgaccccggagggagcggcccttctggcccggctggctgatggcggcttgagggacgccctttccctgctggaccagtgctccggcggcggacagcaggtggacgagcaggcggtgctggataccctggggctggcgggaaatctggagaccgcccggctgatggagctggccgcccggcacgacactgccgccgccctggagaccctgtcccggctgtacgccgggggaaaggacgtgggggcggtgctgggggagctgtcctccctggcccgggatctgctgatgagaaagacggcccccagaggcggcagtgccctgctgaccggtggatatgacgagaccaccatgcgcggcctgggagagctgcttaccgcgccccgcctgctccagatgctcaaccgccttcaggacactgccgcgctgctgccccgcagcagcagccggcggacggacgcggagctgtgcctcatccgcctgtgcgacgagacgctggacgactcggcggccggactgtccgcccggatcgcccggctggaggagcagttggcctccggcgtcccggctcggcagacggccggttcggcgggagacggcggggcggcgcagcagcccgcccggcctcagccggcgcccgtggaggctcctccctggacggaggagcgtccgcccctgccggaggaaccggaggaggagcggaccctggaagagccggagagacggcctgcggcggtcccgcctgcccagccggccgtcgccgggggcgagagctccttctggcccgccttcgcggcggaggccaagcgaaagctgccctccgcggggccctatctggtgaacccggaaaagacggtggggacctggaaaaacggggtgctgaccctgtgggtggacagtgcattcaccaaggcgatgctcaacaagcccaacatcacggaggtgctggcacaggccgccgggcagcggttcggcgggcaggccagagtagccttccaaatcgggaagccctctccggaggacctgggcacggggcaggccccggaagctggacagcgggacgccctggacgccctgctggagtttggggaacagtttgacaatatcatcatcaagtgatatggttatatcggaataaggagtggatggatatggcaaagggctttggaggccgcggcggcatgggcggcatgggaatgaacgccaacatgctcaagcaggcccagaagatgcagcaggatatgatgcgcatgcagcaggagctccaggagaaggagtacgaggccgccgccggcggcggggtggtgactgccactgtgaccggcaagcgggagctgaaggcgctggagatcgatcctgaggcggtggacccggatgacgtagagatgctccaggacatgatcgtggccgccgtcaacgaggcgctgcgggctgcggaaaacgatgcggcttccaccatgcagaaactgaccggcgggctcggactgccgttttaagaggaacgacgccccatccccccggaagagaccggagggatggggcgcttttttaccgctggcgggcggcggagagaggaaggcagggagagaagccgggaaaggcggaaaggagaaaaaagtgaagcgggaaagtccggaagaacagcggaaacagatgctggaggcccccatcccgggactgatcggcaggctggcggtgcccaccatcatcagcatgctggtgacctccatctacaacatggcggacacctattttgtctcccacatcggcgcgggggatggagccaccagcgcctccggagcggtgagcatcgtcttttccctcatggcgatcatccaggcggtgggcttcaccgtggggatggggtcggggagcatcacctcccggctgctggggaagggatggaaagagcgggcggaccagtacgcatccagcgccgtcattctgggactggtgctggggctgctgctcatgtccgtctgcttcgtctggatcgatgagctggtctggctgctgggggctacccccaccatctatccctacgccctagactacgccaggtatatcatattcggtgccccggtgatgatcctggcctatatcctcaacaatttgctgcggtggcagggaaaggccaaccggtcggtgatcggcctgggattcggcggactgctgaacatcgtgttggaccccatcctgattttcacctttgacatgggcatctccggggcggccatcgccaccctgttcagccagtgcgtcagcctggctatcctggcctccttctttgtgcgagggcagagcgacatccgggtcagcccccggctcatcgcccgagaggccaaggtgtatggagacatcctgaaaagcggtctgccgtccttcctgcggcagggcatgtccagtgtggcctccgtgtctctgaacctcaatgcggggctctacggcgacccggcggtggccgccatggggatcgtgaccaaggtgtttaccttcatcatgtccgtcgtcatcggcttcggccaggggtttcagcctgtagtaggcttcaactacggtgcggggcggctggaccgggtgcgggagagcgtgaagttctccatgaagtcctgcaccttggtgctgactgcggcggccgtcattgggtttcttttcgcaccccaggtgatccacttcttccgggaggacccggaggtgatcaacatcggggcccgggctttccggttccagtgtgtcagcctccccctgggggcggtgctggtctttgccaacatgctcttccagtcgctggggtgctcctggagggcctccttcctggccgtatgccggcaggggctgttctttatccctctgatcttcctgctgcccaggctgtttgatctcaccgggctggagatgacccagatggtagcggacttcatcaccttcctgtgcagcggagggatgctgctccacttcttccgtacggagctcgcccgggagggggagaagtccccggcccccgcagaacggaagatgtagaaatagagatgcctccggaccggtgggcctgctgtctgctggtccggggcagaaaaaaagaggaaaccaaaatttgcgcaaaaaaagtgaaaatagtggttgacaagatggaaagactttagtataataagcaagccgtcgtgagacagcgacagcaaaccgggggagcatagctcagctggtagagcacatgccttacaagcatggggtcacaggttcgagccctgttgttcccaccacattggccccatcccatgactacctggctcggtagttcagttggttagaacgccggcctgtcacgccggaggtcgagggttcaagtcccttccgagtcgccatttgcctctgtagctcagttggtagagcagaggactgaaaatcctcgtgtcgttggttcgattccgaccggaggcaccaagtccctgacgggataagaatgatcccgtcagggcacaatatgcgagtgtagctcatctggtagagcgccaccttgccaaggtggaggtagcgggttcgagccccgtcactcgctccatatttttggtgccatagccaagtggtaaggcagagctctgcaaaagctccacccccagttcaaatctgggtggcacctccagcgtcggagcaagcgttatatcgcttgctccgatttttattgaaattagagtgcgctcattctgctgttccttcttccgcatcataaccactttgctgggctgtgatgtggtttgggtacgaactagggagtgacggcatctatagtgtttggacaagacatggtcggagtaagcgtttgtgcgcttgctccgattttttatcagaggggagagtatttcctagtgaagagggtacccctctgtctctattttggttccgagcagcaacctgccacaggggtgcggctttatttttgtggaaggctcttgggagtactatattaaaacagagctgcggtggccaagagtctatggaagaagaaaaaagttttaccgaacagtcttctcaaagaaaatggtatttgatataattacttataagaatatatataataaatatgaggggagggaaatatggaagctctaattttggtgcttttcctgttgattatgatcctattagggttagaagcgtatcaggtcaaacgggacagagccttgctgcagcatgtagtgtatgtaaatggaatccggggaaaatccacggtgacccgaatgatcgctgcgggattaaagtctgggggctggtcagtcttctgcaagacaactgggacagtccctcggctgattggaacggacggagtagaacggccactgcgccgccgcgggaaggcaaatatacgggagcaggcccgggtgatgcgtatggcggtcagggagcatgcccaggtccttgtaatagagtgtatggctgtggatccatttctccaggaaatctcacagaggaaaatcgtacgctctgatattggggtgatcacgaatgtacggctggaccatacagaggagatggggctgaccttggaagagatatgtgattccctatcccgcaccattccggagaatgggatcctttatacagcggatactcaattttggggccagatggtgcggaatgcagaaaaagtaggggccagggtggaagtgtcccgcccggcagatgatcttccaaatttcgactttccggagaatgtggcgcttgccctggctgtgtgcggagagctgggagtggaccgtgaagctgcattggcggggattttaagctatcagccggacccatatgccctttcggcgttccagcttccccaaggggctctatttatcaacgccatgtcagtcaatgatcctaaatccacatgcatgaattatcgaaggatggcagagagactgaaactggatggacataagctgatcctactcattaataaccgtgcagaccgggggtaccgtgctatccatatggcgatggttgcgcatgagcttcagccggaagaagtgtggatcactggaggggcccgaggcgcggtatgccgggagataaagaaaagactgcccggcaggccggtgtacagtttaggcagtgaaaaggaggtgcccctggatagaacaggatcggatactgtgatctttgcagctggaaatttggcaggaccaggaaggtcactcatagaacgtgtggtgggggaggggaagagaattgtaccatgaaattgttttgatcggggtggccgtcagtcttttgtttacggaactgacaggtttttctccagctgggctgatcgtaccgggatatattgtcctctgcctgcagacgccggtcagaattgtctatacgctggtgatcgcactcttggcatggggaggcggcaaactgttgggaaatttcatgattttatatggccgacggcgctttgctgtgatgattttattggcgtttaccattgatttgatcattgcctcctctgagatactgccttatgatccaggaatcattggcgtgctggtgccgggcatcatagcaaacgagttggaacggcagggagcggtaaaatctctgatgtctctggcagtggtagtaggtattctggccttgatcatgatgggaatgggaatgcaggtgttccgggtatgaacgggaaacagagagaaaaaaagattgtgcgcctgctgatgctgtgtgctctgatccttttcggagcagtctggtgggcgtcctacggagtccagcgcgctgagacctcatatgtgatggaacagcggcaggcagctgagctgctgaccagatgcttttccgcagtaaggggatataaagaggagctccatatccctatgagccaggaagattatcatcagaccggtatgatcggtccctactatacagggattaccacgacccttggtgccatagaagctaagagaacgactgcatggccggatatgggggcgctgtgcgtcagattgctctatgaggcaggggttcggccgggggaccgggtggccgcagggttttcgggttctttccctgcaatgaatctggcagtgatggcagcatgccagtctatgaaagtggaagtcatccccatttcgtcagtaggagcgtctacttatggtgctactgatccagagcttacctttccagagatgctgcaccggcttgtgcaggacggcgtgcttacaacagacagtgccgcagttacgctgggaggcgacaatgatacaggagatgggatgttgcccgagcagaagatggagatcttggagcggctggagcaggcgggacttgtgatctttcaagaaccgaagtttctgaataatttggaacagagacaggagatctatgagcgccagggccccatccaatgctttgtatctgtgggaggaaatgtgacctccatgggtgtgggagaacgcgggatcgctttggggcagggagttctggacccaagaagcgccatgccggtgacagatcaaagcggtctggtggaacgatacctgggaaggggaatcccggtcgttcacctgctgaatatcaagcagttgaccgcagaatacggcctgccatatgacccggttcaatggccggatccgggaagcagtgcagtgtattacaggatacaatatccgttgcttccgattgtactgggactcctggctgcggcagggatcctgtgcctgtgccgacatgtacggatacagcgaagcaatatgtggcacagagagctgccgcctacatcttgaggatacaggggagaactgtaagataagaagcggaatctacgaggagggggcctgtcctcaggacaagccccctcctcgtagatatttcgcgcatcttctcaatattctactttccacatatagtgccggtcatccatggagtgcttgcagagcttggacatctgctctacaaagaaacgctccagcgggatcattaccacagagttgaaaaattcggcaattctgggatcaatgtgttcctcaatcccagtatccttagcatctataacgataaagcgctttgcataggttttgaggaatttaagtacacgttcatccaaaaagcgtgaacgcccggttgccatcagaaggatcatcggctgagtctcgctggtcatttcaaagggaccgtggaaatattctccgctgtgaatcataatggcatttcgccaatgcatttccataaaatgacagtttgccatagaataggcggtcccgtacagcgggccggcccccaggacttgaaagagaggatcgttttgatattcaacagcaaaagattgtgcggcagggagcatggatcgtttgctttctgcaacgattgcgtcgatctggtcaaaggctgccatagcctcatggtacagcggatatccttcaaattgatgcagaatttcaaacccaagccgcagtgccatcgactggttggattgggaataaatctgttcatccccattggagtacactaccacatattctccggcttttgccattccggtttcaggggagcccgtcatagcgatggtaacagctccgaactgccgtgcgcgctccactgcatgcacggtttctgctgtggccttcaaggagcagcagattacgatgcacctctcatccagagatttcggggttacataattgaactcattgctgttataaattgagaccgctatttcattggcctcacgctccagaagatacttgccaggatagatggcagcctgtgagcctccgcaggcaacaaagatgacggctttcaacccgccccttgtgtccaagcgtcccttaatttctgtaatcatctctctgatttccattgctgtttctcctttcaaattgataatataaacttataatatattctagaacaagcatatagattttaaaagaaaaagtcaagaaatattctgcctaaatcttgactttttttgaaaggaaaactaatataaatatatatactgatttaagggagatgactcagatgaggatcattgggatcggagataatgtttgtgacaaatatcgtacgatttccactatgttcccagggggacaggcactgaatgttgcagtttattgcagacttcaggggtgcttcagtgcatatatgggggtatttgggacagacagagtaggaaaccatataaaagagaccctgacggcagttggggtggaattcagccgctgccggacttatgagggggaaaatggctatgcagttgttgatctgatagacggtgacagaagttttgtcagcagcaataaaggtggggtgcttcgggagcaccctctgcgcctgacagcgtccgacctgtcttatattgacagttttgaagtggtccataccagcaataacagctattttgatgaccagcttccactgttgaagccgcttgtaccgctggtttcctatgatttttcccgctcctgggaggatattgaacgcagacagcatatatgcccttggctggacataggttttctgtcctgttcggattctgatgaggacagcgtacgcaccctgctggaacagatacacgaggaggggtgcggaatcgccgtggcaaccatggggagccgaggagccatggcatgggacggaagagagatggcgtatcacaccccaaagcttgtacaggcggtggatacgttaggtgccggagattcttttgcagctggttttctcatgcgatatctagagttgaaaaccagcggggcttgttccaaaccatatctgaggcagtgtatggaagcgggagccgagctttccgcccaaacatgtatggtgcatggagcgtttggatttggggtaccaattgaataaaaaatcttatgtttatttaaagaaactaacaaatacatttatatgcatatatagttttttatatctttaaatgttaaaaaaatataaaaaatattaaatttttgaatatagtcggtgaaaaatcttttattattgcggaataaacaaaaaatattcgtcaaaagctaaattttttattttttatgtgagattaaaaagataaaatagacatctagaattttgcatgttaaagttgatttaagaaaggaaatgacctttcctacctgtgtgcacacatataaagatgcgagaggactatcacaccagaacgctaatggccaatagaaatgacagagaaatgtaaggaggtacaaaaatgaaacaaagacgccaactcgcagcccttaccctctcagccgctatgctgatcagcatgacagcttgtggacaaggaactcagccttcaaccagcagtgtcccgtcttcctcctctcagcccagcgcctctcagtcaagcagcgcatcagtgccctcctccccagaaggggaatccgattatccgctgaataatcagggcgggatcgccgcagcagagggaagcgatatcggaacggcggcaacgaccttaagcacacgggatgcttctggatacaacggtgccgtcacctctggaaagcaggaggcttctgaggttggtattgaggtcctgaaggcgggaggaaacgcgatcgatgcctgcgtggccaccgcactggccattggattttttgagccgaacgccagcggacttggcggcggcggatttatgaatatctacctggccgatgagcagaagaacgtggccatcagcagtcagttccctgcacctgaggatatcccgctggactattttgagtacctgctcaatgaggacggcacccgcaaccaggagctttggagtgagttcaattcttccggtaaggcggtatccattatgaaagccctgtccacttatcaggtggcgttggacaattgggggaccatgacactctctgagatcattccctatgttactcaggcggccgagcaggggattcgagtgacagagaatctgcacaacctgatcgacagttcctatgaaaaactgtacatgcatgaggcgtcccgagagctctggctgaaggacgggctgactgttcccgaagtgggagatgtcatttacaaccccgatctgatcgatactctaaatctgatcgcagaaaatggaatcgaatatttttatgaaggacccattgcacaggagatcgtggacatcatccaggccgacggcggtgtgatgaacatgaatgatctgaagactgcaatgactgatgttctggtcattgatgatccagttgaggtgacctatcggggctataagctttacagtatgccgctgcccagctctggcggagtgatcgtgggtgaaatcctcaatattcttgagaactttgatctggcttctatggggcacaatactcctgaaagcatccatgtgatctcggaagccatgatgcgcgcgtatgccgaccggggtgcatatttgggcgaccccagctttggcgatatccccattaccggcttgagctctaaagattatgcctactctctttatgagcagattacagatgaggccacaactgagctggaggccggagacccgatgccttatgagagtgcctccactacgcacatgtctgtcattgataaagatggcaacatggcatgcatgacccagtctattagttcccactttggctgtggcattacggttcccggacgaggcttcctgctgagcaatggtctgaccagcttcgatttggagcagggtaagcccaactctgtagcgccaggcaagctctctctatccagcatgacaccaactattttggtcagccctgaaggagagccggttctgatttctggatctcctggaggtgagcgcattatcgcctgcatggcccagacaatcatcaatattgtggattttggaatgaatgcccaggattccgccgatgcaccccgagtctttgctggagcggattgcgtcatccaggtggagggacggatgcctcaggatgtgatcgatgaactggaggctatggggcataccgtaaaggttggttcagactgggacgccaatatgggtagctccaacactattacttataatcctgatactggtgagcttcatgtggccggggacccgagacgggattcgcagggcgtcgcatattgatctttaccagatgtacggattcctgtgcatggaaccggccagggccttctggccttggccggtttttgcaatttcaatgtcaagacatttctgaaaggagaatttaattatgaaaaaggtgctgtcttttgtgctggcgggggcgatggtgctttccttagccgcatgcggagatcctggaagtacctccggtcaggccccgggttccgcagggagctctacccaggtcacagaggtgacagggctgacagaacctattgcggagacccctgccctgatcacctctgcagggcagagtgctgacgcatctatgctcagtgcgattttagagaaggccgggttctcctgtgatattgagacaagcattggggcagacagctttgatacctctgcctataagaccctgatcattggtgtgggcggcagtcagaaggggcttggagccgctggagtggatgccgacgtggagcaggagcgcgtggatgcggtgatagctaaggctgaggaggcggatatgactatcattgtcgcccatatcggcgggagtgcccgccgcggtgaactgagtgacggcttcatctctgcggtttcccctaaagctgattatctgctggtcgttgctggcggagatgatgatggactttttacccagattgcatcagaaaatggaatcccaatggataccgttgaaacattggcggatgtgggtactgtgctcccaaaggcattcaaataattgtgaggtggctgcatcagccccttctgttgaacaagaaggagttgtcatatgtctgaactgctgattttcctgctgatgatcgtcatctttgcgggaagttgtttcttcctgaagctgcctgtgggaattgcattattgctttcctcggtgggcggggccctggctggcggctttggagttccggtgaagtttatggtggaaggtaccatgtccttcctagataccattctggtcattgcctgtgcaatgatttttatgaaatgcattcagtattctggtgcccttgatatgctgaatcgattcttccttcgcagattccacaaccataaggtcatcctgctcctgctccttatgctgattatcatgttcccaggtatgatcaccggatcctccaccgcagcggtaatcagcgcaggtgcgattgtctgcccgatcctcatcgcgatggggattcctgcagaaaaagcagcggctattattgcgcttggtggtatgtatggtgccacagctcctccggtcaatattgcagttatgaccattggtggaggtgtagacatcccctatgtggggtttggaattccactgctgcttctctctgtcccactggcaattttttcggtgctgctccttgggctaaaggactgtaaaaatatggactatgagcaggtcaaaattcaactgcagatcagagacgatgaaaagatgtcttttgtcatgctattgcccgtctttgttctgctggcgctgatcctccttccctctatgctgccgaatatcgtcccatctctgagcatgactattgtttttatgatcagtgcactgctctgtatcctgaccgggaaaaaattttcggtttgggcagcgattaaagagggagtgaacagctcactgcctgtcatgggaatcttgatgggggttgggatgtttattgagattatgactatgaccggagttaagggctggctggtcgttaactgccttgctcttcccgatgccttgatttttgtggccattgcggttacgattccgctgtttggagccatctcttctctgggggcagcgtctgtgtttggtgtcccgttcctgctggccctcatgagccgggatacgattgtggttgctgctgcactggcctctattgccagtgtgggtgagctgatgccgcctaccgcccttgctggcatttttgcgtccaaggtcgcgggactggagcaatacaccggtgttctgaagaagtgccttccctctgcgctgctgatcattgcctggagcctactgtttatcatttttgccaacccaatcgcgtcccttctcccctgagaaccgcaaggaggtgtcattgtgacgatcgtaactatcgtatcctggctgatcatggtgtttgtaggagttgtaaccgtattttgcatttttgaagagaaagacatcaaaaagcagatgaatgcggcgctggtcctgctcccaattgtcctgcgtgccctgatgatcaaataggaggagtgccatgaagaaaaattatatttctgcacttgcagtcctggcatgtgtagctgttttctgtactatttctggtaacagctttcaccagatgcggaccgctacagaagagattattcccggagagggcgtgacagaggtccgaatgctcagcgattacttccctgatttagctggtactgccggggatactcagatttatgtgcttcagggggagcaagagggaggcagctgcctgatcctcggcggtacacacgcaaatgagctgggcggtcatatgggagcggtcctgtttgtagaaaatgcaaaagtagaggcaggaacgctgtatgtcattccccgaaccaacaacagtgcctttacgcacaacgacccccaggaagggcatcccagcactgtacatatcaccaccgatgaaggaaacgtccgtgagttcatccatggatcccgggcaacgaatccggtggatcagtggccggacccggatgtctatgtcaactatatgggtcagtccttgtcaggaagtgagaaccgcaacattaaccgtacttacccggggaaggcggatgggacgctaactgagatgatgagctatggtattgtccagctgatcaatacggagaacattgatgttactgtggacctccatgaggccagccctgaatatcctgtcattaatgctttgattgcccatgaacgggccatgaatctggcatcgaatgtggtcgtggacatgcagatggagggagtgcagatatccctggagccctctccgacagatctgcgcggcttgacccaccgtgagcttggcgatcacacggatacgctggcgcttttaatggaagcccccaatcccgcccagggccgcctgcgtgaccgcaccgatgaggcgctcgtcctgacaggcaagtcggagacttatgtgaaggccggtgagattgggcagctctatgtgccctatgacgaaaatggatggcccattgaggtgcgctgtgcccgccatgtgtttggaatagagcgtatcctggccaattacagcgaaatgtatgaggagccgatcattgtcaccgggatgcccagctatgatgaacttgtgaaaaatggaatgggtccctacctcaatgagcctaccacgtgatcaaggcaggatcgacagaaatgaaaaaagaaataaagtggtcgattgcggcagtactccttctgtgcatgggagtagttgtgtactttttgtttttgaggcctgctccggtgtcacatacgacctttttcctggctgaggggcttgcaagtcaaactgagtgtcacatcatggactctgggaaggaggggccgacaattttcctgctggccggcacgcacgggaatgaacccgccggattcaagggtgcggagcagctgctggaacggcttgaaccaaagacgggacgcatcattcttgtaccgcatgccaatcagcaggccattgagttgaaccaaaggaccgcatcggatggcgtggatatgaatcgttcctatcctggcgcagaggatggaaatcccattcagatcttgtctgcacagattatggagctgatccaaaaatatcagccagtctgcgtggttgatatgcatgagggagtcaatttctacggcgtaaacggcagcatcggaaattctatcgtggtgggacagacacagagcggatttatcaatgctctggatatactggagatggtaaacagccagaatggcgattatcctgattttgctctggaaggaaacgcacctgttggaagtctgaactgtacggcatccagggagctggggattgatgcgtttacaatagaaaccagccaaaagctgcccatggaagtgcgggtcagccaacaggttttgattgttacaaatatcctgcagcaatatgggatggagttcaaactgcgcccggagtccgggggataacaaagagcacaggcgtacagagccaattctgtacgcctgtgccttgttgctgtgcatgcttgtttaaagaggattttccgccgcaagagtgaaaaactttgcattttgcattggtttttgctattctaaaaaaagagcccctgttgggaagttttgtgattgtgaggccagtatggggataaaacgattgtctattacttggaatgcggtgagagtcttccaggcgttgggactgatggcagttggattactgacccctctgatttttacagagcggaatttccggatctatgatttgctctatcaggcgatgaatgagctggattccggttttctggcattaggggccattcacctgattgccctgaatacccttcgttctggtcctgactacttggccataacgcttttgatggatgggattagcattcagtggaatggacgggagatcccctttgttaagattccattctgctgcctgttccaaatttcactttaccaggtcgtatatatggtctattccctaagactggacatcggcatgccagctatcttagtgtttatctgcattgaattgctgactcggttttctttccgcctgcattacaagctgatcatcatcaccctgtttctcattaccgtgcaggggctggatgttttgccggtcatgacaaaattgggatttggaaatggtgagatctccactgatatcaaggccatagcgcccattttggacgctgaattgcttctgacttattttgtgctgttgcttctgtgcttttttgccaccgctactgttttaatggggcttctggatctggaacagcagcatttgattcaggcccaccgaaaggcagaacaggatgagctgcagctctaccaggctagaatgaaaaatattgaaatgaggtcgtttcgggagatacagaatttggtccatgacctcaagaccccgcttaccaccattcaggggctggctggactttcggaggagctggtagaggatccaaaactggccaaatatcagaggaggattgtgaatgcgtgtgaccggatgggacagatggtttctgaaattctctatgaggaccgaatgtccctggtcccgacagagcggcttctgcgcctgacgctctcctgcatggcgtcaaaccccttggtttctcgaatttctgtccacaatgagtgtcctgaggttcgggtatatgtgaattccatccgtatggctcgagcattggtaaatctgctggaaaacgcatgtaaagcgattgacccggagaaaggggagatccagctgattgtatcctgctgcagtgggacaacccattgggaagtagtggacaacggtattggcataaacccagagatccttcagcgtatgtggacgcatggctattctgaaagcggctccacaggactggggctcagctttgtgcagcaggtggttgaccttcatcacggaacaatagaggtaaagagcagtcccggagaatatacaaggatcacgatcaccctgcctcaaaataaaggagagcacaatgggaaagaacattttatcaattgatgatgacgaagacatcctctatacaattcaggagatcattcttcatcaaggatggacgcccctgctggcaagaaacttcagagaggccgagcacattctgacgcagtatggaaatggaaggctggatctgatccttgtggactatcacctgcctcagccggacggaatccagattgtccgccgtatgagagaaatggggatcaatgtgccgattgttgtgcttaccattgaagagcagacagcagtcatggagcgttttctagaagctggcgcagatgactatgcagtcaaacccattaaacctgtggatttggtctcccgcatcaatacccatctgcgctaccacgagaaagagcagttttactctgaggcggataagggcatcaaccaatctacattggagatcattgtatcctgcctttcctgttcggaagattatttggacgtaggagtcattcaacggcagacaaatctcaatcccaaaacgatacatcgatatttgcgatatttgattcgtgagcagatggttgaggtcaaaaatacttatggaaaacgggggagacccagagcattttaccgatgggcaggccgaaaaagatagatatcacaaaatcaattggaaacgttcaccgttgataacctgcatgcatacatatacaggctggccggcgttgccgaatgccacactgcggaccaggagcaaaggtgcatttttccgcaatttcagccaacgagcctcctcggtggtagcccggcagatctcaacgattttttttgagccgtctatgaccaagtcttttttctcgcgcaggacctggaaaagcgacccgtccagattctcttgcagcaggaaagcatagtccagtggaaaatagctggtctcaattaccataggctcgtcatttacatatctaagccggacaatttttacagtctgggaattctcatccaggccaagactctccagaatactggactttggagcaacgatttccttctgcaacagcctggcgcctggtttaagcccgcgtgcaagacaggattcagagaagccttgaatatgtgtataatcccggccatatttaggggaagtcacaaaggtgcccttcccctgtttcttttcaataagtccctgagctgccaattcatccatcgcttttcgtgcggtgatgacgctgacctggtaatatttcgccatttcgacttcggggagcagtctatctccgggcttcaatattccggaggtaatttctttctgcagcttttccatcaactgcctgtatagtggaacgacagcattggcctccaaaatcggtttgctcatggataattacctcctatatactcggtaatcatattataacgactgttttggattctgacaactgatttccagtgtgataggattaaatattttcttgaaagaaaagctttttacaaatagaagagtttcttcatttttgcaaggcatcagaaatagcgagcggagtggtgggtgagggggtgtaaagagatttttttagtacgtattgttatatctcgttggtcccttcacagcactcttaaactagcataggaaaatatgattaggcaaaatccgagaaagacggcaaggaaaggcatctagagcagttataatatacggaaaagtatgctgaaaatttaattgtttttcccaaaatgtaattttaggatttaatgtatatgggctctcgttgctggtaagggagggacggacgcttgacaccgggggcgtgacatgccataatgaaaagaccttgaggaagaaggagagcgtaaggaggaaagcaccatggcaaatatggtaaagcggatcggcatcctgaccagcggaggagacgcccccggcatgaatgcggcggtgcgggcggtggtccgcaccgcgcttggcaagggcattgagtgcgtgggcatccgccggggctggaacgggctcatcaacagcgacttttttccaatggacagtgacagcgtcagccacatcctggaccggggcggaacgattctgttcaccgcccgcagtgaggagtttataaacgaaggaggccggaagaaggcggtggccacctgtaagctgctgggtctggatggcatcgtggccatcggcggcgacggcaccttccggggcgcgctggagctgtcccggatgggcatcccggtggtagggatcccggccaccatcgacaacgacatcggctgctccaactacaccatcggctttgacactgcctgcaacactgccatcgagtgcatcgacaagctgcgggacaccatgcagtctcacgagcgctgctcggtggtggaggtgatgggccgccatgcgggctatctggccctctatgtgggcattgcggtgggtgctaccgccgtactgatccccgagcgggatgtggactttgagaaggacgtggtggagcgtatccgggagtcccgtctggcaggcaacacccactttatgatcgtggtggccgagggtgcgggcagcgccgtagagatcggcaagcgcattcaggagacggtgggcatcgatccccgggtcaccgtgctgggacacatccagcggggcggctctcctacggcgcgggaccgggagacggccagccggatgggctatgctgcggtcaaggccttggcagaaggccggatgaactgcatcgtgggcaccaacgagggacatctggtggagatccccattgagaaggcgctgaacatgaccaagcacctccagatggagcgctacgaagtgctggaagccatgcacaatcaggtcccgctgaagtgcgggccgatccagtgacaagaggagaaagcaggcggcagatctttgatctgccgcctgcttttgcatgagatcagggaaaacggaaaaaataattcacagtctcatggtgttgtccctggggggaagtctctctttacggtttctgtccctgcgggatgggaacaaaccgtaggggtgaggtgaaaataatgccatggacgggttgacaatccaaactgtaaatattataattacagtataagacaaaaactgacacgactacaaaggaggaaacgatcatgttggagctgaatttaaacaattttcaggctgaggcgctggaggctgaccagccggtgctggtggatttttgggccccctggtgcggctactgccgccggctgggccccgcagtggagcagctggagcaggaactggcggggcgggtgacagtggccaagctgaacgtggacgacgctcaggtgctggcgcagaaatatgaagtggagaccatccccaccctgatcctgttccggggagggcaggccagcgagcagctcatcaacccggcctccaaagcggcgatcctggagtggctgaaggggcagggcgcgatagagggctgaggagccctgcctgcacagaaatgagaggagggtcacaaggtggaacagaagctctatgatgtagcgattatcggcggagggccggggggatataccgctgggctgtactgcgcccgcagcggattttcagtggtggtgctggagaagctgtcccctgggggacagatggcaaccaccggacaggtggacaactacccagggttcgaagggggagtggatggcttcgagctgggggagaagatgcagcggggggcggagcgcttcggggtggagacccgcttcgccgaggtgactggtgtggagctggctgcggttcccaaggtcatccagaccagtgagggggaggtgcgggccagagctgtggtgctggccaccggggcctctccacgggagatgggactgcccggggagcgggagctgcggggccggggggtggcgtactgcgccacctgcgacggcatgatgtaccgaaataaaacagtggcggtactgggtggagggaacagcgctgtggcggacgcactctacctgtccaagctgtgcagagaggtctatctgattcatcgccgggataccctgcgggcctcgaaggtgtacatggacgcgttgaaggacagcggtatccagatcctgtggaacagccgggcagtggggctcctgcgggataagcgggtgagcggcctggtactggaggatgtgaggaccggggcacggcgggagctggcctgtgagggcatctttgtggccattggccgggtcccggatacagagctcttccgggggcaggtggaactggacgagcaggggtatatcaaggctgacgagacgacccgcaccgggctgccgggggtcttcgccgtgggggatgtgcggaccaagcccctgcggcagatcgtgaccgccacggcggacggggcgacggcctcccattttatcgaacaatacctcatggaagaaaacagataaaaagcaggcaggagcccccacggttttccgtgggggctcctgcccttatcctttcccaataggagggggtgtcacatagaggacagcagcccctccagctcctcctttgagaagtggtagaccttgtcgcagaactgacaggacaggtcggcctgtccctgctccgcgatgagggaggagagctcctcacgtcccatgctgatcagcgctcgggacacccgctcccggctgcagctgcaccggtactccaccgggtgggtctccaggacctccagctgaaagtcggagagcacctcttccagcaggccctgggcgtccagcccgcgggagagggcgtggctcacagagcccacccggcgaacgccggcctcgatcttgtcgatcaggccctcctctgcgccgggcagcagctggatcagatagccgccggcggccaggacgctctggtcccggtccaccagaactcccagggcgcaggcggtggggatctgctcgctttccacaaagtacatggcgatgtcgtcggcaatctccccggagaacaggccgatagagccgatatagggttccttcagtcccaggtccttgatgacggtgagactgccgtcggtgcccacggcggcccccacatccagcttaccggggaccttctccatcagctctacatggggatcctgcacatagccccgcacgttcccgccgcagtcggagacagccagaatggtgcccaggggcccgccgcccttgatctggagggtgagggcgccgttgtcctctttcagcatatcccccatcatggaggcggccagcagggtgcggcccagggcggcggtggccacggggagcagggtgtggatggtgcgggcacgctccaccaggtcccggccggtgatggcgacagctttgaccgagccgtcggcggtgatggcgcggatgatatggtcggacatgatcagacttcctttcgtgcggtgaagaagatgcggtcctccccaggcttggggggacggtgcttcagatttccatattgcttgatctgggtgaacccggcgtcgcggagatagctggtcagctcctccggcgtgtaggcccgctcctcgtggagctcctctccccgctcccacaggccgctctcctcctccaggcggaagatatccatgaagtaggagcagacccggcggcggcgggagtactctgcccgccagacgcagtaggcgtcctctgtctcgtccagaaagacctggccatccaggccctccagcttggcgggggtgttgacgtcaaagaggaacagcccgccgggcatgaggaacaggtggacccgctgaaaggccctccgcagctttttcgggtcggtgacatagttgatgctgtccagacagcacacgcaggcgtcgatggtgccatacaggtccagctgatccatgctctggcacagaaaaatgggggcgatcccctccgcatcccggttcttttctgcggcctgggccagcatgtcgggggagaggtccaccccgatcatctcatatccccgcagggacagctcgcgggtgagggagccggtgccgcaggccagatccagcacagtggagccgggcaggcccgcccgttcaaagtggcgctggatgtattcggcccaggcggcgtagtccacatcggtggtgaactcatcgtagcagccggccagaaatccatagctgttcattcctgacgctccttcagacgggggatgacggcctgatagccatcggcgccgtagtgaagacagcggttgacgcggctgatggtggcgctggaggcgccggtgcgctccaggatgtcactgtatatcagcccctggtccagcagcatggctacctccatccgctgctccatggctttcagctcggacacggtgcacagatcctgaaaaaagcggcggcactcatccacgtcctgtaaagacacgatggctcggtacagagtgtcgctggattccttctctaaaaatttagacatattgggtgctccttctccagagaaaatcttgcctcccggcggcccaacaaggtcccgccgcgctcttttatattttaacaggctaatctatgaaagtaaacggggagtgaagaaaaaaatcaaaaaccggccgctcaaatgcggcctgcggaggttttgacatgagcgaacgggaatataaagcgctgcgcggtgtaccggcttccacctggatggagggcttttgtgtgaccaagcagatggaaaaagcctgcatgtgcctcatgagcggcgaagtgtcggtgaccgcccaaagtcaaaccgtcagccgagcgcataggttccctctgtcagtggcaagctgtcagcacggcaagcgggacagtatcggaacgcccacagaggtatttgccgctgtgggcgttgctttacccgtaaaatagccatatagaaccatcaaggaggagtaccatgagcgaacacagaccagcattggaacacatccaggcgtatgcggaccatcttcggctggaagaaaaaagcgccgccactgtagagaaatatctgcgggacgtccgggccttcgcccgctggctggaggggcgggagatcaccaaggagcggacggcggcgtggaagacccatttggtggagcggggctacgcccccgccagcgtcaatgccatgctctccgccctgaacagtctgctggactttctgggcttcggggactgccgggtgaagtttctcaaggtccagcggcggatgttccgggatgacagccgggacctgacccggtccgactacaacgccctcaccgctgcggcaaaggcgcagaacaaaacgcggctggcactgctgatggaggccatctgcgccaccggcatccgggtcagcgaggtgcagtatattaccgtggaggcggccagagcgggccgggcggaggtcgccctgaaaggcaagatccgcaccatcctcatccccagcaagctgtgccgcaagctgctgaaatacgccaaacagcaaaaaaccgcttccggcgagatctttctcaccagaaacgggacgcccctcagccgccgtcagatctgggcggagatgaaggggctgtgcaagacggcgggggtcgcggccagcaaggtctttccacacaaccttcgccatctgttcgccgcggccttttaccgggccagccttgacatcgtgaagctggcggatgtgctgggccattccagcctcgagaccacccgcatctacctcctgacctccggggcggaacaccagcggcagctggaccgactgggacttgtatcgtaaagtcgaaattctcattctgtctcatttgctgtaaatataaaactgccagaattacatattccatgtaaatattaccactttcttttcaaaagagcaagagcgggacctgcttttgagcacaaaaatatgagccgcaaaatggaatatttttgcggctttccttgctacggctttttacctgtttttagaacagcaaaagacgcttttcattcgctctatctctctttgtatggcctatacagcaaatgatgggacagaatgagaattctgaaaagattggaggcgataaatattgcgaatgactctctacgactactgcgcggagcgggatgagctggtcctgctgacccagtgggcaccggtcaaaaacaggacgctgacgccaagagaggggtcctatggcaggagacagaagaactggcgtacttactggcccgagaggtggccgcccagtggtgcgtcccccgacctaaccccggagcacgtgacagcgggaagccgccggatggcttggcgggagtgtcccaacggtcatatctggaaagccaccatttattccagggcggggccgcagaagtgcggctgttcccgtctgcgccgggaaagtcagccccaaacggctggaacgctgtcggtgggcgctggaagaatgggaataaaatggggccggtcagctcgaattcccgatctggaaaatcgtaacaggaggaacgagaaatgaaaaaacggatattatcaagtttcttatcgctggtactggtattatcgctgatgcctgtgagcgcgctggcggcggagggaccgcagaatgtggctcctgccgtggtcacagaggagcctggagaggtccacggtgagcctccggtggaggaggcggccgggccggaagagccggcctgcatctgcgagtccctttgtaccggggagaccgtgaacacggactgccccatctgcacggcggactataccgcctgtacctatgaggctcctgctgatgagcagcaggagccggcgggtgaacagggagaacctgtcggccccacggcggaggaacagcttacggcgctgatcgcggctctgcctgacccagctgatattgatccggaggacgaggagcaggtggagaggatcagcgaccaaatctccgagatctacgcctatgccgaggaacacggccttgatgtggagaacgatgaaaccatcaattccgtgatcgggcttctctatcctgcggataatatagcgaataacggaatatgggacgatgagacaacactgtctgaaaatctcgttgttaaccaaggtgagaccttgactatcggtgcaaaagtgaccatctctggtaatgtaaccatctctggcggcggcaccatcaagcgcgatcaaagctatcagggagaactgatttctgtgccggctggagcagaactgaccttaaaggatattactattgacggtggcgcaacgtggactggtgaagctgctggtgggctggccgcggctgaggctgcaattcggattgagggcggtcaggtaacgctggataatggtgcagtagtccaaaacaacaaccataccagcactcaggacaatgcttacgatcatacgacctatgaagagagtggacaaacctatgaccttcctcgatactataacatgggtggaggtatcgccgtctatggcggcacactgacaatgaacgagggttcctctgtaaaaaataatgctgtaacaaatacaaattactccaaagtcacaagcggaacaaatcgcacgggcaacagcgattccttggggggcggtgttgctgtttatgaaaatggcacattcattatgaacggaggagagatttctcaaaatgttgccgctgtgagtggcggtgaaggccgcgcctttggcggcggtgtaggtctgatgactcgcggtgcaaatgcccaggtatctgatactccggatgattattatattggattttacatgtatggcggcaccatctgcgataacggagcagcaaatggcggaggtggcatttatggcggggttgatcagggagacgatgaatcccaaagacatactcatctcgatatgaccgttgcatctgctgtctgtgaaaatacctcatctgcaggtggcggtggtattcaagtgggctctggtgacttgaagatcgaagatggggctgatatttcgtccaacaccgcagtcagcggcggtggaattcaggttggctcagccagccactttacaatgagtggtggttctgtgtcctataatgaagctgtcattggtgaaaaaaacctccttggcggtggcatttactttagtaacggttcgaacaatcagcttagcatcaccggcggagagatcaagaacaactgctcaaaggactctggcggcggcatccagatcacaacaggtcttaccgtgtctattgccaactgtaccattcaaggaaattcctgtggggcccaaggaagcggtaccgttgcaaacggcggcggtattcaagcaaatccgggtgttgttctgaacctgttggactgcgttattactgacaataaatcgataaccggtcatggtggaggagtacatataagcggtcccaataaaaatgcgggtggaactgcaacgatttcagggacaactaccattcaggataatcaatcttctttggctggggccaatatgtatgttgcgactgtcacatcaacgacggatttgagtaatttgtcccaatcatcgcaaatcggtttgacctggaatgtaaatgacgtggatgtgaacaatggtactgtggttgcttctggtgtaaccgaagataattactcatgcattaaatacgaacctgctgaaaatgcggattatgtgttgcgaagggcaggaaacactgcggttttacataaagctctgagcctaaccctgaggtctatttctccagatacaaaccagcctatcaacgacatacgctatacggttcttggacttgtcggagaaactgttgattttacagaagtctgcggttttgaactgacaggctatcacattgaccgctgggcaacgaactatgttgggcaagaaggctatctatgggaaaacccctatacattctccgactcctttagcagcgatgcggctaggggcggtcccaatgctatctgggcaccaaacgagtacaaaattatctatgaactgaacggtggcgttgctggtgtgaatgcacctgagaaacacacctatggtaccgtgacggatcttgttgctcctacccgcgaaggctgtgtgttcggcggctggtttgcggacagcagcttcaccgggccaaaaattacatctttgggcgcagaagactataccagcgacattatgctgtatgccctctggacaaaggagatcggtgaggacagcagttattctgttgatgtgatccaagatcaaacctacactggtacggccatcgagcccgctgttgttgtcagaaacagcactaccggagatgtgatcgcggacagccagtatagagtttcctattccagtaacatcaatgtcggtgaggcaaaggtcagcgttacgatcggaaacgattccgccgaggtcacattccagatcaccagggacaacgcccccactgttgcaatgtccgacgtatctgtgacctatggcactgcatatgcgataactgctgcggccaagaccagcgcgggcaatgcgattacagatggtaccatcaccatccggtattataccgatgaagattgttccaaggatgagtctgaaaccgctcccactgccgcgggcatctactatgccaaggcgactctggccgaaacggacaactatggcagtgcaagcgcgtctgcaaagatcaccatccgcaacgccgacttctctgtcaccgctcagggctacgacggcacttatgacggccagccgcactccatcactgtaacggcagagggcgcggctgtgacttactccaccacggagaacggcacgtacagcgagacgaatcccacctttaccgacgcaggagaatataccgtctattacagggctgccaaggccaaccacaacgatgtgaccggcaatgtgactgtgaagatcgccaaggctgtccccgccatcaccatttcttccgacaaagccgagcttcgcggcggcggtactgtggaactgacagtcaaggccgcccccgcggacagcactgtggccgtcacccagactgatgaccaaggcagcgaggccaagattttgactctgacggatgggaccgtatctgtcaagctggacaacagggatgccaggtacacctttaccgcatcctgtgctgaaacgaacaattacaccgcagggagcagcgaatgcaccgtgaccgtctcccgccgctcctccggcggtggcggcggctccagcagcagcactaccgcggagaccaccaacagggacggctccaaaaccaccactgtcacagacaagaaaaccggcaccgtcactgagaccaccaagttccaggacggctccatcctagtggtggagacccagaaggacggcactgtgaccaccaccgagacaaccaaaaacggtgtcaagatcaagaccgtggatgagccgggcgaggatgtgactgctgagatcaccgtcccaaagtccgtgggcgaggccgttgtgatcatccccgccgacgtggactgcggcactgtggccgtggacacggacaccggcgaggtggtgaagctgtccgtccccactaaggcggggatgaccgtcaagctggccggctccgctgaactggtgctggtggaccgcagcaggaattttgatgacactcggaaccactgggcgaaggacgccatcaacttcgccactgcccatgagctgttctctggtaccagtgacaccgccttcacccccgacaaccccatgactcgtgccatgctgatgactgttctggcccgctttgacggacaggacaccaccggcggggctgtgtggtatgaaaaggccatggaatgggccagggagaacggcatctctgacggctctgatccagacggttccatcacccgggagcagcttgccaccatgctgtggcgctatgcgggcagtcccgctgggggcagctccctgtcctccttcggggacagcgccagcgtcagcgcctacgccctggaggctgtgcgctgggccgtgggcgagggcctaatctccggtacagatgccggcctgctggcccctcagggcagcgcaacccgggcgcaggtggccaccatcctcatgcgctttgtggagagcctgaccaagtaaagtaaatcgcccctgcatgaataggagggcgggacggcacagccgccccgccctccttctgtttcgatgctggatcaaggacagccgcagggcaagtcgtcacgacgtttccctgcggcttttattctctcctgtatttctcccacaggcgtggtgcccttttctggtcacgaagttttttgaatgtcagagaaggccggcagagagtccgttccacccggcagcatgagcacagtgccatggcggaagcgactcagaagatgctggcagttggagagcggaatcccgcgttaagtgatgtcatcacggaaatgcagccgggatctggctatgatagagccataaagaaacaagaaggaggatctgaatatgtccgctatcaatatcgatcagaacaacatccagagtgaagtgatgaattccgacaagcccgttctgctggacttctgggctccctggtgcggtccctgccgcatagtcgtccccatcgtggaggagatcgcccgggagcgcaacgatatcaaggtcggcaaggtgaacgtggacgagcagccggagctggcgagccggtttggcgtggtgagcattcctaccttggtcgtcatgaagaacggaaagatcgtcgatcaggctataggtgcaagacccaagaatgcaattcttgggatgctgtagggagggatgacgatgggattcttcgatctcttccagcaagccgatatcgatcagggcgtaaaggaatatttggccacgcccggtgctgtcctgctggatgtccgtacctctgaagaatacagagacggccatatccccggcagcaaaaatgttccgcttcaggctcttgacaacgtggcctctgtcgcagaaaataaaaatatggcactgtatgtctactgccactctggcgcccggagccgtcaggctgccggtttgctgcggcgtatgggatatcgcaatgtaaacaacatcggcggcattgcagcttatgcgggaaaggtggaacgataatatgaaagtcgtgatcgtaggcggtgtggcaggcggagccacagccgcggcaaggctccgcagactggatgagcaggctgagatcgtggtgttcgagcgttcaggctttgtttcctacgctaactgcggtctgccttactacatcggagatgtgatcactgcccctgaagaactgacccttcagacaccggagagctttttcgcccggttccgtgtgaacatgaaggtccgccacgaggtgaaggctatccacccggacaggaaaacggtatcggtaaaaaatctggagaccggagaagaattcgaagagagctatgacaagctgatcctgtcccctggtgcgaagcccgctcaaccccgcctccccggcgttggattggagaatctgttcactctgcgcaccgtggaggataccttccggatcaaagatcacatcaataagcataaccccaagtctgtcgttctggcgggcggcggttttattggtctggaactggcggaaaatctgcgggagctcagcatggatgtcactatcgtccagcgccccaagcagctgatgaatcccttcgatgcggatatggcatcctttatccacgcagaggcacgcaagcacggtgtgaagctggccctgggatataccgtggaaggctttgaggaaaaggacggcggtgtggatgtgctgctgaaggacagcgctccccttcatgcggatatggtggtgctggccatcggcatcacgccggacaccgctctcgcgaaagaagctggtctggaactggggatcaagggcagtattgtggtcaacgaccggatggagacatctgtgccggacatctatgccgcgggcgatgcggtacaggtgaagcactatgtcaccggcgaggataccctgatctccctggccggtcccgccaacaagcaggggcgcatcattgcggacaatatctgcggcggcgacagccgctatttgggttctcagggaagcagcgtcatcaaggtatttgatataactgccgccactaccggcatcaacgagaccaatgcaaaaaaggcggggctggatgtggacaaagtgatcctgtcccccatgagccacgcgggttattaccccggcggaaagctgatgaccatgaaggtggtctttgagaaggggacctgccgcctgctgggcgctcagatcgtaggttacgagggtgtggacaagcggatcgatgtgctggctgctgccatccatgcaggcatgagagcaactcagctcaaaaacctggatctggcctatgcacctccttactcctccgccaaggaccctgtgaacatagcgggattcatgatcgacaatattgcaaacggtaccatgaagcagtggtatctggaggacgttgaccatcttccaagggatgaaagtgcgatcctgctggatgtcaggaccccggacgaatacgctgggggccatatggaaggattccgtaatattccgctggatgacttgcgggaccggctggatgagatagagccgggtaagcctgtatatgtgacctgccagagcggcttgcgcagctatattgcctgccgcattctggaagccaacggccacgaagcctataacttcgccggagggttccgcttctatgatgcggtaacaaacgaccgggcattggttgaaagagccatgagctgtggaatggacaaataactgcaaactgccaaagccgcgctttccatcaggagagcgtggctttttctatattcaaaaggtgatatcatcacggaagaaagtggatctctccggtataatgatgccgatcaatgacgggagggtgtttatgtctgctatcagaaagaaacgaaaagcctttgttgtgcaggaggactgtgttgcctgtggctgttgcgtgaaagtctgtcctttgggagcgattcagattatgaagggcataatggcgcaggtgaatatggacaactgcgtgggatgcgggaaatgcgcgaaagagtgtcccgccagcgtcgtcgagatccgggaggtggaaagatgaaaagacattggtatgatcatctctgggtcgtttctctgacctatctgatcttgggctttttcaatatcctgtttgcatggttggggctcttctgcttctttatcccgctgatcatctccgctgtgaaaggaacaaaaggctactgcaaccgctactgcggcagagggcagctgtttggcctgctggggggccgcttcggtctctcccgcagaaaggacattccaaagtggatgaaaagcaaaggattccgatatggatttctggtattcttttttgccatgttctttgtgatgctctggaacacctatctggtgtttgcggaagcacaggacttaaagcaggtggtgacgctgctgtggacgttcaagctgccctggcagtggggctatcacggaacattcctccatcccggcgtggcgcagttcgcctttggattttacagcgtgatgctgacctccactgttcttggcctgatcaccatggtgctgttcaaaccccgcagctggtgtgtgtactgccctatggggaccatgacccagctggtctgcaaggcgcggaacagcgaagtgtgatgtcatcacggaacggccggtattctttaggtaaaatatgagcataccctctgtacactgaggggaaaatcaaaacagaaaggagcacttcccatgaggctgaaagataaagtggcgatcatcaccggaggcagccgcggcattggttatgctacggcggataagttcctgggagaaggtgctagggtcatcctgaccgcaagttcacaagcctctgccgaaaaggcggttgaacggctgaaagaaaaatatcctgatgcgatcatcgccggcatcagccctgatctggccagtctggagtctgtgcgggaagcgttcaggtctgccactgagaagtatggatgtgtggatatcctggtcaataacgcaggcgtttccgaaagcaccccatttatggaatacacagaggagacctttgataaggtcatggatctcaacgtaaagggcgtattcaataccacccgcgccgcagcagagtgtatggtggcacgggggacgggcgtgatcctttccacgtcctcaatggtcagcatctccggtcagcccagcggttttgcctatcccgcatccaaatttgcggtgaatggactgaccgtatcgctggcccgcgaattgggacccaagggcatccgtgtgaacgcggttgctcctgggattacggagactgatatgatgaaagcggtgcccaaggaggtcatcgagcctatgatcgccaggatcccgctgcgccgcctgggccagccggaggatattgccaacgcatttgcattcctggcctccgatgaggcgtcctacatcaccggcgttgtgctgagcgtggacggcatggcaaggacctgacgagtcgtaaagctgtggtaagtggcagcctcagaagcagattgcaatatggatcagtaaatcaaactcatatatgatcctgcaaagggatacagacagaaaaaggggctgctatgcaaagagaacagtttgatattaccggtatgcactggtccaccagagtggagcggtgtgcggcagaactgcccggtattgcgtcagtctggaggacaaaacagcatctgtcaggctggatcgacctgcaacagacgacgccttcaaagccgctgtggaaaaagctgggcgttagctgctgaaaatcagataaaaagctgaaaatgtccgccgagttgaacacaaggcggacattttattattgaccgtttaattcttccagctttttggcattggtgatctcgatgctgctgcgggacagcttgaccatcccctcattctgaaaatatcgaagcattctggtgatcacttcccgatgggaacccaggtgattggcaatggtctcatgggtgattttcagatgactggtcccttcgatagacacttcctccaacaagaatgcggctacacgcttgtcgagactcttccacatgacctgctccatgagccacatgacatcggagaagcgagaggccatcagttcgttggtatagttggaaacaggcgcagatccttccatgatgctctgataaatttcggaaggtattacccaaaggtcagtgtccttttccgcctcaacggtcacttcgaactgaatggaacgcatgatacaggaggcggaaaacaggcacatatcccggtcaaacagacggtagatggtgatctcgcgcccctcgtcggagagaatataggcccgaagctggccagacttcaccaacagaaggccggtgcagtccatgcttccattgtggatcacggtccctttgcttaccctgcgctccatcaggctgccaaggatgcgttcctgctgagccggtgtcagcttgttccaaaccgggaaatagctttgaaagtccataccgaaccctccttctgcctatcagtatattgaaatcatcaagacctgtcaactgactcgttgacaggccgcgttagctgatctgctcggtcagttgccatactttccggaaggagcccgcggcggtggtgaacgccggttcagggctttgctgaccagactggcgagggggctgtcccctgccagcatgagagtatcgatcagcccgccgcctccgacttccggatatccctttgtccgctgcccgctccgcccatgtggtgaagtgggcagcggacaaggggatcaccgccggaactacggccgccactttttctgctgacaacacctgcacccatggatcttgacattcctatactgcgacttggcgtgacttcgtccgaacactttgtaaaacagcgcaatgtgatatgacccctctaaggtagatggttgcaactgagaatcatttttcggtggcttttttgctgctgggcaggcagttgaagattataactggcgactatcctaaagaatcgcttcctctaaagcattgaccaaacggggcaggtcgaaattttccatggagagatttaaaatactctctttacttcaggacaaacgcggatgtccaagagctggtgtcgcctgtaggccgcctgttctctcttccattgttaacaattgataaatacgtgacttgccccaaacggtacggcatgaatcactgtagcctataagtggagaactgtttgataaaggcgttatctcctcatgttcttaaagccgcaagcatgaaccagatctggtaactgggacagatcccggacaacaaaatgggcacctgccctccggaatcgctcctccaccttctggcaggccgtctcccgctcctggggagacatggcctcgtactcctgctggctcagccctagctcggagctgccctcgataacgcctgccgtccacacaccggcattgacgccctccttgatgtccgagatggtatcccccaccttgaccacatttcctaccgcagtaagtcccagggcctgcatgttggcaaagatcatgtaggggtaggggcggcccctgccccccactccgtcagggctgatccagaagtcgggggcatagccctgctgggccgccttgggcgccacaatattcatcatggcatcggtgtagccggtggtggagccgatcttcacccccatctcccgcagcttggctgccgtctccacagcaaagggcttgggggcggcgtactggtccagaatggagaacagctttggctcaaactgagcgtacaccgcatccacggcctcctccgtggcctcatggccgtggacccgcttccactcagcggcgatgcgctccatgtgcagcatggtgcggatgtggtcccgcttcagcattcccatgggcttgcgggtctcctccatggtaacgggcactccgtggtgggcaaaagcctccatgaaggccttcaccggagcaaagcagccgtaatccaccgtagtacctgcccagtcaaaaatcaccgcttcaatcatgcgatctgctcctttctctccttcaggaaggctgcaatgatgccggtcagcttgtcaatatcctcggggtaaatttccccgatattgccgatgcggaaggtatccatctcggtgagcttacccgggtagatggcgtatccccgctccttgatgtagcggtaaaactcttcaaaccggaaggataccccggcaggatagaagaaagtggtgataatggggccttgatggctgccgtcaatgtaggtagcaaagcccatggcccgcatcttctcaatgagcaggcggttattttccgtgtagcggcggcttcgggcggggatgccaccctcctgggccagctcatccagagccttggagaaggccagcaccacatgggtgggagaggtaaagcgccacttgccatccttttccattcccttccactggtccagcaggtccagagacagggagcgggccttgccctcgcttgccagcagtttgtcccggcggcacagaatgaaagagaagccgggcacgccctggatgcacttgttggcgctggacaccaggaagtcaatgccccagtcggccacagggatatccaccccgccgaaggaggacatggcgtccacaatgaatgtcctgcccgcgtcccggaccactttgcccaccgactggatatcgttaaggatcccgctggtggtctcactgtggaccatggccacatgggtgatagaggagtcctgggccagcaattgggccatatgggcggcgtcaggcaccttgtcgtagtcctgagcatagtggacaaaggggatgcggctgtgggtgcagatgtcggtcatacgctttccgtaagcgccgttggaacagatgagcaccttgtcttggtcgcccaccacgctggtgagcacgctctccacgccgaaggtgccgctgccctgcatcagcacggcagtgtagtcatcctcggagacatgggccagctccagcagctggcggcggatcttctgggtgacggccttgtagtcgtcatcccaggtgcagcggtccaccaacatctcctgctttacggtatccgtggtggtcagagggccgggggtcagcagtttataggtattcatggtatgaaagctcctttcgatcagcccttagcagactcggacagctgctggtgggcctggaacagttcaaaggtcagaggctcgtcaaagacggaagggttggcggactggttggcaggatcggcggtctcaccctcatagagggggttagggtaggtctggaggagctcctcccggccattctcaatgatacactgggccatctccatggccaggggattggtgctctcccccttgtccaacacggccgcggactcggtgagggagaagttgccctcggcagggtccacatagtcgatgggcaggccctccgccttgtcggccaccgcctggtggcgcaggccgaagccaatggctacctcaccagcccggcacagcttcaggggaccggaaccggaggtttcgatgtgagctccgcagttgtcataaattccggacagaacctcctgagctccgtcgtccccgtaggcatccaccagggcctgaatgagcagccatgcggtggaagaggactggatgtccgtgaccgccacctgacccgcgtagatcgggtcagccaggtccttcaggctggtgggagtgggcaggccctcggaggccatcagctcagtgttgaggatgatggcgccctcctgagaggtgatgggggcggtgtagtcgggaacctcagtgagggtattcacttcaaagtccagaggcaggaacatgctgttctgctcctgggcgctctggaggtagaaggtgctcatggtcaccaggtcggcctccagatttgtcccttccgccagcagcttgccccccagctcggaggtgccgtaggtctggaaaatgtacttgccctcataaccgttgccgtccaaggcgttcttcatggcggtgaccgcctcctcatcggcattggagtagatcaccacctgcttttctccgctgtttccggcgctgttgtttcctccgcaggcggtcagcagggagaggctcagggccgcagacagaccaatggacatcatttttttgtaattcatcacagaatcccttccttttttgtcgttttagaactgtgtttggatcgatacccggccagccaggagaacagcgccttggccgccagattggtggctaaaatcaacagggacagtacaaacacctcattgaagcggttgacatactgcagctgtttgatcatggtggtaaggaccatggtcctggccccggctatgaagataagggcgctgatggtgaccatggagttgatgaagtagtagctgaacacctcgatgagactggacagggcgtttggcgtgaccacccgcaaaatggtcttcagccagctgtcccccatgagcatggcggtggtctcccacccggcgttcattttggacagggcgttcttcatcatcaggtagggggtggagaagtagtgcacaatgttgcacaaaaccatcaacagcagggtgttctgcaaactggttccggagaagaggaacaggtaggacacgcccagcaccataccagggatggcgttggtcaccagagcaatgctctcaatggtccgcttatatccccgacccaggttgcttcgggcggtgatgagggccgctccgtaggtaatcagcgtaccggcggcagcggtcagcagtgccatgagcagggaatgcccataggcggccagcaggctgctgtctgagaggaccgtctggaagtgctccaaggagaattcggtctggtagggccactcctccaccgtgggaaccacaaagattacggcaaaaatggccagaattcccgcggaaattacggtaccggacaggccccatcccacatcccgcagagaatttttccgcagatccgcattggaaatccggctataccggatgttgaaccgctccaggatctgcagaatgcagatgctgccgatggaggggatcagcattaccatggcgatgacagcgccccggttgaagtcggggatcccgcccagcatctggttatagagcagggtggcaatgacctcatagcctccgcccaccgaggcaggaataccaaagtcggtaaagcacaggaagaaggcctggataaaggctccggcaaaggtccccagaagggggcgcagcaccgcgatccagaaagtggacagagccttgtcacccattaccttggagacggtaagggtctttttgtccacaaatcccatggtattgtggatgagcaaaaaggctacgggaatggtgtagatcacatagcccaccatcaggccgaaaaagccgtaaatatcaaacagctgccgccccagaaggcgggtgatgaggccctgcttgccaaaggaatagatgatggcaaagccataggtaatggtgggcaaaaacatgggcagggtggccacagcggtgataagccgcttgctccacttgggcaggccggtgtagtgcaccccataggccagcagaaaggccagcagcgtggccgctgccgccgaggccccggctaccgcgaagctgttgcccagggccgggagaaatcccttctgcgacagtaccgaggcataaaattctccggtcagtcccccgtcccacagggactttcccaacaagatcagaattgggccggccaggaacacagcaaacaggacaacaatgaccgcgaaaatcagcttcagttcacgattggtccgtgtcatggcttccccttatcctgcctggacggcccatgtgggacagtcgccaaacagggcatagatgttgttgcgcttgatctccaactggttgaggatgaacttacgcacgaagtcgtttttaggctggtgaacaatttcctccggcttggcgtattgggagatagtgccctgctcgatgatcagtacccgatcagagagggtcagggcctcctccgggtcgtgggtgacgatgatggtggtcaggtgatactcccgggcgatggtcttgatccggtccttgatggactccttgatcactccatccagagcggacagcggctcatccagaagcaggattttaggcttcatgaccatggtccgggccagggccacccgctgcttctgcccgccggagagctggtcaatgcgcttgctcaaatgctcccgcaggcccagcaggtcgatgagctcctccacctcttctttggtagagatccccggcttgttgcgcaggccgtaggtaatgttctggaggacgttcagattgggaaacagagcatagtcctgaaagacaatgttgaagccccgcttttccatgggggtatgagttaggtcctgcccgtcgtaacaaatccggccgctgtcagcatccacaatgccaaggatcaaattcagcagcgtggtcttgccgcagccggaggggcccagaatggaaacgatctctccgtctgccacctgcagggagatatccttcagcaccggcacaccgtcaaaggatttctggatgtgttccagttccagcataaaatattgctcctctctcggaaaagtattctgttgttccgtgccgccgtatccttccggcggcggcatcatactaccagttttattgcggaacaaacaagcacttcaaatttaagtttttgtaataaaaaagtaaaaaacgctcaaaaaaacctcccttctgtgtaaggaacttacacggaagggagaacgatttgttattcgtctccgtatccccggtcggcaatcaccgcaccgcttttgtcaagactgcgggaaaatcgctcatagtcgctttggatgatccccatgtacagaagatctaccaccgccagatccgggatacgtgaaaagatggcactgccatagatggacagggcgcgccctccggtgctcaggcacacatcggcgtatttccccagcaggggctctttgggactggtgatggcaatggtgcctgccccggcctttcgtgcctgcttaagcgccttaacagtatcaatggagcacccggaatgggacactgcaaccgccacatctgctactcccagatgggcggcagagatctgctggagataggtgtcggtgtgcatccggcagttgaggcccaggtaggtgagttttgtgagcagatcgctggcgggtgtgacggagttttccaccccatagatgtcaatggtccgggctgtagccagcattcgaactgcgcggctcagggcatcggcggagaggaatttcagcgcgtcctccaacagtctccccgcaatacgcgtctccttgaggggaaggccctccaggcggtcccagggcttgaggtcaaagtcacccaggtggtcaaagtaggggctctttggagattttccactccgatcccgcagcaggcagtatttgaagctccggtagccgtcaaagccaagcgcctgcacaaaccggaccaccgttggctggcttacctgtacttgatctgccagttctgcgatggtgcaccgggtgcacttctccggatcagccagcacctggtctgccacccgctgctccgaggggcgcagggtagcataagcgcttttcactcggtctaaaacctgtatgtcatgttgcattttcctgctcctcgctttgtaataaatttacatggtccaagttttttaagtgcgtgttattacaaaatattagtggtccatttgtaataaatactgaatttttttgatgcggatcacagctgattaccatggtcggctactctgtcaatgatgcgggcaaggcgtgcaccttttgcaaccgcacccaataaaaggtacacgcttccccgcagtaatgatggacagcagaccggaggaaagattgggcggcagatagatgtactgtttgaaccatttccttcccagcgccctaatctttgtattgtgttctgaggctcggcccaatctgggccgagcctcagagggcattttcgacagaatacagcgggagcacaccgccagacttccaggaaattctggtcttgccaggcaagtttcaacagcgtgaccatcagttgaaacctggctgtggtgaggctgctgaaatgcagcatcatggcgatggcctttccatcacccgcaggcttttcgcgcacaagctcagcttgtttttctccttaatgcttcttttatgaccgggccagaaacatatcgtatatcagcaaagctttttcagctaccgcactgcggtaaattctttgtaaaatatatcgaaatatttaaaggaaggctctcttcctgatatccatttgcaatgatgcagtaagaactgtagcaaaaggacattgcgcctgcctcaaggaaggcagatacccgctggatgctccctgtgttctttgtggaacgaatcagcggcctgcggaaaggcgaactggccgccctgctctggagcaatctggaggtggagcgcaaagcactgttggtatccaagtgggtcgtccagggcggagggatcaaggtgactcggcccaagacagcgacctatgcccgaaaaatctccatcccccaagaagcggtgaatttgctggtgcaggagcaggcggcggagaagatgggcagttttatgacgcatgtcatgtgagaataggaaaaagcaccggagaaaaggcaaatcccttttctccagtgctttccgcttctttcagcttgtgggccaaggccctgatgtatcccgcaaaagggcgcaaaaacaccccgcaaacgagtatgtttgcggggtgttttggagctggaaacgtgacttgaacacgcgacctgctgattacgaatcagctgctctaccgactgagctattccagcgtatcagaaacgtctgggccctgtctgggatgactggctctggagggcgggcagacggcgcacacggaataaaacataattttgctgcgctgagatatgtgcttaaatattatacgcagaaaaccggagtgcgtcaagaggaaaacgctgatttgtctaaactgtctgatttcgaaaatagcagccgcagttttttctcgccgcatcgcgccccgttccccgggattttaacagaaaacaaatattcaaacggcaaaaaatgtagtatgatagggggcggaagaagcgagacaattgcaaggaaacagggaaagaggtaacagttatgcctgaattgagaaagacaaagatcatatgcacactggggccctctgtggacgatgaggagaccctgcgccagctgattctggctggcatgaacgcggcaagattcaacttttcccatggcacgcacgagtcccagctggccacgctgcaaaagctgaagcgggtgcgggatgagctggggcgcccggtggccacgattctggacacgaagggcccggagatccgcatcaaggccttccgggacggcccggtgagcctggaacggggcgcccccttcatcctgaccacggaagaggtagagggcgatgccggacgggtgtcagtgacctatcagaacctggcaaacgaagtggagcccggctgtcacatcctggtggacgacggactggtggatctgctggtcaaagaggtgagagggccggagatccactgtgaggtggagaacgggggcgttctctccaacaacaaaagcatcaacatccccaacgtacatattcatctgccggcgctgacggaaaaggaccgggaggacctccggttcgcggtggagcaggactttgactatgtggcggcctcctttgtccgcaaggcggaggatgtggaggatatccgggaggaactgtgccggcacggtggacaggggatcaggattatctccaagatcgagaacctggagggtgtggacaacctgaacgagatcatcgaggcctcagacgggctgatggtggcccggggagacctgggggtggaggtgcctgcctgccaggtgcctgtgctccagaaagagatgatcgccaagtgtattcaccaggggaagccggttatcacggccacccagatgctggactccatgatgagaaaccccagacccactcgggcggaggtctccgacgtggcaaatgctgtattcgatgggacctcctgcgtcatgctctctggggagaccgcgtcgggcaaatatcccctggaggctgtgcgcaccatggcggacactgtgctggcggcggagcaggccatcaactactggggcaggttccagaagatggggttctccaagcgggcggaacgccccatcagcgatgccatcagccacagctgctgcactacggcactggatctggaggcgaaggccatcctagtggccacgcagtcgggaaactctgcccgggtgatctcccgcttccgcccaggctgcaccatcgccgcattcaccactacggagcgggtgcgccgccagctggccattacctggggtgtccacccattcctgttcgggtcagtggactccacagaccgcctgctttccctgtgtgtggagtgtgccagaaaggaagaggtggtgtccgcagaggatacagtggtgatcactgccggtgtgcccatcgggcagagcgggaccaccaacctgatcaaggcccaagtggtaggagagaagatctgagggatgggccccctttttataggaccaccataacaaagcggcacgccatctgggacggcgtgccgctttgctgtagaaaacagctttcaaaggagggagagctccgcagcaatggcgagggcggtctcgcctaccagttcgaagttgacataggggtgatagagggcctccaggtcgtcgtgcatggccttggcctgggagagggaatccacagcctcatccatcagggcgctggtgatcttttgggagaagcgcagccggggcctgctgcggcggagcagatcggcggagacggcgttgtccagaaggaggcgacgataggccttgccggggtaggggtgcgccggggaggaggaaagaaaggccagggagagctgggggatgagcaggtgttccagccggtccggcgccatgggagaggggcaggccaccacatcatagcctgccttcagggcacccgagagcagatgggccagcattcggtgggccaagccataccggtcggagagctcatagatccgctggcactggcactccactgtcccccagaggcacatctgcccgcggtgggtgacggcgccgagaaaacgctgtttcaccgtgccggcgggcgcccccttccggggcttcagctcccgatccaggatgccccgggcgcgtttggacagcttttcctccagcgcgtcggagtccaaggtggagcggacgtcgtacatcagctcggcagccgcatccagacagcggtatgcccgctggtagtgccccttgtagcttcgcatacaggaaataatggcggtgcggagtccctccatcccgttgtggtcatagcacttccccagattgatgtactgctccaccacccctggatatttcggctccaccacatgggtattgtccctttaggacacctcgtcgccgcggccttcctatccttcgcttccgccttgcggcgaaagctcactcattccggcgcggctcctctctccaccgaacccgctgccgctgggcttcggcgggggccccatatttctcaaaatttccagtggattttgacttcctgctggccagtatccgggtcctgctcaccgatctcgattttctcgatcagcatcactgccagctcccgggggagggtcttcagttccagcagttcccgggctttgtccatgacctcctcctgattgtggggctgctcctgaccacagagctcttgatcaatctgggccagtcgccgctccaggcggctcttttcctctaggaagtcctggttcagctccacaaactgtccttcactgagcacaccggacaccttatccaggtacaggtttttcagggccgtgctccgcttctccagctgggcgctcagggtgcgctgctccagcagcagggcctccaggtggtcgtcctttggcggcgggagctccagctcctccaaatggtagtaggccccgatgtagtcccggatgcgttgggaaaccagttctatcagccggtccagccggatggagtggcgggtgcacagcttctgcgtcccgctgtcagcataaagcttacagcgaagataatatacctgcgctttcccctttttcccgttggaggtcttgctcatggtgctgccgcagtccatgcacttcacaaggccagccaggggatgcaccatgccagtgccgtcctcccgggagcggatgtctagatttcgctggacaatctcaaaggtctcccggtcgatgatggcctcatgggtgccctccacccggaaccagcggtcccggggcatgacaatgatggccttggatttgtagctgacttttttggtccggccctgcaccatgacgccggtgtagatctcattgcggaggatccgccatacggtattcttgttccagagtccgaaatcctgcttgcagaagtgattgctgtcccagccccgctccgccttgtaccgggtaggattgaccacccccagatcgttgagcatgtgggcgatactctgcttgccgtggccctccagggaccagcggaagatctgccgcaccacctccgccgcctccgggtccaccaggagatggcccttgttgtccgggtccttccggtagccgtagatgggaaagccgccgatgtactgcccctgccgccgcttcatgtcaaagaccatgcggatgttctcggacaggtcctccaaataccattcattgacaagaccgttgatttgacgggcttttttgtttccttttacctctgtgtcagcattgtcggccacagcgatgaatcggatcccccagatgggaaacaggccgtgaatgtacttctccaccagttccatatcccgggtgaaccgggactggctcttgcagaggaggatttgaaacttcttctcctgggccgcctggatcatccggttaaagtccggacgcagactgtcggcaccagagtagtcctcatcgcaatagatgtggtaaatgtcccatccccgctccacggcatagtggatcagcagggatttctggttctggatactctcggattccttttgctgtttgtcttcgtcctccttactcagtcgtgtatagatcgcacaaagaatatgtcacacctcctaaaaggcgtaactgctcacttccatcttagcactgagagcagtgatacggcaagaaattatttgaaatccctacgccgccaaaacgcagcgtagggatcatttggtgagttcttttgtaagccaggcagtgatggcttgttggatgagggtgctgatgggggactcatcgttggattgtcgttgttcttctatgatgaatattgggtctttcacaaaaacacctccggggaattttatgactaaactgttgaaaatatgaaaaacggacgtaggtagtgcacatccgttttctaaatacaacaatatcgctccgtccctttcgataactcctctaaaaaggcatgttgtaatttgttgtttttcgcttataattttaattaagaataggcgaagtttgatgctttggggattatagatagttctcgcttggacacaaaaaggagagtattatgaatattcttagtcagaaaatcgctgctattgaaaaacacataagcacacattccgaacgttcggtagaggatattgcagcagttacaacattgaaggatttcttcaaatacgacggaaaaattataccgaactttgcagaatacgataagtggccaaacactgatggaacctttgagtttgtcccgaatcctgatattacgaggcgcccagagcaaagtttttttgtacaaattaaagggacaaagaattactcagaagataatggcgttataaaatactcgctgcgtagccttgcttttccagcttttatttaccgtggagttacgttggatccgggtatactatttcttgtcctcaatccaaagcagcgaggacaggagagaatctattggaaatacatgtctgtagagttccttaattctatagactatgaaaaggatagcgcgacaataagcttcacgccagatgaagaaatcaaagattcggatgaaagcatcgatgctttctgtgaaaaactcaagagtattatcaaacatcacacttttgttagcaagttggatgacaacgaaaggtctttggcagatatcagacggataattgacgcatgtgatgaacaaatcagcgagagtataaatagaatggaactctttaacgatacacgtgatgatgtttcaagaagaatccttaaccgattatatgatctatgcgttgctacactcctgttaaacactttgagtttaggatatgaaaaagcaaaccttcggttagcttgggaaaaatccatgctcaatataaataccaagtaccttggtactttcctgaaagcattgaaatatgtcggaaatcgaatcccaacagatggccaatcagaacgcttaatgttgaaatactatgatttcctttggcaaatcagaaagtatctgcgagagaattatagtatcgtcattttggaaaaccttgaaaaattcccgctaaacatagatgaaattaatacacaatactacgagtcagttgcccgtgcgattgagtctgcagatcttcgtcccagtgcagtatgcacatccagatattacatccagaaaaagactccgttttttattgacggagaaagatactatgaggttactttacagcttgcaggcatatatgcttcgaaatacaatcgaattactgcttacacaaaagaaaatatctctacaaattactccatcaaaattggatatactaatgtttcgatcgatctatggaacgttgattcagaaataaaaattataacaaactggactgtatcgattgagcctcgatgcctaaatagaatagcaaaaatattacgtttcgacacaaagcttaacactaaatatggtgaatataatgcgctaatggaattccttacaaaaaccggactcagctttttgaatttaattgatttgcaagaagtctcttttcgtgatcttgtagacccaatttatcataattcaaatactgctatttttaaacctgttttatacgaactccaaaaaagctattctgagcaatcaagcaaaaagggacgcaatgttgtgaggtatttactcataagtcttagagccgacacgatcgaaagcgtgcttcctacagtgtttaatccaaaatgcattagcgaagatctgtatatttcttctcgttgctttccgtttgagagaaatccgtttatctcaaatttagctgggagtaaaacaaccgaaaaccaacacgctactcaaattgctgcggctgctggatttgacaaactgagccgcgcccaaccttatcttgctatcagagggatgaccaaacaaactggtgagatttattttgaggaaaatacagttgcaagtaaggcgtccataaaggcttttaatgagagtcttgatgcatgggagcgtaaggctggacatttcatcactgaagaagatcattatgtcttcattgaacactatgagaaaagaacgctttgcatccttcaagagcttatcaatcgatcaaaaaagggaaataaaggtcaaagagaattcaaccaaaagtttcttaaacagagtgggattaacttttcggatccattgaaagaacaggcacttaaaactgtttttgtagattcacagatcttgctaatttatggagcggccggtacgggcaaaacaacacttataaactatatctcaaatttaatgagtaatcatagaaagctatttctgaccaaaacacatacagcgttgcaaaacctgcagaggcggatcgacaatcctggaaatgacgcagagtttgtcagtcttaatagctttacaaaaaaggttatgttggatgactatgatgtgatttttgtggatgagtgtagcacgattgacaatcgtaccatggttgaattttttaaaaaagtcggaccagacacctttattgtcatggccggcgacattcaccaaattgagtctattgagttcggaaactggttttattatgctaaagaacttatcagaggccgcggcgcaacgatcgaactactaagtacgtggagaacgcaggatactgatcttatcagtctatggactgaagttcgtacaaaggatatgctaataaccgaaaaattggcattggacggcccgtattctgaggatataggtccggatttattacagccaaaagaatccgatgaagtagttctttgccttaattatgatggaaaatttggattaaacaatattaataggttttttcaaaatgcaaaccaaagcggccccgccatcacctggtatgagtggacctacaaaaaaggagatcggatcctttttaatgaaacaccgcgcttctcagtgctatacaataacctaaagggtaaaattgttgatattgaagagggacatgatcaaataacttttacaattgatgtcgaagtagttttgacagaaaaggactgcaaaagagaagacattgaactgattgaggttcaggaaaactttacccgcattcgtttttcagtgtataaatatgatgagggttctgcggagggagacgaagaatatctgcaaatgagatctgttgtcccgtttcaacttgcgtatgcagtttccattcataaagctcagggcctagagtatgattctgtcaaggtaataattccaagtaataatgcagaaaaaataactcatggtatcttctatactgcaattactcgtgcaaagaaaaaactgaaaatttattggagctctgagaccatgcacgaggtcatagagagcttctataaagacgagcgaaaaggtaaaagcttagaaataattaaagctaaactttcggtgaattagcaacgtcattgaacaacttaatgaaggcccagtttcaaaatgagctgggtcttcatttttataatatagcaaatccggttatatgcttctgcctttgctttgtaagtatcaaatctaatagtgtataaaaacaccgtatctggttggataccagacatggtgttttgcgtgaataagccgaccgaaatggctccaacactttcatttatacaaagtaattctatgtagagtttctcaaagtagaaggcaggatttcccgaaaatcaggaaatcctgccttctgaagttccatagatccttagatgcaaaacgccgcgtacagcggaaccgacttcaacccatccttctccccgaaattcttcagcgacagccggatggagtaggccggcttatagttgtttacaaacacactcaggctccgggagcggacatgctccccttttttgacctcaatgccgatgatctggttgcccttctgcaacacaaaatccagctctgccgtactgttgctttcccaatagtaaaggtcgtaacccttggcggccagctgctgggccacatagttttctgtgacagcccccataaaggtattgccctcgccggagagcaccgtctgctgagagatcccggatttcatcgtcagcagccccacatcccccatgtagagtttgaacgctgagagatccgcatagacggcgattggctcaaaggcctgattgatgcgctggcatttcagcacgacaccggccagattcagccactcgatggaggccccgaacagcgttgcgctgccgcctttctggacgaccttgtactggaatttcttgttttccttagccagctgcgccgggatggagttatagcaggcccggatctttacactgtccgtattgcttgcatactttgccatgtccgcgatatagttatccaggatctcattttgtaccagcggaacatccagaaagctgccgcttttcaaaaagacattgatgcaggcgggcatcccgccgatgatcagatactcccgatacagctcgacagcctcttggtgcagggcatctggcagcggctccatggcgtcataggctgcgcgaatctcctcgctgaggagttcctttcccctggcccagagatattcctcgaaatccagcggatagagggtaatggtctccactttacctaccggaaaagagtaatgctgacggttgatcgccaccccaagcaggctccccgccgccgcgatatggaactccggcgtctcctcgcagaaatacttcagggaggtcagcgcgcgctcacaggattggatctcatcgaaaatgatcagcgtctctcccggaatgatgcgctccccagtggacgcctccagataccgcagcagtcgctccggctggatattctcattgaagtaagacgcaatcgtcagattggtttccagattgatatagacgacattctggaactgctcctctccgaatttgcggaggatataggtctttcccacctgacgggcgccgttgacaatcagcggcaggcggtcggcagtcttttgtttccaggcaatcagctgttcctcgatcttgcgcttcacattcctcacctcacgagtacagcatatctttaatttgcagttaagtcaagaaaaatatgtcgcttttatatttttcttgacttatagcttcttttggcatcttactcctgcatacgcccggagaagaacaccgtcttacgttcctccatatcgcacatcatcgccgccagatggacgcagagaccgccggcgcggcaggtgcagtacagatcctctatctctgcgttttcgtccaatgtgatctccgcgatgatgcgctccccgtcttcggcggggaactccgcatcaaattcacaggtatcgctgggctggaccgcaaagggttggatgctcttgtaatactgtttggtgagttccagatcctccgccgacaggtttttcaaaatcccttgaatcgtcatggcatattcctccagctaaatttttttcagcgtctgtgcgctggccagttttgtttcatattccaggtgggcatacaggtccgccgtcgtggacagcgtactgtgtcccagccattgctgcacttcaatcagaggcgtccgcctctggatcaggagggaggcacaggtgtgccggaggtcatgcaggcggatctcccgcaggccgtgatcccggagaaactgtttgaagctttggctgaggtagttggacgcgatgggctctccctccggattcaggcagaggtagttctccggcggcggagtttcctccccatagcggtttcgtctttcctcctgcaaaatggcggcgatctcctccggcatgggaagtgtgcggcagctggctttctgcttcatggtgtctctccccacggagacctttcggtcatccacctcctgatagaccctggtatgctggatctgaatggtgcccacggagaaatcaatgctccgccattgaatccccagcacctcgctgcggcgcaggccgtagaacaggcacagtatcacgggcagccagagccagtgcccccggagcttgtccagcagttcatttgcctcctccagtgagtagtaccgcgggatataaggtactttctttggccgctccacaatatcggctacgttccggtccaccaggtccagccgcaccgcgtctttcagtgccttgtggatattggcgtgatggtggagaatcgtattgcccgatacccctgacgcaaggagatcgtcgtagtatctctggacatctgacgcacgaagcccggccagtgtgatacgcctctcccaaaagtaagggcagatgctgttttccaccagattccgatagccagtataggtcgtgggggatacttttgctttcatgatccccagccactggagcatatagtccgcaaacagcagcccactttcccccttggaatccgcatattgatgccgggtctgaaagagcagttcctccgcccgctttcgattgcccggtaccgggagatgggtggcgatccacttcgtctttcgtctcccggcctggtcatgcaaattgagtaccatgtaccaatagccttttttctgctgcaaatgtcctgcaaccatcttttctcctcccaatagataaattcaagggagcacggccaggcgcactcctctttacaatccgtgtatattcacttttaaactgccccatatggaaatgttagacgcaacggactcaaaatccgttatgtgtaatggtatatgggttcgaattccgccgtgaataccacacctgaatggtttggtttccaactcttgaagcgcaggcgttttctataggcaacccttcatttacccttctctttcgaataaataccgaactcagaaaagttgatttgatttttcgttaaattttccgaattcggaaaatttatttttgagcagttacgcctcttatcaaatagcttgtcctacaaaagtgtcctaagtaaccgtgcccggtgcttgtgccgtccaaaagctgatcccgcaaccccttgcaaatcctgacttttttcgccgggtgtcctaatggtgctgtgtcatggggggcggtgccgtccaccagagcggcctttttgcctgggaggaggatggcatccagggaatctgggtcaccggagcagaggatgtactccacgggctcgcctgcctcctgggccagggcagccacgcggcgcatcagggtggatttcccacagccggggccgcccttcaggatgtagatggcggaggcctgctccggcggaagaagctggtcgtagagagaatagaatcctgtgggggagtttgcccccagaaaatactgtatcgaattgacaggtgacatggccgaccctccgtttttgggcgccggagggaaaatttcccccgtgcctctgattttctatctcagactatgcggcggaggggggagaggtgcggcgggacttgggtgaccaaagagaaaaagaaacatgggtggaaaactgttggaaatttgtattgacagaggtggaagagttgcgataaaatgacataaaaaatgaaagaaaacttgcaaaagttgagggaagaagagaagatgccagcggaaaaaccgggaaaatgggactggcagagagaagagggagacaatgcgtacatttgaaacgaagatccaggaattgaagaccgcggtgcttacagaggtggcccgcctgacctgggaggacaggctccagaccgggactgctattctggacatcccggagaagatcatccccgggcccacggccacgctgcgctgctgtatttataaggagcgggccatcatcaacagccgggtcaagctggctatgggaggggacaagagcaacccctgcctggtggaggtgctgcctatcgcctgtgacgagtgtccggtgaccgagatcaccgtggggccctcctgccggggatgcctggccacgcggtgcgtccatgcctgccccaaggatgccatcactattgtgaatcaccgggcctgtatcgaccatgaaaagtgcatctcctgcggccgatgtgtatccgcctgtcagtacagcgccattctcaagacccagaggccctgtgagaagggctgcccggccaaggccatctccatgggcccggaccggaaagcatccattgacgtgagccagtgcatcgcctgcgggaactgtgtgtatcagtgcccattcggcgccattcaggacaagtctttcatcaccgatgccatccacatgatcatgggtgctgagcactggggctacaagacctatgccgtgctggccccctccatcgtggggcagttcgcccccgcctcctacggccaggtggtggccggattgaagaagctgggcttcaacggagtggccgaggtggctctgggggctgatatggtggcagatcgggagtcggaagagctggtggagaaggggatgctgtgctcctcctgctgtcccggctttgtggggtacatcaagaaaaagcacctggagatggagaatttgatctcccgcaccccgtcccctatggtgatgatcggtctgcacatcaaggagaaggacccggatgccaaggtgatcttcatcggcccctgcgtggcgaaaaagaaggagttccagctgggccgcaccatgaacgccattgactgcgccctgacctacgaggagctgttcgccatgttcgagtcccgcggcatcgacctggaatccctggaggaggccccgctggacgaggcaagccccttcggccggaacttcgcccgcagcggcggtgtggcccaggcggtggcggaggccctgaaggagaaggggctggataaggagttccagctgaaggcagtgccgtgcagcggcatcgaagcctgcgaggtggccctgctgaaggcgaaacggggcgtgctggacggcaactttatcgaaggcatggcctgtgacggcggctgtgtccagggggccggctgtctggtgcgcagcccccgcaaccggatggatgtggagggccacgctaagcaggccagcggccgcagcatcaccgacgcggtggccggccgggagctggtcccccaggacagcctgggggagaaggtcgtccctgtgcccaagcctcagccaaaggcggaggcggcggccaaaacagagggcacggcccggaaggcctgagcctcagacagaaagccggacgccggacctggatacaggtccggcgtccggctcttgtttcagggcggagagagggcaggagcagacacagaaacgcggcgcggccttttggccgcgccgcgttctggctgcgcccggggtcacagcccctcggcatccaccaggatgttgtcagtgccatgctcctcgaactcggtgatgtaggcgtcgatccggctggtgagctcggcaaagttgctctcgtcgatggggacatcatccatgtcccgacgggccagatcctcggccagaatatcgaagaatacgttgttctcatactccatgatggcctcgtggatgccgccctctgcaaaggcgcgggaggggacgatctccccctcgtacacctcggccagggcgggcataccgctgaccagggccttgccgaagacaaggctttctacctcgtcgtaatccgcgaagcgctggtctccccgtgtggagttgaggatccagttgccgatatagaccaggtccagcaggcgccgaaactgcttgttggtaaattccagagtcatccacaggacctccttttgttggaagctcgggcggggagatccccctctctatattatagtatatgtgccatatttgtcaatcgccgagggagctttccgacagtgcgccgggagggaggaccgtggagggataccacacaccgccccgattgggaaagaaagcttctgcgcaggcaggcgaggataggacgtgccgctgcttgaaagaatagacaggaaagaggcgagatatcctgaggcgagaaaaattttctctgcttttttaaaaatattctgggctgccccttgcaatccagaactttgtatggtatagtgaaacagtaattatggtagtattggttagagtggggctgcggctccgctctttttgattgagaaaatgggggcacattcagccccggacaggaggaagtccatggcgaaagtgaccgatctggtggcccgactggcgcagccgctggcagaggcagcgggctgctccctttgggatgtggagtatgtcaaggaagcgggcacgtggtatctccggatctacatcgacaaggagacaggtgtgtccatcgacgactgcgaggcggtgtcccgccccctgtccgacgcactggatgaggcggaccccatcgagggaagctataccctggaggtgtcctccgccggggccgaccgggtgctgaagaagccggagcacttccagcgcttctgtggagaagaggtggaggtgcgcctctaccggcccaaagacgggaaaaaggactttgtggggcgtttgacaggctgggcggatggggatatcaccctggagctgaacgggatgcccatcacgtttgagaaaaaagaggtcgcccagacgcggctgtacccccgcttttgatacgtttaggaggaattaccgtggctaagagagtaacgaaaaaggtcaacagcaccgagctggacagcaaggagttttttgccgccatcgcccagatcgaggaggagaagggcatcaaaaagggctatatgatggaaaagatcacccaggccctgatctccgcctaccgccgggaccacgagggggtgggtgacaacctgaccgtggaggccaacgaggagaccggagtggtccgcatgttcctgaaaaaagaggtggtggaggaggtggacaatccgggcactgagatcagtctggaggaggcccgcctgtccctgccccgagtggagctgggggacaccatccgcattgaggtcaagcccaagaacttcggccgcatcgccgcccagactgcccgccaggtcatcattcagggaatccgggaggcggagcaggggatgatctatgacgagttcacctccaaggagcacgagatcctcactggcatcatcacccggattgatccccgcagcggtgcagtggccctgcgcatcggcagcggctccgagagcacggaggcctacctcagcgtcaacgagcaggtgcggggcgagacctatcaggagggcagccgcctgagggtctatgtggtggaggtgcgccgggccaccaagggtcctcaggtgctcatctcccgcacccaccccgggctggtcaagcgcctgtttgagctggaggtgcctgagatctatgacgggacggtggaggtcaagtccatcgcccgggaggcgggctcccgcaccaagctggccgtctggtccgctgaccccaatgtggaccccatcggtgcctgtgtcggccccaggggacagcgggtgaacaccatcgtggaagagctgaagggcgaaaagatggacatcatcaagtactctgacgaccccgccgagtacatcgccgccgccctctctcctgccgacgtcatcagcgtggagcccctgcctgacggcaagagctgccgggtggtggttccggatgatcagctctccctggccatcggtaaggagggccagaacgcccgcttggcagccaagctgacgggctacaagatcgatatcaagccggcctcggcccccctggagcccatcgaggctcccgaggaagagctgttcgtagaggaggccgaggcgcctgcggaggactccgccgggaccggggagaccgctcccgcagaggaagactaaccgtacaggaaccgggaccggggagctggggatcatccccctccccatcattccttacgcctaattcctaattcgtcgaagggtggtgcggaccgtgcccaagaagctccctatgcgccaatgtgtcggctgccgggaaatgagaccgaaaaaagaactgatccgggtggtcaagtccccggaaggggccatctccctggatttccggggaaagctgcccggccgcggggcgtatctgtgcccggacagcgtgtgtctggcccgggcaagaaagtccaaggccctggagcgggctttcgcccaggcgatccctccagaggtctatgagcgcctggaggagcagatgaaggaggtgcccggcgatgccccatgaccccatcctccatctcctgggtttggccaaaaaggccggacggctggagatcggagaggaaccggtgggcgcggccgcccgggcccaccaggcccgcgtgctcctgctggcggcggacgccgcccccaatacggtgcggcgggccgcccacttcggagaggccgggggcgccctgtggctccaaatgcccttcaccaaggcggagctgggggagcagctgggacgcagctcctgcgccatgctggcggtgaccgacttcgggttcgccgccgccctggcggagaagctggccgctcgggacgaggagcggtacggccccgcagctcagcagctgagggctaaggcggaccgcgccctgatgcgccagagagaaaaacgccagcacgagaaaaatatgagacagggaaagcacaagccctgggcggccccgccctctcgccccagcaagagggcagaggccccgccgacagcgtccaggcgggagcggggcaaaggcggctcaggcagacggccgggcaggccggagaccgggacggggagagcgccccgaacattccccgggaaaccggggccgggcgggcggaagctgactgcgaagcccagatccggcggcaggaaccctgccgggaaaccctaagaaacgaggtggccctatatgatgaacaaataccgtgtccacgaggtggccaaggacttcaagctgaattccaaggacatcgcggagatcatgaccaaatacagccagacccccaagaaccacatgcaggtcctggaggagcgggagctggccgttattttcgactatctgacccagcacaaccaggtggagaacatagagtccatttttgcggacgtctaccatgagcccaagccggcccaggcgaagccagcccagccgcagcagagcgccgccaagccggctgccaagggggagagcaggccacagagcgctgcgccccaggccgacaagagcggggagcagccccgcgctcagggaggcaagccggagcaggcccaggcccgccccgccacccgcgtgccggagaagaaggtggtggacacccgcaagggcggagccgtcaacctggagaagtacgacgagcggctggagtccttcactgaccagcgtcagcaggaccggggcggcaagcagaagttccagggacgcaatgcccagcgccagcgcggccgccagcaggggccgggcaacaagcgcaagcaggaggagcaggagcgcctgcgccgtctccagctggagatcgccaagaaggcaccggtgaaggtgctgatccccgatgagatcggagtgggtgagctggccagccggatgaagaagaccggcgcggaagtggtcaagtgcctcatcaagaacggggtcatggcctccctcagcgacatcatcgacttcgacaccgccgccatcatcgccgaggagatgggctgcaaggtggagaaggaggtggtggtcaccatcgaggagaagctgatcgacaccacggaggacaaggaggaggatctgcagccccgcgcccccgtggtggtggtcatgggccacgtggaccacggcaagacctccctgctggactatatccgccacgccaacgtggtctccggagaggcgggcggcatcacccagcacatcggcgcctatcaggtggatgtgaagggcagcccggtcaccttcctggacactcccggccatgaggcattcaccgccatgcgcgcccggggcgccatgatcaccgacgtggccatcctggtggtggccgctgatgacggcatcatgccccagaccgtggagtccatcaaccacgccaaggccgctgagatccccatcatcgtagccatcaacaagatggataagcccaccgccaatcccgaccggatcatgcagcagctcaccgagtatgagctggtgcccgaggagtggggcggcgagaccattatctgccccatctccgccaagacgggcatgggcattgacaacctgctggacatggtggtccttaccgccgagatgcgggagctgaaggccaaccccaaccgttccgcccacggtgccgtcatcgaggccaggctggacaagggccgcggccccgtggccaccctgctggtccagaacggcaccctgcatcagggcgatgtcatcatcgcgggcaccgccgtgggccgtgtccgcgccatgaccaacgcccagggccagaaggtggagtccgccggcccctccgttcctgtggagatcattggcatgagtgaggtgcccggtgcgggcgatgacttccacgccgtggctgacgagcgcatggcccgggagctggtggagcagcgcaagcacgagaacaagatggcctccggcagcgcagtgggcaaggtcaccctggaggatctgttcagccagatccaggccggtgagatgaagaacctgaacatcatcgtcaaggcagacgttcagggctccgctgaggcagtgaaggcatccctggagaagctgtccaacgaggaggtccgggtccgggtcatccactgcgccgtgggcgccatcagcgagagcgacgtgatgctggcctctacctccggtgccatcattgtgggcttcaacgtccgccctgacgccaacgccaaggagaccgccgcccggtccaatgtggatatgcggatgtaccgggtcatctacgacgccatcaacgaggtggaggcggctatgaagggtatgctggcccccaaattccgagaggtggacctgggccgggccgaggtgcgcaatgtgttccgcatcaccggagtgggcatggtggccggctgctatgtgctggatggcaagatgcagcgcaacgcccagatgcgcctcctccgggacaacattgtcatttacgacggggccatcgcctccctccagcgcttcaaggacagcgtgaaagaggtggccgcgggctacgagtgcggcatcaccttcgagaagttccaggatatcaaggagggcgatattgtagaggccttcctgatggagcagatcgaggtctgaccttcctctgtctctaggcagacccgcagttccgagatgggccgcaggagatacggaccctgcggggacgaggcgtgctcccaccagcggcggccggagtaccggagtaaaaggaacaaccgaaaacaggcccgttccatccccaattcatttgaggaggggacgggtctgtctgcgtgaaaggagctgtgctgtgagctatgtgatgctggtggcggccgatcaccccctgccactgtacgactccgggatacgccggagctctgcttccacagcgggcggagcgtgcgttcaggtggagactcccggattttccatccagccgcatcagtattaccgggacgcggtggaggcactggggctggagatgaagctctggcagtacgagctgaatgtcgaggccgcagaagcggaggcggagcagctgagggcctacctgaagcgcagctgccgccctggcgagacaatagagctgtggaatttgtgggtgggagacgaccgggaggagaagatcgcccggttccaggggaggctgggcgatctggaccgggaagccctggagcagctgtgcgaccctcccacacaaaacggctgccccggccagtgccggatggcggtcaccatttgattttcatctgcgggcggttttgcccgggaaggaggaccaactatggcaagcaatcgcatcggacgcatcaacgaggagatccagcgggagctgtccgctctgatccccgcggtcaaggacccccgggtgtctgggatgatctcggtgacagcggtggagaccaccccggatctgcggtacgccaaggcatatatcagtgtactggacaaggagaacggggagcgggtgctcaagggactgagatccgcctctggctggctgcgccgggagctggggagcgccctgaagctgcgctacaccccagagctggtgttccagctggatgactccatcgacaagggagcccacattctggagctgctgcgcagcgtggaggggcccaaggagtaaacagaggcccggagggcaaaggagacctggatatgaatgagcgacagacagcggagtggctgatggaacgggaggattttctgattctcacccacgtccggccggacggagataccatcggctgcgcagcggggctgtgtctggccctgcgggggcggggaaagacggcctgggtgctggaaaacccggaggccaccagcctcttcaccccctatctggaggggctgaccgccccggagggctggagcccggacaccgtggtatcggtggatatcgccgcccgggggctgttcccggagaacgcccggtgttacctggagcgggtggacctggccatcgaccaccacccctcccaggagttttttgcccgggagacctgcttggacgccgggcgggcggcctgcggggagctgatctatgatattgcgggcctgctgggcccggtcacccgggagatggcggtgcccctctacgtggcggtgtctaccgacaccggctgcttcgtctacggaaacaccacggcggacacccaccggacggcggccgccctgatggagaccggcatccctgcggcggagctgaacaagcgccacttccggaccaagaccctgaagcgcctccggatcgagagccggatcgtggagggtatggagctgtttgacggcggggagaccgccgtggcggcggtggacctggcgatggtggcccagctgggggccgacgagcgggacctggaggatatcgcctcctttgtgggacaggtggagggcgtgaagaatgcgatcaccatccgggagctgaggcccgggacgtgcaagctgtccctgcgcactgatccggaggtccttaacgccagcagggtatgcgccctgctgggaggcgggggccacgccgccgcctccggcgccacggtggagggcagcgtggaggaggccaagcgggccatcctgtgggcgatagagcaggtgcgtcatggctgacggcatcatcatcatcgacaagccccaagattggaccagtatggatgtgtgcgccaagctgagagggatcttccacgaaaggcgcatcggccacgccggtacactggaccccatggcgacaggtgtgctccccgtgttcgtgggccgggccacccgggcggtggagtttgcctccgagtcggagaaagagtatgtagccggcctgcggctgggggtggagaccaacacccaggacaccaccggcacagtgctggcgaagcggccggtctccgtctcccaggcggagctggagcaggtactggggcagttccggggagagatcctgcagatcccccccatgtactccgccatcaaggtgggaggaaagaagctctatgagctggcccgaaagggccgggaggtggagcggcagccccgggccgtcaccatccacagcctgacgctggaagagcagacggggccggcggattacaccctgcgggtccggtgttccaaggggacctatgtgcgcaccctgtgtcatgatattggccgggcactggggtgcgggggctgcatgagcggcctgcgccggaccatggcggccgggttcaagctggaggacgccctgcctctggagcaggtgctccaggcggagggacccgcgtccctgcttctgggggtggacgcctactttgctgaccgccctgtgctgatcctcaagcctccggcagagaaaaaggtgcgcaacggcatgagcctgttcctgccggagacaccggacggggagtaccgggtctatggggcggaggggaccttcctagccctgagccggatggagcggggaaggctgaccaccatcaagagcttcttcccggtgtgagcgcccggaagtccgcagagagaaaaagaaggagacttatcagattgtgaacaagaacagacgagtgatcgccctcggcttttttgacggagtccacaacgggcacggggccctgcttcgccgggtggtggacaaggcccgggagctggatgcggtggcggccgcattcacctttgaccgcagccccaccgccgccatcacgggccagacagtgcccctgctcagctcggtggaggaccggggatggctgatgcggagccgctacggcatccaggaggtggtggtgtccaactttgatggcatgatgcgcatggactgggaggactttgtggaccggtatctggcggaagaactgggcgcggtccatgtggtggccggccacgacttccacttcggctatatgggcaagggcaacccccggcgcctccaggagaagtgcgcccagttgggcatcggatgtgacatcatccccaaggtggagcaggacggcatcaccatctcttccacctacatccgcaccctgatcgcccagggggagatggagcgggcggtccagttcctggggcatccccatgtcctgactcagaaggtggcccacggcaaaaaaatcggcagcagcaccctgggttttcccacggtgaacctgcatatcccggagggagtcatcgtgcctgccttcggcgtctatacgaccaaagtctgcttcgggggggagagccgtatcgccgttaccaacgtgggggtgcgccctacagtgcaggacggagaccgccgggtgacggtggagggcttcatcttggactttgacggggacctgtacggtcagacgatgcggatggagttctatcaccgcctgcggggggagcggaagtttccctctatggaggagctggcggaggagatccgcaggaacgcccagcaggcccgggaatattttcaggaaaaggcggagtatcaataaggagaggggaaaagaggccccgccgcgccacaggcggcagaaaatcgaaaatcggatcgggagggactacgaatgccccattcacaggatacacgccacatgcggtacgagaccctgtatatcatgctgctgatctttgcctccgggcttttcctggcgggcgcgctgctggataccccggacaatattgcacggggcctgatccgcatcgtgatgacggaggaccccctcatcactgactatgtccggctggccggcgtgggagcagccctgatcaactcctctgtagtcaccgccctctcggtgctgatcctgcgcagctctggggaaccggccaacggcttcacgctggtggtggtaggattgatggcggggttttccctgtttgggaagaacccggtcaacacctggcccatcgtcctggggacttggctgtacgctaagagcagaaaggagccctttggaaagtatgcggccgtggccctgctgtcctcggccctggggccggtcatcagctatatcatcctggacaacggctggggcaccccggtgcttggggtggcgaccggcctgatgatcggctttgtaatgccctctctgtccgcctatacatacaagatccagaacgggatgaacctgtacaatgtagggtttgcctgcgggctgatggccatgctgctggtgtccctgatgagctccttcggggcggagccggaggtctcttacctctgggccacagggtacaacgctctgttcggcgggctgctggggacgatgtgcatagcagccatccttgccggcctgtttttctgcaggaagccggtctgggcggcctgggcgggttaccgccgcctgctccagaccagcggccgggcccccagcgactatctgcgcatgtttggcgcggcgccggtgctgatcaacatgggggtcaacgggttgatcgcaatgggggtgatcctgctcaccggcggggacctgaatgggcccacagtgggcggggtcctgactatcgtgggcttctctgcctttggaaagcatgcgggcaacatcgtgcccatcatggccggtgtggtcctgggcagcttcgtgatgcactcctcggtctccagcggcgccgtccagctggccatgctgttcgggactaccctggctcccatctctggctacttcggctggccctacggcgtgctggcggggttcctccactcggcggtagtattgtatgcgggcacgccggtggccgggctgaacctctataacaacggcttttccggcggcctgctggccatcatcctgtatcccaccatcgtggccatcgcccgccaccgcaagccggtgatcaccgaggcggagtacttcgaccacatggagcacgacgagccggagaccccgcctccagttcaggacatgatcgaggaggaggactgagggagcgccccggctggaaaaagaaaatggattttccatacagaacttctttacagagcgggatggggagtatataatcattccgcggcaggggggcggcgcaggtgtgcgctccggcaagaccgcacgggacaacgtcattttggaggctgctatggaaaaagaggtcatcatctccatcaaggggatgcagaaatatgagaacgccgaaccggacaccatcgagctggtgacaggggggcgtttggagcgggacggcgagagctttactctgtcttatcaggagagcgccgtcaccggcatggacgggaccctgaccaccttccagatagagccggagcgggtgaccctgctccgggtgggggagtacacctcccaaatggtgtttcaggaggggcggcggcacatgtccatgtacaacaccccctatggcaccatgtccatcggggtgaacacccggcatttgacagcccaggtgggcgagagcggcggcgacattgagatcgattatgccatcgagatcgaccacacggtggcgggacgaaatgtatttcagatcaagatcaaggaggcggcaccgggctgtagcttgaagcagtagcgtggtcgatctcgattgcgggcgctccgcgcccgcaccgcagggcgggatcgactcccgcccgaggaatcaaagagcccgggaccccgccgcgggccggcccgcggtgggcgatcgaccacacggtggcggggcgaaatgtatttcagatcaagattaaggaggcagcacccggctgcagcttgaagcagtagtgcggcccactccagcgagaaagaattattgtaaggtgtgatacgagagatgagcaatatgatccaggccgcgcgggctcaggtcgctgagctgacccaggccgcgtacgagagggccgctgcagcaggtgtgctgaccggcggagcagaggtgaaggccaccgtggagatccccaaagacaccgctcacggggactatgcctcctccttcgctatggcgggggccaaggccctgcacatggccccacgggccattgcccaggccattgtggaccacatggacctgacagggagctatttccagaaggtagacatcgccggccccggttttctgaactttactctggggcccaagtggtacggccaggtcctcgcccaggtggagcaggaggggcctgagtacggctccggcagcgaaggaaagggcgagcgggtgatggtggagttcgtctccgccaaccccaccggccccatgcacatgggcaacgcccgtggcggcgtactgggggacaccctggccaacgtgctgaagcgggacggctgggacacctggaaagaattttatgtcaacgacgccggcaaccaggtccacaaattcgccatgtccatctacgcccgctgcatgcagctgacggtgggggaggagaactaccccttcccggaggagggctaccatggggacgacatccgggagctggcccggggcttcctggcccaggcgggagagtttccaggccagacctctcaggatgcgtgggagaccgctatggcggaatatggcctgtccgtcaacatccccaggatgaaagcggacctgaaaaagtacggcatcgagtatgaccagtggttcctggagtctgaactgcacaacagcggctatgtggaggagactgtacagctgctcaccgacaagggctggacctatgagaaggacggggccctgtggctgaacaccacccagctgctgaaggaaaagttcatgcgggaggggaagagccaggagcaggtggacaagctggacctgaaggacgacgtgctctgccgggccaacggcttctatacctactttgccgccgatatcgcctaccaccgtaacaagctggaggtgcgggggtttgacaaggccatcaacatctggggcgccgaccaccacggccatgtggcccggctccaggccgccctggacgggctgggcctggacggctcccaccggctggtggtggtgctgatgcagctggtcaacctgatgcaggacggcaagccggtgcggatgtccaagcgctccggcaaggcgatcgccctccacgacctgctggacgagatctcagtggacgcggcccggtacttcttcaactcccgggccagcaccagccccctggactttgacctggacctggcggtgcgggaggacagcgagaacccggtgtactatgtccagtatgcccacgcccgcatctgctccttggtgtcccggctggcggaggagggggcggcggtccccgccgctgcgggggtggacgccggtgtgctgaacgccccggaggagctggcccttatcaaggctctgtcccagtatccggaggagctccatctggcggctcgggattatgaccccagccgcattaaccggtatctggtgtccctggccggggacttccaccgcttctacaacgcctgccgcatcaagggggaggagcccggcgtgctctccgcccggctgaagctggcggacagcgtgcgggccgtcctggccaacggcctgggtctgctgggcgtcaccgcgccggagaagatgtaacgatctggacgttgagccggccctcagcccccagggctgagggccggctttttccaaaccatgagagaggaacgtgataccatgccgcagaaaaaaggggccctggaccggatccgggacagactccaggccaaccggaaccggctgacctacgtcctgctgctgctggggggcctgctgggactggcggggtgggccctgctgccggaggtggtagccatccacgcccagcaggcggccaacatcgggaaaaacaccatcctgctggcggacctggccctgacctggggattcaccgccgccttctgggtacgccctagggagatcatctattttgtagcagcatgtttgggggcgttcctgtctctgagcgtgctcatcatcaatgtgatgctctgaaagaggtggggaacggaatgacgctggaacagctggaggagaaactgaggggcagagagccggggctgatggacgcctcgggacagtacgcagttctggtccctctggtggagcgggaggggaagctgcatatcctctatgaggtgcgctcacaggacatgcgccgccagcccggggaggtctgctttcccggagggcggatagagggagatgagaccccggaggcctgcgccatccgggagacggaggaagagctgggcatccccacagcatccatcaccgttctgggacggctggattttgtggcccaccgagccaatttcatcatgtatccggtgctggccagggtggagacggctgcggcagagaggatggccctgaacccggcggaggtagatcacacctttctggtgccgctggagcacatcgtgcacaatccgccgctggagtacagctacgccctggagccccgcccgccggcggacttcccctaccagctgatcggcatcccacggggatatcggtggcagcaggggagggagacggtgcccgtctatctgtggcagggccacgccatctgggggctgaccgggcggatcacacggcatctggcgggcctgctgggcggagagatgggatgagcggggcggagcacctgggcccctaccttctggaggtaaaggagggggtctttcccctggggggagacagcctggccctgggggccttcgctacagtgaagcggggctggcgggtgtgcgacctggggacggggagcggctgtctgctcctgatgctggcggcccgggagggggggctctctctcacgggagtggagcgggaggagcgggcggcccagtgtgcccgggagaacctggtccacagcggcctggaggggacggtcctccaggcggactggcggcaggtgaccctgccggctggcgggttcgacctggtcatctccaatcccccctacttccagcctggacacggcggggacgggggcgaggcccggcaggccgactgctcccttgaggagctgtgccgcaccgcggcccgcctgctgagaaacagggggcggttcgccttgtgccaccggccggagcggctggcggacctgatgtgcgccctgcgggggagcggcctggagcccaaacggatgcggctgctggcccatgggccggagcatcccccctcctgtgttctgatggaggcggtgcgccgggggcggcccggtctgcggatcgaaccgtgaggggcgcaggtgctcccaactggagtgctgaaaaatttcagaaaaattttgggccccatgcaataaacgagacctcccacgcattatgtagttgaacggcaaacagataagcccgagatacagccggacacaacataaaatgacatttgggaggaacatgaaatgaaacggaactggaagagcctgatggtgagcggaactgtactgacggtcctggcgggagcgctgactctgcctgccctggcctccgtgggccagcggacggccgccctgcattatcagaacatcaaggtgacgctggatggcaggaccctggatctgacggacagcaggggcaacgaggtggagcccttcaccatcgacgggacgacctatctgccgctggcttccatcagcaaggcgctgggaatggacgtgcggtgggatgccgacaccaacactgtgatcctgaacaccaagggcaccggcaccactgccgctgagagctacatcggggtggaacgtgccaaagagattgccctgaaggatgcggggctctctgcctcccaggtcagctttgtccgggctggactggactgggataacggccgcatggagtacgaggtggagttctggaaggacaacgtggagtacgactatgagatcgacgcctacaccggcaccatcctccacagcgaccgggacatcgaggggtacagtatccccgcccagtcctccgccgacatcggcgccgaccgtgccaaggagatcgcgctggaccacgccggtgtgtccgcctccaaggccacctttgtgcgggcccatctggactatgaggacggacgccgggtgtacgatgtggagttttacagcggcagcaaggagtatgactatgagatcgatgccgccagcggcgatatcctgagctgggactacgacgccgaatactatacaggtcaggccgccggtcagaccggcagctacctcagtgaggcggaggtccgccagatcgtggaggaccgggcgggggtctccgggaccttccgggagctgcatctggaccgggacgatggccgcgtagtctacgagggcgagatgcgggacggctggaccgagtatgagttcacgctggacgcggtgaccggtaccatcctggagtgggacgtggaccggcactgagcattggtttcatgacagaacggcaagaggccgccgcggagttccgcggcggcctctttggctgagcggaggcatgtcatatgggaggggggctgctttgagcgggaaaggggacggagaaaaaatgggcggcccggagctccgttcggggatagaaaaaaggcgggtcctgtgttataatggctccatggaaacaaaccgagccgccctgtcccagggtgggcggcggcggaaaggagcataaggcatggcaggaaccctctatctggtcccgactcccatcggcaatctgggggacatctccccgcggatggcggatactttggcgcaggcggccttcattgccgcagaagacacccgggtgacagtgaagctcctcaaccatctggggttgaagaagcctatggtcacctaccaccggcacaacaccgcagccagcggtcaggcggtgctggaccgcctgctggcaggggagagctgtgctctggtcacggacgcggggatgccggccatctccgacccgggggaggagatggtggccctgtgtgccgctgccggggtcccggtggtacccatcccgggtccctgcgccctggtcacggcgctggcagcctccggccagcccaccggccgcttcacctttgagggctttttggccatgaacaagaaaaaccgccgggcccacctggagtccctgcggggggaggagcggaccatgatcttctacgaggccccccacaagctggttgccaccctccgggacttggcggacacttttggccgggagcgggagatatctctgtgccgggagctgaccaagctccatgaggagatccggcgcaccactctgggggaggcggcggactggtatggggaggagacgccccggggagagttcgtcctggtagtccggggtgcccagccggaggaggagggggaatgcactctggaggacggcctgaccctggcggagcggctgcgggaggaggaggggctctccctgcgggatgcggtgcgccaggcggccaaggagctggggctctcacggaatgagctctaccgcctggcggtggagcaggaataaaaacggcccctgcccgggaaagggcaggggccgtctgctgtgggggtcatggtttgcactggccgcagggggaatatccctgggcgatcagctcctcacggctgccggaaaaggcctggcggttctcctctttcatggaggcggcgccggagcaggaggggagatgaaattttccagagctggtgttcaggatgtacagggtgtcctccggctccttctgggtgctgtcctctggaagagcatccccctccagggagctggcaccggtagcgtagtcgatggtgatgccgggctggtcattatagacatagacgttgaagcagatgccctcgccctggtcctccaccgactcggcctccatctgcacgccccgggccaccagctcagtgccctgaaagatgggagtgacccggtagaggacgtggttgccggtctcctggacgtaatccgccaccatgttttcaaaggggagcatcccctccacgttgagatagcgggtgccggtgatgaggttctgctcattggcattctcaccgctgagctgatagccgatgagatggcagcggttgtacaggtacttgccgtccacgatgtcatatttcaccgtctgccagccgctgggcttgacttggccgatgctgtcccgttcctccgtgggcatcaggtccagaccgatgttggcataggcggtgccgcaccggccaagcagatccaggctgctgtaagtctcgaaagagtcggtggtgaagtcctcctgggaaaagccgggctggttgtcctggagcaccacatagggctcgccggagaagggcgggacgtcctccagagagagcgcggcctgaaggcgctggccgcagccggacagcgccgcgcagagcagcaggaggagggggatgagatggagcgtacgtattttcatgggcggtagacttcctttgtgatttttttatgggaggagccgggaaattcctcccggcccaacagggaccaccccagggcggccgggtccaggtccagaaacaggtccgcggggtagcggcggttccagtgatagaggaccatggactccacccggtccaggaaggggcggatgggccggtcctccagaaagcagaactcccccggggcggcctgggcgagaaagtcctccgaggtcaggatggagctggagaggccgtcccgcagggaggagaagagggagcgggagccgggggccatccacaggggggagccggcgcacgtccggagcacgtcttggcagagcacccggtcccggctgagccggcggccatggaacagcaggccgccccggtcatcgatgcaggagatcaggatcatggtccaccctctttcttcggaaacagtacatttgttctggtgtgcctgtagcagagatggggccaaaattccagaggaaaagaaaaaatttttctccgttccgagaaaaggcggccctccctaggaccttgtatccggggcgtccgatgtggtatgatggagacgtccggtacatgatcaggactggaaaggaatgtttggatatggaactggaaacaaaggaacttttggacctctcccacaccctggcaggggagtatctggcgggatttcaatacccctggcaggccctggacgggatcaaggagctgatcctgaccctgggggctgcgctgccgccggaggaatatgaccagcccaccccccaggtctgggtgcataaaacggcggtggtgttccccacagcctatctgggggcgccctgcatcattgggcctgagactgaggtgcgccactgtgcgtttatccggggctcggccctggtgggggcccactgcgtggtgggcaattccgtggagctgaaaaacgtgatcctgttcgacaacgtgcagaccccccactacaactatgtgggagactccatcctgggctataagagccatatgggtgccggctccatcacctccaacgtgaagtcagacaagacgctggtgacggtgaagaacggagcagagcggatcgaaacgggcaggaagaagttcggcgccatcctgggcgaccatgtggaggtgggctgcaactccgtgctgaatccggggaccgtggtggggcgggggagcagcatctacccggtctcctgcgtccggggcgccatcccggcgggcagcatcgtcaagacggggggtgtggtggtccaaaggagctgagtgccgcgggggatgcggaacaagacagagggcgcggcgggatctgccgcgccctcaagctgtttgtgggagccctctctcccacggaccggcggaggcggagaccaaaagaaaaacgccccaaatcctggctggatccagagcgtttaaaaaaccgcataaaatttgtctgctgtttctatctgggctgctggggatcaaatcagaactgtccgcactcctggagtgccttgatgcacttggggcagatattcttgccgcggaaaacgatgacatcccgggcgtcatcacagaaaatgcaggcgggctgatattttttcagaatgatggacggtccatccatatagatctccagggagtctttctccgcgatatccaatgtacggcgcagttcgatgggaaggacgatacggcccagctcatcgaccttccggacaatgccggtagatttcaatgtgatcattcctttcttccttcttcatgtcccagtcgtcaaaacgatcgatgcggtttcgcagtcataatgtacgattttggaaactaaacattattatactacaaagtgcgactgtgtcaaccataatttgtgaagattctgcaaaaagtgttcggaaagagcaaaaaatgatgggaaaacagggaaatcagaaaaatgaacaccacggcagagaatggttatcttttccagacatgtcccgtatatatgatttgaaggggggacaggggtatgacgatgacgatcctctggacggggatggtggtgctctccatcctgtgcggactggctacggggcagtcggcccaggtggccgcggcggcggtggaggggacccaggcggcggtggagctgtgcctgtccatcgcggggatgctgtgcctgtggaccggggtgatggaggtgatgcggcggtccgggctggcagaaaagctgtcccggctgcttcgaccgatgctccggctgctctttccccaggtagcccgggaccgggagaccatggacagcatcgcggccaatgtgtcggccaatttgctggggctgggcaacgctgccacccctctggggctggaggccgcccggcggatgagccgttgcagccccggggtggcttccgatgcgctgtgcatgctggtggtgtgcaatacggcctccatccaactgatccccaccacggtggccacggtgcgggctggggcagggagcgccgctccctttgacatcctgcctgccgtttggctggcctccgggctgtcggtaggggtaggggtgctggcctgcaagatatgcgcgcggatatggagggattgacatgctggacctgatgatgaccctggtggtgccgctgacgctggggctggtggcggtctacgccgcctgccgccgggtggacgtttacgatgccctgatccagggagcaggggagggactgggcaccttggcccgtatcatccccagcctggtggggctgatgacggcggtgtatatgctgcgggcgtcgggggcgctggatctggccgctcaggccctggctcccctgctggaccgggtaggggtgccggcagagctgctccctctgatgctggtgcgccccatcagcgggagcgccgccctgggggtgggggcggagctcatcaccagcagcgggccggactcctatgtgggccgggtggcggcggtgatgcttgggtccacggagaccaccttctacaccatcgcggtctacttcggcgcagtgggcatctcccggacccggtacgcggtccccgccgccctgtgcgctgaccttaccggctttctggcggcggcctgggcggtccggctgtgctttggaggcggataaagctctcacacgccgcgtcaggcggcatgtgagagctctcttactatggggcggacaggagagtcaggggcggcccgtccaatcggatgacccggtccgcccggtccagaacggcaggctcatggctgaccaggatgacaggggcggccagctcccccagggcggataggatgcggtctgcccgctgagggtccacccctgcaaagggctcgtccagcagatagagggaaccgcccagggccagcgtgcggaccagggccagacgccgtcccatgccgccggacagatgggcgggataggtacgctcttccccttccagctctgccagccgcagccagcgggggacctccacccaccgggggcgggggagcacgtcggtaaggtgctgctccacggtacgccaggggaagaggcggtcctcctgaaagagcagggcagcggagcggagggacaggccggtgatccggccggagatggggtgctccagcccggccagaacccgcagcagggtggtcttgccgcagccggaggggccggacagggcggtgatccccgtctcaggcagggtgagggagaagcggtccagcacccgcttctctccaaaggtgacggtgacctcctccaaacagatcatggcgaccacctcctgtttatccggttcagcagagcagagagcagtttttccagggcaagggacagaaggaggacaaccagcgtccaggcaaacagggagggggtctccagatagtcccgggcctggacgatctgcgtgcccaccgcccaggcggggcggcagagcacctcggcggccaccccggacttccaggcaaggcccagagaggtgaccactgcgctgagaaagtagggccgcaccgaagggagatagaccagccggacggttttgaggcgggagaaccggagcgctccggcctgttccagcagcctggggtcggtctcccggatgccccggctcacgttcccccacaccaccggcagcaccatcagggcggagaccaccacaggcaccagaccacggcgggtccacagcaggacgaagaggatgaaggagaccactggcaccgcccggatgacccggacggcgggggaaaggaggacatccgcccatcggctggcgcaggtgagggcggcggtcagcgcccccagcagagtaccggccagcagtccggccaggacccggaccagggagagcagggcggtctgccagaaactgggcacccccgccagctggatcagcgttcccaggaccgcggcagggccggggaggatgaaggactggcccacagccagggcggccagctgccacaccaccagccagaaggccaggggaaggaggggccgcagcagacggtcagggcagatagtacaggctgtcataggggatgctgccgccgatagcggcggggtcggcgcggtacaggacctcgtagtaggcctggacggtgtcctgcatctcctccccggtgagcagggtgaggttgcactgggggatggcggcctccgcgatctgggcgttggcggtgatgccgtatttggccaccagctccgccgcctccgaccggttgccctcgtcagacatgaaggagatggagtcaccgtacaggtccaggaaagcgtccacggcctcaggatgctcctccacgaattccctgcgggctacgatgcagcccatgggcagaggggtggaggagacggcatcccactcagcgctcaggtccagggcttggcgcacgccggggtccttcatcagcagggcagtggcggcggggacgggcagcatgcacacgccgtcctcggcggaaagcatgttggcagtgacctcctgggcggtgagccactggatggtcacatccacggcggggtccagcccgttctgggtcagcagatagttgaggatgtactccgggttggccccctggccggtggcgtagatggtcttgccctgcaggtcggccatggactggatggagtcccccttctccaggatgtacagcacacccatcgtgttcactgccagcatctgaatggagccgtcggtcttgtggtagaagttggaggccacattggtggccacagcggcgatgtctgcctcgccgttggacagcagggcagtggcctcgctgttttccgtcaccacgacggaactgacggagatggggctgtcagcaggaacgtgttccggggcgtagtactccatcagataggcagcccctacaccggtagggccggagaggacggccagatcgatggggaggatctcatcgttcggggcggggatgccggaagaggaggtgctggagctgacggaggagctggcgccgccagactgggagggtgcctctgcgggacggcagcccgaggcagagaggaggagcagggcggacaggagcaggggcagaagcttggttcgtttcatggcaggattcctttctcagatttggatggatacacctattctgggcagagacggatcgttgactggatttgtacaccgaaggggaaattttcttacccggagccccggacaccctccagagcggccggatcggggacgaggatggcccgtccctcccgccggatcaggccggcctgttccaagtcctgaaaggcccgatacaccgaggcgcggctgatgcccagctggcgggccagaccggaggcggagcactccactgcgccataggagaggctgctgagcagatagcggaccacccggccctccgtatcccccacagccagggaacccagccgggcgttgaggaagcggatgcggccggtgagataggtcagatagttccggcgcagcagggcctcctcccccagaaggcggtccagcagctcctggtccagcaggaggcagcggcagatcccttgggcggtgagggtggtggcatagtcgggggcgtcgttgtagagggcggcggcgccgaagagatcccctggctccagggtgctgacggtgaggctgcccttggtcaccagtacccgtccggagaggagcagccccagacaacggcggaagcggtcgggtcggtagatctctgcgccggaggagaagtcctccaccgaacagccggaccgcgccaggacatcccggaccagtgcctcgggacatgcctgaaacagggggcagcggaggaggagatcccactggtgcggagggagagagacaggcatggaggtcagctcctttccaaaactgtctcatttgagacggttttattgtagaacagctggagggaaatgtcaagggaaagagcatatgccatgaaaacatgtaagaccggtatatgaggaggggcgcgcacggaagggagagggaattacctgtatggtaaaacgcctggggagacagacgcccctgtctgcctccccaggcgtttttaccatatcgttccgccccaggggtcagcccttgagcagatccttgaaataggtgtctgcgtagtggatggcgcccactgggttgtgggccagcacccggtcttttaccaccagggtggtgaccagtgctttggagtattgatagaagagggagtcgtggcccacacacagccccagacaaatattgaattgggtgtcctggctgttgagcagctcggcctgggcaatggggttgcacatggcctcaaactggccgggctggagcttgcactcctccggcaccccggcccgggacttgtccagtccgccggtcttgcagatgacggacaccacctggaagccgttattccgcaggacccgctccaccacagcggcctccttcttcagtgccgcacagaaagccagacccagcttttgatagtgcatggatcgggagaactccacgatctccttcaggcggggccagcggcagtagccagccgactcgatggcggcgctggtggcaaaaaagtcgtggttttcctctgaccagtagcgctctaaaagccggtcaaagaactccgggtcccgcatgggacagttccggggcaggtccccgccccccttctggcaggagcggagggtacagctggcgcaggtgtacatacaacagatcctccttacagtctctcattcttcgtcaggctgatacagctccggacggaacactccgctctggtcccggcaccaggcggtgcctggttcggagtccagcagagggatgatgtccgggtcgtagttgcacagggtgttgaggtgatagatgccgctgcggccggggtcgtccatatagctgtcgctctcatctccggcggtgaagcgccagccgctatcccaattctcgtccccctcctccggctcctccctgtagcagtagcccacccggcagccgtccaccaggatgcggtcagtggcgaagcagccctgggggccctccccgtcatagaggtgccggagctcctgctgggggatggcgaactccttctgggggcggtcggagaggacgctggggcggtccacgtccaccgtctccaggtcctcctcgggaaagaggtccagcagctctccggcactgtgggagagcttgaagtccatctcctcctgatacagagggaggagctgatagaaatttacctcatcgccgccggagaggggacagaccgacgccttctgggggaaagcaccggggttgaccagcatgatgccgttgaagcgggtgttttccgcaaagggggagccgtccgggttggcaatggtatggccccagcccagccagctgtcctcgttgatgggcaggcgggccaggattttcagccagcggatgggccagtaccacgcctcgccctcttcgcccaccttccagtcggggggcaggcagataaacagctcagcccgctccagcttctggccggccagatcctccggcacgttcatggcatgggcccccatgccgtgggtcatcaggatatagtagttccgctccgggcttggggggatgatgtagatgtccacatggatgtcgggggagacgatctcgtggaacacgttctccgacgatccgaaataggtgtggatatgctggtccacggtgtcccagtcctcctggccgtacacctcgggacagcactgcttggcggcgatgtacttctggcactggcggatgaactcagcggcatccgggtcctgggggtccagctctgccgcccgctggaagtggggcagggcctcctcttcacggtccagatagaacagggcgtagcccagccggtagtgccacagggggtcctcctgtccctggtctgcgatggactccagaagggagacggacttttccagcggcccggcctcctcgggcccggccaggttgttgtaggcccgggccagctggcaggtgagctcatagccccgctccggctgggggatggcctcgatggcgtcgatgatccactgatattggtcctcctcgtgccagcgctgaagctggccgagcagttccgtatccaggtcctccatatttggaacctccttcttctgactctgtccggcgccggatgtcaggccagactggccagataggcggccgggccgctctcgtacaggtcacccccgtgggcgtccaggataacggtgagggggaagtcctccacctccagacggcgcaccgcctcacagcccaggtcctcccagcagatgacctccagctccttcacgctggcggccatcagggccccggcaccacccagggcggccaggtagaccgccccattgcggaccaccgcatccttcacggactggtcccgcttgccctttccgatcatgatgagctggcccaggtccagcaggcggggggagtaggcgtccatccgaccgctggtggtgggaccggcggagccgatgacctgaccggggcgctccggagtggggcccacatagtagacggcggagccctccacggggaagggcagggaacccccggtgtccagcagctccatcatccgcttgtgggcggcatcccgggcggtgtagacggccccagacaggagcacggtgtcaccggtccgcaggggggcgaggtcctctcctgtaacgggggttctgagtttatattgcatggaaatccctcccaaatggcttggtcgatattttagatgggtattacagatgatccagcagaaaacggtggaccgtatccgcgatctctttggggcgctggcggtatagatcatgggggagctcaaacagatggaaagaggaggtggaaaaagcagagagataattcctcgcacacatccgccattcctctttgggaagaggagtgcctttgccgttggaaagcagaaacagcgtggggacagaggcaggcggtccctcctgacgtatctgacggatgctgtggggaagggcttttgcctcgttgatccagacgatgctggcaaagttccgacgggcggcgggcaccaggtccttccgaactgaggcgggacaacgcctcagcagagagtgggaagcgagctggaaaagtatggctcgcttccagtcggggcggcccagatgttccagatggtgcaggacagaggcaagatccatgttctgataggcatcgggagtggcggggtccagtcccacaagggcggaaatttcctctggatatttagaggcccagtgcagtgcctccagaaaccccatgctgtgggccgccagcaccactggaaaagggtgctttagtgcggccaataccctgcggtactcctccaccacggtgtccacatcccggggggcctcggtcagatcactgaatccatagccgaatttggaggggatcaggacggagtaccattctctcagggcatcggccagaggggcgtattccagtccggggaagaggatattggagccggacagaatcacaagtgtgaccggccctgatcccacagaggatacctggagagcccggccgcctacagctaccatttgctcgtccatgacaacacctccatgggcggtcagagctgggcggaggcccggcgggtcacatggcagctcacattcaccgccacgggcaggccggccacgtgggtgggggcggtctcgatggacaggcccaaacaggtggtccggccgccgaagccctgggggccgatgcccagggcattgatctcctccagcagctcctcctccagctgggcatagaaggggtcggagttgggctggtcgatggggcggagcagggcatgcttggccagaaaggccgccttgtcaaaggagccgccgatgccgatgcccagcacgatggggggacaggggttggagccggccaggcgcaccgtctccaccacgaattttttcacgccctccaccccgtcagcgggcttgagcatccccaggcggctcatgttctccgagccgaagcccttgggagccacggtgatccggcacccgtccccaggcaccagccggagggtgatggcggcgggggtgttgtcctctgtgttcacccggcgcaggggatcacccacgatggacttgcgcagatagccctcgccgtagccccggcggaccccctcgtggacggcctgctcaaagtcgccctggatgtggacctcctggcccagctccacaaacacacaggccatccccgtgtcctgacagacaggcagttcttcccgctccgcaagctccagattgtcccacagcaggcccagggtctctttggcaagaggccagggctcctcccggcgggtgcggtccagggcggagacgatgtcggggggcaggtgagtgttggcttggatacacagctttgccaccgcgtcggtgacggcggcggcggaaatggtacgcatacagacgccctctttcttcgggttttctccattgtaccaaatttcgcagagaggggaaagggctggacgaaaaaaatgccccgccgcaggcggggcattgaaaaaaacgacggccctggtgctgactggggccgtcgttagttcaaagaaagcatattaaaaaggcccttatgggacagagggaatggaaactcaatctggaagattacagaacaaattgagcctgttctctctgtaaactcatcttgactgaattccgacttcctatggaagaactggatacagaaagcaatattctttaagaaatcagattcatcattagagaggactatcatttaaatgccgaaaggaaatcatcaataatttttgataaagcatctctttgctttggggttaactgtttgagttcgtcatgttcagccaatgaatccaacattacagattcgccacataataaacgatcagtagagatggatagacattcgcataatttaatgatgttttccggccgcatagccttgtgcccattctctgcggcagaaatcattttagtggaaagcccacttaaatttgccaactgttcttgtgtatagcctttgtctttccgtgctgatgcaagtcgcgacccaatttcttctaaagttttgtttttcatttcatcccccgccatagaactataatattaccccgatagggatttttagccctctatggcgggcaataccccgtcatagctccatatcttgctgacagattgaaagaaacgcatctataattttgttaagggctatgcgttgtttgtgtgtaagagaaacagaaatatctgaatgcaatgcattgccagtcattaaataagagatgtccaattcaagagagtgacagatacgcacaatattttcagggcgaagtgccttttttcctttttcagcagagctaatcgtttttactgatactcccgatagttctgctaaattttcttgagttaattttaatgatttgcgttgggtagctaggcgctctcccatttcgacaaggaatttattaccagatgtcagaaaaacaccccctataggggaatactatcttgaattcaggaattttataatccctcatagtagacatataacccctatagggggtataatgaagaaaaatttttgatatggatggcgtgtgcgaaattaaatgtcggaggtagcatgtggtcatagataaaacgacaggaagaggttgtgcctggagcatagcatcaaaaacaattaccaagaaactaattgctgaagggattgtagataagaccatttttataaaggcttggaaaaatggctatgatttgctccgagtgaccgactgcggggagaattgtgcgtatctaatgtcacaaaggacaaaggagttaacagggcaaccattatgggccccttcttttattgctccagaaatatggggaaaagctgtaagcagatttcaaaactatggaaaattgggcagaaatgtggagatgtatctgctcccagaaatgagtgaatacctgcgcagtattccggatatagaactgatttctatgacgagagagtttctcataaagcatggtgtggtcaataagcccattcgccagcatgcagggaaaacatactattttaatgaaagtgaagtttattctcttgatgagcagtcccagatgttcccgtatgaggggcgtatgaaatttaatacatttcaagtaaggggcgaaacctgcttcaacagaaatgtctggatcaaagccgcgtcacggtttgaaatcgggatgacattggaagcgtgtattgagatttttttaaacacagaactgacgcataaggcccagcaagaactatctccaatcgaccgattagtacagcacatagggccgcccacatatgagcgtgttccagagaacaaagatgaagctgcatttgaccatattcgtgtgattgttggcctccctcgttatcagttctactcatgggaagccttacagaatgaagttaaaaagtatcagcgtgaaatatatcagcaagtcattcagcggttggaaaaagatcgtcagtttaaaaaatatggcgtgccagtcaattttcttaaaatcagtaatgttacattgttgcgggatttttcattggagtttatttttgaactgaaagaataaaagatcattaaaaagaggaggacgccgcaaagcggcgtcctcctctttcgttggttatggacgttgtatcgtaccagggttctttcagttaaattttataacgagacgcagctcactgatggataccgcggttctggtcgccctcgggattgacgccgaactcgtagtcgttgccggggaggatggcgttgagcaggatgcccgccaaggcggcgatggccaggccggtgagcgtgatggaggtgccggccacggtgaaggtgatgccgctggagaagcccaggccgcacaccaggatgacggcggcgatgatgaggttgcgggacttggtcaggtccacgttgttctccacgatgttgcgcacgccgatggcggagatcatgccgtagagaatgaaggacacgccgcccacgatggcggagggcatagagccgatgatgtcggccatcttgggaataaaggagagcacgatggcatagacggccgccagacggatgacccgggggtcatggaccttggacaggaccaggacgccggtattctcgccatatgtggtgttggcggggccgccgaacatgccggccagggaggtggcgatgccgtcgcccaccagggtgcggtgcaggccgggctcctgaatgaagttctgccccacggtggcggagatggcggacatgtcgccgatgtgctccatcatggtggccagggcgatgggggccatcaccaggatagcggtgaggtcaaacttggccatctggaaggggggcaggcccaggatgctggcctcgcgcacggcggtgaaatcgatgagggggatggcctctcctgcggcgttcagcacagtgacgccgcaggcgttcatgatgagggcggcgatataggagaccaccacgcccatcagaatggggatgatcttgaacatccccttcccccagatgttgaagatgatgatggtggccagggcgatcagggccaaaggccagcaggtggaggcgttgctcaccgcggagggggccagggtcaggccaatgcacacaatgatggggccggtgaccaccgggggcaggaagcgcatgaccttcttcacgcccaccaggcggatgaccagggccagcgccaggtagagcaggccggcaaccacgatgccgccgcaggtataggccagcttatcctggggagacatgtccgcatagatgccggtgttcagattggccatggtgctgaagccgcccaggaaggcaaaggaggagcccagaaaggcaggcaccctgaatttggtgcacacatggaagaacagggtgccgatgccggcaaagaacagagtggtctggatgtccaggggcagaccgtactgctggaccaggatggggaccaggatggtagcgccgaacatggcgaacatgtgctggaggcccagcaccagcatcttgggggtgcccagcttccgggcgtcgcggatgggttcgtttggattcatggataaaactcccttctcactttctctgacacacaaaaaaagacaatcacaccggtgattgcccgcctgcggaacagaagagaggcccccaaacccgatacagcgacccgtacagcacggtcatggacctctcctcccttccatttccgaacaatcataccagaagagcgggagacacgcaagtcttattgccgaatttcgtctttttttccggaatcaccaaaggagggcccgggtgggggaacaggttggaggttgtgttgattgacaacgtatgggggatacgatacaataaaaacgatttttttcttggggcggcgggctatccggcccgggaccgcctgacagatttgaaaaaggagcgtctgcccgtgaaaaagccctttgtcaccctggagcagctccaggccatcacagagcagtatcccaccccattccacctgtacgacgaaaagggaatccgggagaatgcccgccgcctgtaccaggctttctcctggaaccccggctaccgggagttcttcgccgtcaaggccaccccaaacccccagatcctgaagatcctgcgggaggagggatgcggcgtggactgctcctccctcaccgagctgatgatgtccgaccgctgcggcttccggggagaggagatcatgttctcatccaacgacaccccggcggaggagtttgccctggcctcccaactgggggccaccatcaacctggacgacatcacccacatcgactttctaaaggacaccatcggatccattcccaagcggatctcctgccgatacaacccaggcgggaccttcactctgggggagtctgaggagggcttccaggtcatggacaacccgggggacgccaagtacggcatgacccgggagcagctgacccaggctttcagccggctgaagaagctgggggcggaggagttcggcatccacgccttcctggcctccaacaccctgtccaacgactattaccccgccctggcccggattctgttccgggtggctgtggagctgaaggaagagacaggctgtcacatcaccttcatcaacctgtccggcggcgtaggggtgccctaccgcccggagcagcccgccaacgacatcgccgttatcggggagggggtgcgccgcgcctatgaggaggtgctggtccccgccgggatgggggatgtggccatctgcaccgagctgggccgcttcctgctggcaccctacggctgtctggtcacccgggccacccacgagaagcacatctacaaggagtacatcggggtggacgcctgcgcagccaacctgatgcggcccgccatgtatggggcctaccaccacatcaccgtcatgggtaaggaggacgccccctgcgaccacaagtacgacgttaccggggccctgtgcgagaacaacgacaaatttgcggtggaccggatgctgcccaagatcgacatgggcgatctgctggtcatccacgacaccggcgcccatggacacgccatgggctaccagtataacggccggctgcgctccgccgaggtgctgctgtgccaggacggctccacccgcctgatccgccgggcggagaccccggaggactacttttccaccgcagtgtgggagtgagctccccagaccacagatcgagagacaggaccgccgcgcgtgccgcggcggtcctgtatttgagtgcttcttgttgaggtgattttgttgcatatcctgactgaactcagcctgatctttgccctgtgcctggcgggggaggggatcgccgccctgcttccggtggccttccccgccagcgtcatcagcatgctgctgctcatggccctgctcttgaccggcgtggtcaaggagcggcggatccagacagtctcccgcttcctggtgaccaacatggggctgtttttcatcccctccttagtagggaccatggaatatgtggaggtcctgagggcccaggccctgccctttctggccgttacctttctgactacgccggtggtctatctggcggccgcctggacggtccagctactgatgcggcggagcagaaaggaggcagggcgtcatgtttgaagcggtgacttcctccccgtttttcgggttagccctcaccctggggtgctggtgcctgggggtggagctccagagacggacaggactgctgatctgtaacccagtgctggtggcctccctgctggtgatcggggcgctgacagtattacgcgtccccatggagtgctacaatgccggcggcgggctggtaaagctgatgctgggcccggccaccgcggtgctggccctgaatatctatcaacagcggcaggtgctgcgggaacactttctccccgtgttggcagggtgtctggcgggcagtgccgccagcatgggctccgtgctgctgctgtgccggctgttccgcgccgaggagatgcttgctgcctccatgctgcctaagagtgtcaccacagccatcgcgctgggcatctccgagagcggaggaggcatccccggcatcaccgccgccgccgtggtcatcacgggagtggaaggagccatgctggcccctctgtttgccagatgcttccgcatcaccgacccggtggcggagggggtagccataggcgccagcagccacgccgtgggtacctccaaggccctggagatcggccccctccagggggccatgagttccatcgccatctgcgtgtgtgggatcttcacctcagtgctggcgctgttcttctgaagaaggcagcggagctggacacagagaggatagataagaaagcacagaaggccgccggcatcgccggcggccttctgctgtttatttgccttgagatcagtccagtacgatatagtccagggagacatagccgatagcggcctggccggactgggtgaggtaggagacgtggagccagccgtcttccggcggagcgaggaggatgaccctgcctccttcccgcagatagcccaccacagagtgggaggtgctggggccggaacggacgttcaggccgttctccgccccgcggacggtgccggcggaggcggcggtgtcgcagaggaccacagcgctggtgcaggcgtccccgcaggaggcggtaatggtgacgctcacctgcccgccggtggtgttcaggttggtgatggtgccgtcgctggtgactggcgccacagtgggcacgctgctggtccagacgacggtgccggcggctccctcaggggagagcgtgggggtgaagtgatagctggagccggcctggagggtcagttcgccggtgtccagggtgatgccctccacggggacagcgggctcctccggctggctggtctgtcccgggtcctccggctggtccggatcagcagtttggcccgggccctctgcctggccggggtcggcggtgccgcccggctgagggtcctcctccggctggaccaggtcgccggggtccagatcggcaggaggcgtatagttggacagcttatacagcagagcggccatctcagcgcgggtgaggaaagcctgaggattcaggttgccgtcggtgtcgccgcccacgatctgataggccaccagggtggcagcgtgctgggcagcccagtcggagagggaggcgcggtcgccgaactgatccagaacggtgagagcgccgggctggcaggtgatgcccaggagaggcagggcctggttcagaatggtgaaagcctgctcccgggtgacatcagaggcgggagccagggtgccatcccccacgccggtggccagaccgttggcctgggcccaggacacagcggtgtagtagtagtcggagggggatacgtcagtaaaggaggcgggggaggtgacggccggcttacccgccgcgccgtagagcatcagcagaaagtcgccccggcggatgtgcaggtcagggccgaactcagtgtctgagatgccgcccaccaggccgttggcatagcagtagtccacggcggtgtaggcccagtgcccctcgggcacgtcctcgtgggagttctccagggagaccgtgatggtctggctctgcccgccggcagaggcggtgagggttccggaggcgcccccggggccctcagcggtgaacagtccgtcctcggtgatggagccgatgctgccctccaccgtccaggagatggctcccacgtcccgcatggcagcccgggaccagtaggtaccctgggcagtgagctggacctggtctccaggctccagggtgagggaggtgagggcgtcggtgctgttctcccgggagacagtgaggccggtgagatggtccactacgtggatctgggcggtgccctccacatccagatccggggaccagagctccagggtatcggtgcccgcgtcactgccggcggtgtagatgttgtcctccacccggcccaggtcgtccagggaggagatctccacctcgcctgggtcatcccgaaggatgttcagaccgctgtccagcacggccgtctcccccaggtccacagaggtgccggtgaggaccaccagcccgtcatttttcagcaccagccggtccggatcgccgtcaccctcatcccgggagaccaggagcaggtaggtggcgcaggcccggggcttgccatcggaggggatgttgacgatggaggggccctcttggccggggacccagacactgatggcggtggagccgccgccgtccaggttgaccgcccagacgcagccctgggagagcatctcctccgccagatccagctggctcagtccgccggagtagccgctcctgcggccgtccacagcgtacaggaccagggtgccgtcctcccgcacgcccagggcggagcgggggtcgcggcccttttccacataggtccaggcagtggagtcagtgatctgtccgtcccggaccatcacatcgcccacgccgctggcccactgggcgtcctcgagggtggaggaggtgcagtcggtgcggagggtgacccggtcgcccacctggaagctctggaatacggactccaggccgccggcgtcggcggcagtcaatatgtactcgttctcgccaatgaccactgaggtgtcggtgcggagcagctcagtgacctccaattccagacgaccggagacggagagggtgtcgtcgggatcggtcagctccatgcgcaccatccagccgggggtgctggtgtgggtggagacggtggaaaaatcgtagttgaacaggtagagcccgccggagtcggcccggtatttgttcaggtgggtcagaacggtctggcctccggtggactcgttggtgagggtgagggtgacctggggctgctctaccagctccacctcaccgtcggtgatgaccacggcggcctcggcctccgggctggatttataaatgccgtcctcaatggagatgcccagaggcacgccggtggagggagcaaagaagtcggtattgatggcgcccagcacgtggtagcccaggctctgggcatagctgaccgccagattgatggagccggccccgtaggcggtgccggatgcctggaggaagatgggctccacctcccggctgtccggagagagttccagggagaagctctccacccggcccgcggcggagtggctggtgatggtgttggaataggtcaggccgtcagccagctcccgggtggtgcgcagctggggggagcctgcggcggcgtaggccgagggcagtgccagcagcagtgccagcgtcaaggcggtgaggcggcgggcagcttgggtgaaatgacgatgtttcatggatactccttttcacatggttaggacaggtggtggggacagcaaaactaattccttattatagcagtggagcagggcactttcaatggaaaaaagtgtacagatttcgggaaaatgtgaacatcctatgaacacacgggccaacggttgaaaaagtcggaggggtggtgtaaaataaaacgattttattggggatccataggaggtggcgcgatggaggagcggcaggaccatgccacacggaccatcagcatcgtgatgatcatcgccctggtgggcaaggtgctggggctgtaccgggaccatctgctggcggtttactacgggacggggatggcggctaacgccttcaatacagccagccggatccccagggtgttttttgacgcggtgttcgcctccgctatctcggcctgctttatcccggtgttcagcgagtatctcacccggaaggggcgggagccggccttccgcttcgcgggctgcttcatcaccgtgatggggctgctctctgcggtcctttcggtgctgggcatcctgttcgcggggcccctggtcagcctgtttgccgacggatatgatgcccagacggcggagctggccgtctccctcacccgggtgatgttccccacggtgctgttcaccggggtggccttctcctttgtgggagtgctccagtccctgggggagttcaatgtccctgccctgatcagcgtggtgtccaacctggtcatcattctctattacctgacgctggaccagcagttcggcatctacggcctggccgttgcctttctggtgggctggttcctccaggcggcggtccaggtgccctcactgcgccggctgggcttccgctaccggccggggctggagctgcgctccgaggggatgcggaaggtctttgccctgatgctgccagtgatggtctccacctgggtgcagcccatcaacctgactatcaactccaagttcgggtcccgactgtacgagggggccggagtgtccgccatcgagttttccaccaacttgtatctggtgatcgccggggtgttcgtcctgtccgtcaccaatgtgatctttcccaagctgtcccgcctcaccggccgggagcaggagggggagttccgggagacgctgcggaccaccctgcacggctgtctgttcttcgtcctgcccatgtcggcggggttgatggtgctctcccgcccgctgatctcctttatttatggaggaggcgcttttgatgatttttccgtctccatcacctcccaggggctgttctgggtctcgctggggatgacgggatacgcggtccagaatatcctcagccgggcctacttcgcccggcagaaggggaaggtgcccctggcggccggtgcggcctccatcctggtcaatgtcctgctgtgcatggcgctggcccagaggatgggggtggctggtctggccctctcctccgctgtatcctccaccgtctacgccctgttgctggacatccccctggagctgcggggggagggggtcctcagccgaagtttcctgctggacctggggaagatggcgctggccaccgcgctgatggcggtgggcgcctgggcggtggccggcctgacagagggcctgctgcccggcaaggcgggggagctgctcaccctgggggcttcggcggcggctggtgtggccgtctacttcccggcggcggtgctgctgagattggaggaggggcagctggccctgaagatggtgaaacgagtgtggaaacgaggctgatgcaatgaatcgagcgatagagatctggaacagcagcatactggggcgggtgctcaccgccatctgtctgtggttcagcggacagtggcagagaagtcgggtggtccgggccttcgtggccccaatggcgggccggcaggcggcggaatccagtgtctttttccgactgtgggacctgatccggggcgggctgtgcgccctgtaccgcaggctgggactggagcgcctgttcggggggagcatctttttgcgcctgaccctctggtgttctgcggcggtggtgctggcccccctgctgcccactatggcggtactggctctggcggcggtggccttcgcctccctggcactgaatctggtccgggaccgggcacggcccctggcctactccccggtcaaccggtatatcctgctgtacgcggcggtgtatctggcggccacggccacctccgtcacgccccggcagagcctgttccccggcctgctgatggtctttttcatggtcttcgccttggtggtggagaacgccgtggacagctgggagcgggcggaacagctggtgtttctcatggtgctggcgggaggcgtggtggctctgctgggcgtgggccagtatgtgctgggcgccacgggggatgccgcctgggtggacagcgacatgttctcctcggtcaccatccgggtctactccaccctccagaaccccaatgtgctggccgagtatctgattttgatgatctccctgggcggggcggccctgctcaccgctaaggggaccaggaaacggctggtgctgctggcctgctgcggggtgatgtgcctgtgcatggtgctcaccatgtcccgcggcggctggcttggcctgctgatcgcggggatgatctttttggtgctcctcaacccccgggtgctggtgctggcgccggtggtgctcccagtggcgctggtggccctctactttgtgctgccggataccgtcatcagccgcttcaccagcatcggaaacctggaggacacctccacgtcctaccgggtgtctatctggatgggcaccatagccatgctgaaggactactggctgtgcggcatcgggccgggcaccggggctttcaatctggtctacccggcatacagctacaacgcagccaatgctcagcacgcccataacctctttttgcagatcatgtcggacggcggcgtggtggccctggtggtgttcctgctgatcatcttcattttctgccgggtgatctgctcggcactctcccggaaccggagctggcgggcccggtgctatctggccggcgccatcggcggcgtgggcgggttcatggcccagagcatgaccgactacacattttataactacagggtggccctgctcttcttcgcggtgctggccctgggagccagctttgcccggctggcggaacaggaggtggaggaccggtgaataccattttacaggtcatcagtgacaccaatatcggcggcggcggccgcagcctgctcaactatctgagctgtcaggaccgcagccagttccagtcccaggtggtgctcccacggggcagcgccctgaaaggacctgtagaggcgctgggggtgccggtccatgagatcgacgccatggcggaccggtccatggatctgtcggcggtggctcccctgcgccgggtcatccgcgcggtggacccggatctggtccacacccacggttccatgtccgcacggatggctgcccggctgtgcggcaaaaaggtgatctacaccaagcactgtgtcttccccctggggcgggtgatgggtagcccggtgggccgtctggcgggccatgtgctggatgcctgcctgtccgacggggccatcgcagtgagcccatcggtgcgggagctgctgctccagtccggcgtaccggatcggaagatccacgtgctcttcaacggtgtggctcccctggcggcccctacggaggaggagcggaccgcactgcgggcggagtacggctttgggccggaggacttcgtggtgggcatcctggcccgggtggaggagtacaaggggcacagcgtgctgctggatgcggcggagcagctgctcagtcagggccgccgggtgaaggtgttggtggccggagagggcagcgccgaggctgccctgcggctgcgggcggtgtccttcccccaggggacagtgttttttgccggctttattgagcgggtggagcgggccctgtgggccatggacgctcagatcaacgcctccaccgagagcgaggggaccagcctctccctgctggagggcatgagcttcggcctgcccgccgtggtcagcgatatcgggggcaaccccctgctgatccaggacggagagaacggtctggtcttccccaaccgggacagccgggccctggccggctgtgtggcacggctgatggatgaccccgccctgctgcgcaggctgggagagggggccaaacggtcctttgaagaaaactataccggcgagatctttgccaagcatgtggaggacgtctaccgggacgtcctgaaaggagtatctcatggaaccaaataagccgaaattccgcttccgactgaacctgtttgacagcatcgtccttgtactggccctggcggtgggggcattcctggtgtggagctccataaagccggcggccgcaccggcggaaggggccgtttccgcggcagggacggtgcagtacaccatccgatttcagaagatgatccagggagtcagcgagcggatcaagcccggggaccagctggtggacaccgtgaagaactacgagctgggcacagtggtgtctgtggagacagtgccggcccaggctctgatccaggatcacgaggacaaggcctttgtcctcgccgggatcgagggttacgaggacgctttggtgacagtggaggccccctataccgagggagaggactccctcctgctgggcggaggcttcaagctgcgggtgggcgtgaccgcctatgtccggggctccggctatatgggcagcgggcccgtggtttccattgagaggggggagcagggatgaaaaagatcatcgaccgcaacggccgcctgttcggcttcatcagcgtcatcgacctgctggtcatcgtagtggtggcggtgatgggctttgccctgtacaccaagaacacccagatggccatcaccagcaccaacacggcggaccagaccatcacctaccagatcctggccagcgggatacggacctatgtggccgaagcagtgcgggagggcgaccagctctttgacccggaccggagcagcggcggcaccctgggcaccatcaccgacatccagctcatgcccggcaccaagctggccgagtttgacgacggcaccgtggcggccgccccggtggaggatggcgtggacatgctgatcaccgtagagggcaccggcctggtgagccagtcggggcgctataccctgaatcgggtgtatgagctgggggtcaactcctcccggaccttctgcacaaaatacgcggagttcatcggcacagtgacagagattttttaaaaaggggcggcagacatgaagatcctgatggccactatgggcctggatatcggcggagcggagacccatatcgtagagctggccaaggagctgaaggcggagggacacgacatcgtggtggcctccaacggcggtgtctatgtccctgagatcgtggccgcgggcatccgtcactaccaggtccccatgcaccggcgggacgccggatgcatgctccgctcccgaaagctgctgaaggagatcatccgtactgagaggccggacgtggtgcacgcccacgcccgcatccccgccttcctgtgcggcaccctccagagaacgatgaagttccccttcgtcaccaccgcccactgggtgttcaccaccaagggcgggctgcgctacctcaccaactgggggcagcggaccgtcgccgtctccgatgacatcaaggcgtatctgatccgggaatacggggtgccggaggagcacatctctgtgaccatcaacggcatcgatacagagaagttttctccacagacttccggccagtcagtggtggaggagttcggcctggaccggtccaggccggtggtctcctatgtgagccggatggacgaggaccgggccctggtggcccggcagctgatccagatcgcggaggagctggaccgggcggtgcccggggtgcagctgctcatcgccggagggggcaacgtgttccgggagctgaaagagcaggcggaggcggtgaacgcccggatgggacgcacctgcgtggtgatgaccggcccacgcaccgacatcaatcagatcgtggcagcgggggacatcttcgtaggggtgtcccggtcggcgctggaggccatgtccgccgccaagcccgtcatcgtggcgggaaacgaggggtatcagggcctcttcggtccggagaagctggaggaggcccggctgggcaacttctgctgccggggactgcccatgtccactccggagcgtctgctggccgatgtggccgccgtcctgtccctctccccggagaagaaggaggcggcgggggcctacggccgggaggtgatcttccagtattactccgtgcgccggatggcagcggactgtctggccatgtatgagcaggtgcgctgccggaagtaccaggtggtcatgagcggctactacggcttttccaacgcgggggacgacgccatcctggaggccatccaccagagcattctggaggccagtggggaggtgggggtcaccgtgctgtccaacgacccccgcgagacccagcggcactacggcatgaatgccatcccccgcttccgtttctggaaggtgttcggtgccctgcgccgatgcgacgctctgctgtccggcgggggcagcctgctccaggaccggacctccacccgctccctcctctactatctgtccatcgtgcgctgtgccgagtggatggggaagccggtgatgctctacgccaacggcatcgggccggtgcagaagccggccaaccgccgccgggtgaagcgggcagtggagcgggccgctctggtgaccctgcgggaccacagctccgcccgggaactggtggagatgggggtggagcgtccagatctccacgtcacggccgacccggtgttcaacctggatcccgcccccaaggagcgggccggggaactgctccggtccgccgggctggagcggggcactcccttcgcggcggtctcggtgcgggactggccggatacgggcagcttcgccggggagctggccgccctgtgcgaccatctctaccggacctgcgggatggagatcctgttcctgatgatgcagccctgccgggaccgggcggccaccgcacaggtgcggagcgctatggagtgcccctcccatctgctggacgccccctgcaccccgagggagctgatggccgtgctgggggagggcaggctgtgtttggctatgcggctgcacaccctgattttctccgcccggatggcggtccctgtgctggggttggtctatgatcccaaggtggccagctatctgaaggagctggacatgccctccgccggtgatgtgcatcacttccgccgggaggaggccatcgccgccgcggaccgcctgatggcggactatgaggggagcctggaacgcctgcgggtgaaatccgccgccctgagccgggcggcccgggagaacgagcgattgctgctggagctgctggagaggaaacaatagagcttttgactggaacgcgcggcaggagcggagacggggggctccggcttaccgaatcagcttgaacaaaaaagatactttcgcttacgggcggccccgcggggccgcccgtaaatcgttttcagggatgagacgggcgagcctgtgcgggcctatgcagggtgtgccgctgcccgctccggagtccgatagggaaatcaggctcttgacaagagaggtttattacgataaacttgcagtgaaagagaggtttattagaataaacctaaagggggacggacggtggaaaagctgtttgacggggaataccggctgatggaggtgctgtgggaaagtgcaccagtgaattccacccagctggtgactctgtgccgggagcagctgggctggaccaagagcaccacctatacggtgctgcgcaagctgtgccggaagggggcggccagaaacgagcgcgcggtggtcaccccgctgctgacccgggagcaggtcatccgagcccaaggggaggagctggcggtgaaggcgggggggatggcccccttcctcaacgcctttttcagcgggcggaagctgaccatggaggaggcactggagctgaaggacctgatcgaccagcacacctgggaggactgaccgtggacggactgaacacgtggctcaccatatttttgaatcacctgaacgcggggctggcactgggggtcgtcctggccgtcctgattctgctgcgccctctgctcctccggctcctcaccccccagcagcgggtggcagtctggtatgtagcgtggagcatcggcatatttgggaacctgtgggggctgaccagcctggtaagggtgctgccggtaacggtctgggacctgctgggaccccggccgggcgggatattcggcgcgccggctttcctgccgcccgcctacgacgggccgggggagtaccccgtggtcctgcccggcggggaaactgcggcggtggagctgaacagcggtccgctgctggccctgtccctcctgtgggccgcggtggcggtggggctgctcctgtggtattgtcaccggtccttcgccctgatgtgctgggggcggcaggggagcgagctggaggagaaggagctggtggccctgggggccgaccggctggagctctggatgcagcccggaaagatccgggcgtggatcacccccgggctgcccactagctttgtcatgggggattcggtgtacctccaggcagagctgcccaaagagcagctttccctggtgctgcgccatgagctgaaccacatctatctccgccatgggtacttctccgggctcaggggcgcctgcctgctgctccactggtggaatccgatcctgtggctggcatttcggtatatgggccgggatatggaactggcctgtgaccagaggaccctggatcagctggagccggagcagcggaaggagtacgccaagaccctggtggagctgggggcggggcggcgcctgtgggaggccccgctgtgctttggggagtgcgacggagccctgcgggtgcgggcggcggtggcctggcgtcccctgacccctgtgcgccgcctcaccgggctgttctgtgccgccctggtgttcctcctctttgcgggggcgccggccgtgccggggggagtgacagagactgatctctcccgaaacctgacgcagatggaggaggcgccggagaaggtggtggaggagctgatccggcggctggaggagaagggggacctgctctccggggtgagcatcgccgccggctggtggaagtgggagggcacagggggccggatctatctggagaccagcgtgggcacctggcgggcgttccggtgcgtgctgggggagagcggcaagatggggatgatccagctccggcaggagggccggccccatgacctggcggactgcactcagttttatcccgtggactgagcctgagagaaaggagaggagcggatatgatcggccgattttttgttgtgggcatgtttatgatgatcaatctggggctggcagtgggaatgatgttcgccgccctgtttctgctgcgccccctgctggtgcggatactctccccggggcagcgggtggccctttgggtggtgggctggatcagcctgtacagtccgagcttttacggcctgctcagcctggtccacatcctgcccgtcaccttccgtgacctgatcaccgggcgggtaaaggacggcggatggacgacctcaatccccgcctatctgcccatggattaccacggggcgggggtgtaccatctgtccctgcccggcggggcggtggtgccggtggaaatcggggaggggatagccggggcggccgcgctgctgtgtctgggcgtcctggtgctggggatcgttttttcctgccgacaggacaggcggctgaaggagctgctgcacaggggggagctgctgggcggagaggaggctctgaccaagcatgtcctccaggaggagacgcggaagatccagatccggctggtggagggactgcccaccagcttcctcaccagcaggggatggctggggtcggtggaatatgtgatctgcctccagcgggagctgtccccggagcagcgggccctggtgctgcgccacgagctggagcatatcaggctggggcacctctggttcaaggggtgggccaacatgggggtatttctctattggtgggacccgctgatctggctgggctacaaatatttctgtcgggacctggagctggcatgcgacgcggccgttctgaaggagctggagccggaggaacggcgggagtacgccaggaccctggtggagatgggggccgggcggagcctgtggagcacgccattgtgcttcggggagtgcgatacagcggtgcgggtcaagacagcggcccgcccgcagcgaacagggggagcctggcggggcctctcctggctgacgacggtgctgctcttcctcttcttcctgggcggccccacccagggggtgctggcggaggacgcgctgctcacctgggaaagagggggtgggactgtggacaccctggtggcccatacgatggatcaggtgaggcaggatctgggactggggcccatcctggccctccaggtctggtgcgtcgcggaggacggcgagcacgtctgggtggtgatggagctgctggagcagggctgggtgggggccgagtatttctggtatcccgcgcgggaccgcctatattttactcatgcagaggtgctgaaaaagcccccggatctgacgggggcggtgccgctgtcatgaaagcgggaagcattgtgctgtggtcatgttccctgctcatggaggcattccttggcctttcccttctgcggtggaccttccgctatgagagggcctggttggtactgcaaaagggtgagtgcagtggaggacctggaccaggagggctgggaccgggtcaaatagcatacgcccgccctgccgccatggtgacagggcgggcgtatgtggagctcggccggcgggagtgggcaaaaaatacagggagcgaggcccagggcttgtcaaccggaggcttttatgagacaataaaacgtgtacggcggtccttgaaccgccaaaatggaatgtgaccaacgatccaggagttttgtatatgagtgaactgtttgaaaaatctatggccaccctggagctgccccaggtgctggctcttcttgccgactgcgcggccaccctggagggaaaggagcgctgcctggcactgcgtcccctcactgatctggacgacgtggcccgggcgcaggaggagacctccgccgcggtaaagatgctcattctgcgggggagccccggcttctccggggtgaagccggtgtcggccagcctccagcgggcggacatgggggggagcctgtctacccgggagctgctggacatcgcctctgtgctgcggtgcgcccggggggcgcgggactacggggacagcgaggagaagaccgtcatctcccacctgttccgctccctgaccccaaaccgcttcctggaggacagcatcaccaactccatcctcagtgaggaggagatcgccgactcagccagcagcgagctggcctccatccggcggcacatgcgctccaccgagaccagggtgcgggacatcctccagcggctgatctcctccaaccagtccaaatacctccaggagtccatcatcaccatccgctccgaccggtacgtggtaccggtgaaggcggagcacaagaacgccatccccggcctggtccacgacgtgtcctccagcggctccaccttcttcattgagcccatgggggtggtgaaggccaataacgagctgcgtgagctggcggccagggagaaaaaggagatcgaacgcatcctggcggagctgtccgcccagtgcgccgcccataaggaggatatcggggaggactatactctgctgatcctgctggacaccatcttcgcccggggacagctctccctgaagatggaggccagccagcccggcctgtcggaacggtacctgaggctgcggggagcgcggcaccccctgctggataaaaagaaggcggtggccaacgacctggagctgggagaccggttcgacaccttggtcatcaccggtcccaacaccggcggcaagacggtgaccctcaagaccctgggcctcattacactgatggcccagtgcgggctgcacatccctgccaagtcggacagcacggtgcgggtcttccgccgggtgctctctgacatcggggatgagcagtccattgcccagtccctgtccaccttctcctcccatatgaccaacatcgtgggcatcctgaaggaggcggacggtcagaccctgatcctgttcgacgagctgggggcaggcaccgacccggtggagggcgccgccctggcggcggccgtcattgagagtgcccgggagctgggggcactggtggcggccaccacccactatgccgagctgaaggtgtacgctatgaccacccccggggtggagaacgcctcctgcgagttcaatgtggacaccctggcccccacctaccggctggtaatgggcatcccgggcaaatccaacgccttcgctatctcccggcgcctgggcctgccggaggagatcatcgaccgggcggccgcccggctggatgcggagaacgtgcgctttgaagacgtactcaccaagctggaccagcagcgccaggagatggagaaggaccgggcggaggcccggcggctgaagctggagatggagcagtctgcgggcaaggcccgggagtaccggaagcggctggaggaggagcgctccaaggtggtggagaaggcccaggcggaggcccgggccatcatccaggaggccagagacgccagcgacctggccctctccgaactgaaggagctgaaaaagcgccaggacctggactggcagcaggtgaacgacggacgggcggaggcccgccgcctgctcaacgaggcggagcggtccatcggcggggcggcgcaggagccggaggccccgccccccacccggccggcccgggccggggatacggtggagctggtatccatggggaccagagccagcgtcctgtcggtaaacaaggacggcaccctccagctccaggcggggatcttgaagatcaccgccaagcaggacgaggtgcgggtagtggagggcgagacccagagccagaaggaggccaggcgcatcgtccagcgggcccagcacaccctgcgcgccgccgcggccccctctgagatcgatctgcggggcatgatgaccgacgaggccatcgcggtgctggaccgcttcctggatactgctatgatgggcaagctggagagcgtgaccatcatccatggaaaggggaccggcgcggtgcgcaaggcggtgcgggagcatctgaagcgcagccgctatatcaaatccttccgccccggccgctacggcgagggggaggacggcgtcaccgtggcggagctgcggtaaggggccgggccctctttccggggggacagaagcgcgcacggccggcccagcggtgggcggagaccgggaagaagggcatctgccgccgaatgccgtggacctcccgcaatttttgttgagaaaagaaggcagatttgtgaaaaatgtcattgacggatgcgggatgaatttggtatgctagtaacacacaaatcgagtgcggaggtacggatatgtatagtcaggaagcggtcgtcaataaccaggtaggcctgcatgccagacccgccacgttctttatccagaaagccaacgagttcaaaagctccatttgggtggagaaggacgagcgcaaggtgaacgccaagagccttctgggcgtgctctccctgggtattgtcaaaggtactcctatcaagctcattgcggatggtccggatgagaaggaagcggtggaggctctgttcaagatgatctcttccgatttttccgagtgagccacacagcgcagatccgaaaggcaccgcttcgcgcggtgccttttttaacatctccccgggaggccccctatgacatttgacgaattgaaggaaaaggcccacgccctgcctctgaagccaggcgtgtatatcatgcaggatgccaaaaacacggtgatctatgtgggcaaggccaaggcgttgaaaaaccgggtgtcccagtatttccaggactccgcctctcacacggagaagacccgggccatggtgtcccagatcgaccactttgacgtgatcgtggcggacagcgagtttgaggccctggtactggagaactccctcatcaagcgccaccagccccggtacaacatcctgctcaaggacgacaagggctacccctacatccgcttgtccggggaggagtacccccgcttctccctggccaaccgggcggcggaggatggggcacgctatttcggcccctacgccagccgccacgccacccaggctatcgtggacgccctgcgctccgccctgcgcctgccctcctgcgggaagcgctttccccgggacattgggaaggagcgcccctgcctcaacttccacatgggcaagtgcgacggctactgccgcagcctccagatgaaggagcagcatgaggaggccatcgcccaggcggtctccctgctggaggggcggttcaaggaggtcaaagcggacctgaccgccgagatggagcgggcggcggaggagctgcgcttcgagcgggcggcggagctgcgggaccgcatccaggccatcgagctgctggggatgcggcagaaggtggtggcgggctccctggcggataccgacgtcaccggttttttccgggggacagccaagagctgcttcgtggtcctgcactacatggagggggagctggcggccaaggatatggacctgctggagacccctatggaggaggacgaggaggaggtcctctcctccctggtgcgggagtactatgtgggacgaagccggctgcctaggcagatcctgctgccctgtgagctgcctgaccaggtcccgctgacccggatgctctccgagcaggtgggccgccgggtggagctggtgaccccacagaggggggcaaagatggatctgatccggctggccaaccagaacgcggcagaagaggtggcccgggccaccacccgggaggaacgccagaacaagctgctggaggctctggccaggatgctgggcatggaggagcccccccggcggatggagtcctacgacatctccaacactggagccagtgacatcgtggcctccatggtggtctatgtggatggaaggcccctgaagcgggactaccgccgctttaagctgaaggatatggagggcccggacgactacgcctccatggagcaggtgctgacccggcggttccgccggtatctggacggggacgaaaaatttgtggagaagcccgacctgctgctcattgacggcggtctggagcatgtgcgggtggccaggcgggtgctggaggccatggcgctggacatcccggccttcggcatggtgaaggatgaccggcaccgcaccagggccctggtccaccccgacgggcgggagatcggtatccagtcggtgccggcagtgttctccctcatcgggcagatccaggaggagacccaccgcttcgccatcgaataccaccggcagctccaggcgggacacgtaaaaggctccgttctggacaaaatacccggggtgggggaaaagcgccgggcccagctgctcaagcacttcaaaagcgtgaaggccatccggcaggcatctctggaggagctggagcgggcggtcccccagagcacggcccaggcggtgtaccagtatttccgcaggggagagacagaaaatcaggatcaggctgagagaaaggaagagtgaccatgcgagtgatctccggctccgcacggggcagaagactgaaagagctccaggggatggacacccggcccaccaccgacaaggtgaaagagtccctgttcaacatcatccagttcgagattgaggggcggagcgtcctggacctgttcggcggcaccggacagctgggaatcgaggctctgtcccggggggcggagcgatgcacctttgtggacgcccggcgggaggctgctgccctcatccgggagaacctgaaggctaccggactggagaaggcgggccaagtggtgcagggggatgcgatctccttcctcagtgggtgccgggagcggtttggtgtcatattcctggacccgccctatcagacccagctgctggagcagactctggagctggtgtcgaagattgacattctttcggaacatggtataatgatttgcgaaagtcccgcggagagggagcttcccccgctggcacctccctatgaaaaggggagggaataccggtacggcaggatcaaactgacagtttaccgccgtcaggggagtgacccgagaccatgaagaccgctatctatcccggcagctttgaccctgtcaccctggggcatctgaacatcatcaagcgggccgctcagtgctttgaccgggtgatcgtctgtgtgatggtgaattccaagaagcacgggctgtttaccccggaggaacgggtagagctgctggaacggtgtactgcccgctttcccaacgtggaagttgacttctccgacgagctgctggccgcctatgccaagcgcaggaaggcccatgtggtagtgaagggcctgcgggcggtatccgactttgagcaggaggtccagatggcggtcatcaaccgcaagctgaaccccaggctggagaccatgttcctggcctccagcgataagtacacctacctcagctccaccgtggtgaaggagatggcccggtatggagcagacctgggggagttcgtcccccgggagatcgtggacgacgtagaccggaaaatgcgccaggcgcaggaaaaggagaatgactgatggcaagcggtgtggaagagctactggacatgctctttgaaatggtggatgaggccaagaatatgcccctttccagcgacaagtgcgtgctggagcgggaccgcgccctggatctgatcgatgacatccgggcccagttccctgtggagctgggcgaggctaagaagctggtggcctcccggaacgactatatcgccgcggctaagcgggaggcggaggtgatccgcaagcaggcggaggcggaggcgcagcgcatgctggcagaggagtccgtgctgaaccaggccaagcagcgctctgctgaattgatgcgccaggcggaggagcgcagccgggagttgaagcgctccgccaacgagtactgcgaggacgccctgcgccgcaccgaggaggcggtggcggaggcctatgacgagatcaagaagtcccgggcccgcttccgggcggcggccagcgccaccgccgcggggagcccgtcgggagggcgggctgcctatgacgcggcggccgaagaggactgaatcacagagaacagcgggggccgcacagatgtgcggcccccgctttgtgccacggtgggtgggcctcccgggaaaatgaagggggggtggggcagaccttcattttttacaaaaaattttcttgacatttggagaagagaggtttacaataacaacaatcagccggcgggaggcgctggatgctccggcagtatggagaaaaaagcgtcggaatggacaaaaaggggaaagttgtcctgcctgttgagagacacagctgccaaagaaacgggcggcggagaaagaggtgagcacagatgagatctcggcgttatgtgacccagggagagaggtgggactgcaagcggtgcgtgcagactgtgcataggagccaacatgatctggggtgacccccaaaaatcttgtttttccagttcagcctgattttctccgccatcgtttgcagtagtgcagcggtggcgtttttgttgcctgaaatgataaaatgacgttcccatggaaaggagagatcgacatgacgatgcttcgtgagaagaagaacagtatctggaatcagatgcgtcaggataaagacatcgacgacatgatctttgagagtgagcctgctgcccgcaaggaagctgtggtatgcagtgagcgctgacggatctccggatgactggaccgggagcctgtacccagccgcggcagagctgcgggtcggggagacaggctcccggtctctgcgtttcaggcagggccgtgcctgaggagaggccgggcggccccggtgcgccgatgaccggggagcagcggaggggcaggccccgttcctgcgtggagaaggagagtggcgtgtaccataggggccgatgccctgcccgatcagggccggttgctgaatcttgctccataactggataaagtgggccaatttgcacagaaagacttgcacccgggcaaaaaatatactaaaataaccataagattcaggccggagggggaaaccggccctttctgccgtccagaagggacgccggaaaagtctttgcccctgtttatgtttcatagaatccagctttgaaaaagcatcacggaggtcagatgaacatgagaaagatcaactttacagagacagtgctgcgtgacgcgaaccagtcgctgatcgccacccgcctcccctatgacaaattcgagtccattctggagaccatggacaaggctggctactactccgctgaggtgtggggcggcgctacctttgacgtgtgcctgcgttatctccaggaggacccctgggagcggctgcggaagatccgggccaagatgcccaataccaagctccagatgctgctgcgaggccagaacatcttgggctataagcactatcccgatgacgtggtgcgtaaattcgtggagtactccgtcaagaacggcatcgacatcatccgtatcttcgacgctctgaacgatgtgcgcaatctggaggtagccatcgacgagaccgtcaagcagggggcccacgcctccggtaccatctgcttcaccaccagcccggtccacaccctggaaaagaacgtagccatggtgaaggatctccagaaaatgggcgtaaagtccatcgccatcaaagacatggcgggcatcatggggcccaaggacgcctatgacctggtctccgccatcaaggacgcggtccccgaactgccggtggtggtccacacccactgcaccaccggcctggctttcatgacctatctgaaggcggtggaggcgggtgccgatgtgatcgacaccgccatctcccccttctccggcggcaccgcccagcctgccaccgagactctggcttacgccctgcgccagcttggctaccaggtggacctggacgacaaggtcctcgtcaagatggccgacttcttcaagggcgtccgggccgacttcctggccgacgggactctcgaccccatctccatggccaccgatacccagtgcctgaattaccagatccccggcggcatgctgtccaatctgatctcccagctcaaaatgatgaacgccatcgataagctggacgaggccttggccgagacccccaaggtccgtgccgacctgggctatccgcccctggtcacccccaccagccagatggtgggatcccaggctgtgcagaatgtactggccggcgagcgctacaaggtggtgggcaaagagatcaaggcctactgccggggtgagtacggccgtacccctgcccccatcgatgccaagattcagaagaagattttgggcaacacccctgtggtgaaaggccgtttcgccgactccctggagcccgagtttgaaaagaccaagaaggaactgggcgacaaggccaagagtgacgaggatgtcctgtcctatatcgcgttcccccaggtggccatggccttctttgaggaccgtgccacagggttcaagaagaaaaaggaggctgcccctgtgaaacctgctgcgcccgccgcccctgctgcggctcccgctccccgcgcgccctttgccggccccgtctactatgccgcggtgcccgtgccccagactcccggctatgtgagccgtgccatccagccctttgccgcgtcctaccagccctcttatctgaagatgggagaccgggaggactgcaccggaaacttcaccatcaccatcgatggcaagccctatcaggtgtcggtggccaaggctgatacccccaccgccgctcctgtggccgccgcccccgtggctgccgccgctcctgcggccgccgctcccgtggcagcgcccaccccggcaccggccgctgctcctgccgctgcccctgctcccaccgctgttgccgccggcgagacgccggtaaacagtcccatgcccggcaatatttttaaggtggagtgcaagcccggccaggcagtgaaggcgggcgatgtactggtggtgctggaggccatgaagatggagatcgaggtctctgccccggtggacggcaccgtcaagtctgtatccgccacagtgggcaccgccgtcaataccgatgacctgctggtagtcctgggctgacaacagaaattcagaggataagcaacgactccccgccagccagttccggctggcggggagcctttctgaccgcccgggcaggggaagagaagcactgcggccctctcacacacttttaaggaagtcttaatggaaatcaccttgaaaaggcagagggaacatggtaaactgaatcatctgaacaggccggatggaagaggaggagtgaccgcatgaaagggatcgtattggccgcagggaaaggcacccgtctgtatcccatgaccaagccggtttgcaagccgctgcttcccgtgtacgacaagcccctgatctactaccccatcgcgattctgatgcaggctgggatctcagagatcctggtgatcgtcccccctaacgagaccgccaccttcaccgccctgctgggggacgggagccagtacggtctgaagatctcctacgcggagcagccggtgccccgggggatcgcggacgccctgctcattgggcaggagttcgtgggggacgaccgggtctgtctggtgctgggggacaacattttctacgcccccaccttgggagccaccctgaaaaaggctgcggccagtcccgcggccgccacagtgttcggctactacgtggaggacccccgcccctttggcgtggtggagttcgacaagaatggaaaggccatttccattgaagagaagccccgctaccccaagtccaactatatcgtgcccggtctctacttctatgatcagcaggtgatggagatcgcccgagccctgaagccctccgcccggggagagctggagatcaccgatgtgaatctggagtatctcagccgagggcagctccaggtgataccgctggaaaaaaattttacctggctggacgccggcacggcggacagtctgctggcggcggcccagacaatcaaggagatccaggacaccaccggccgctatgtaggctgcctggaggagctgggtttctatgagggctggatctcggaggagcaggtccacgccatcggggacgagctggagatgaccctctacggcaagtatctgaagtgcctgtgaacgcctctatcgggccccggcgggagatgtcccgccggggctttcctgcatgccgccctgggccagacaggtgcggcgcagctcctccacctctccggacgtgagggaggcgccatccagcgtcagcagggcggcgaggagctcctgaggtggataccccgatgtacccgctccgtatgtgaaggcatccactgcccgcttgttctctgtgagatccatgtctacccctccttccttttccaaatggcggggctgcgcttcaagtgtccccacataaaatgataggggattttgtcgaaacatacaataccaacaaagtggattttggagtatcatagtgaccggagagggcgggtggctgtcctgatccgcctgtctccccattagaaggagaggcggaggtgaggaattaagactttgatattgccatttgtctgattttatggcaaaatgaaatcctgcaaagcggtttttgcagaatgacgggagcagacggaaaggaggctggtttcatgaggcggctgcggcggagaatgaccgctgtgctcacagcgcttctcctgttgaccctgctgattccctggggtctggcggagccggcccctgggccccaccagaccacggtgctctttacccatgatctccactcccacttcctgcccttggagagggcggacggcggggagtccgggggctatgcccggctggcctccgcactggagcagcagcgggccctccacccggatgctcttaccctggacgggggagacttctccatcggctctctggtccagaccctctacaccacccgggcggcggagctgcggaccatgggcgctctgggttatgacgccacgactgcgggcaaccatgagtttgaccacactggcctgggctttgcccagatgctcacggcggcctacaccagcggagatccgcttccggccctgctcatggccaactacgccccatcggccggtggtcctgaccagctggacatccagcgggccatgtcggcctacggcgtgaccgacacgctactgctggagcggggcggggtcacctacggcattttcggcctgatgggtaccgactcggacgactgcgcccccacttcgggcttcacgctggaggacccggtgcaggcggcccagcgctgcgtggacagcctggaggagcagggtgcgcagtttatcatcgcgctgtcccacagcgggaccgacgagcgggagcggaagtcggaggaccagcagctggccagggaggtggaggggatcgacctgatcctctcgggccatacccacaccaccctcacccaacccattgtggagggggatacctatatcgtctccgccgggccctactgcgagaatctggggagcatcactctggagtggtcggaggacggaagcaagaccctggtggactaccagctgatccctatcgaccagaccctgccggaggaccaggagatcgcctccctggtggaggagtggaaggcccaggtgggggtggattatctggcccgctaccacctgacctatgaccaggtgctggcccgggcggacttctccctgacgcggccggagtcgggcgtccagcagggaaatcccctgggggagctggtagcggacgccttcctctgggcggcgcgggagctggcagcggaggacccaggggtgcccacagtggcagtcactgccgacggcgtgctgcgggccgatctgcctgcgggggatatcaccgtctcccaggcctttgatgtgctctccatgggagtgggggaggatgggacctctggttttccactggtgacctgctacctcaccgggaaggagctgcgggcggcggcagaggtggacgcctcggtgacccctatcatgccggcggcccagctgtacatgtcggggatggtgtacaccttcaacccccaccggatgtttttcaaccgggtgacctcctgctggctggaggagccctccttcgccaccggcctgttggagcgtgagatgtcccggatcgaggacgaccagctctaccgggtggtgaccgggatgtactccgcccagatgctgggcacggtgaaggagaagtccctggggctgctgtctctggagcccaaggacgagaacggagtgcccatcaccgattttgccacccgggtgctccgggacgggaacggcagcgagatcaaggagtggtatgccctggcggcctaccttcagtccttcggggatgaaggggtgcccgagcggtacggcatgccgaagggggacgggcgcaagtcggtggaccgcagctggaaccccatcgagctgctccgctcccccaactggatcaccctggtcacgctgctggcggcggcggcggtcctggcggcggcggtgctgctggtccgggccctggtccggcgggtaaggcggcggcgctacggcggcggccggaagaggtaccggggataggatgccggcgcgggcatccgcccatcagaatcaagacccaggcggcagggaccgcctgtgaggaggaaagagtgtgaaagaacagtatcgcatcgcggccaagcggagcctgaccccggagatcgggcagatctcagtggaggcaccgctgatcgccgccaaagccaaggcgggccagttcatcatcctgcgggtggacgaggcgggggagcgtatccccctgaccatctccagcgcccaggacggaaaggtcactgtggtctatcagaaggtggggggcaccaccttggccctggaccagctgcaggagggggactgcctccacgactttgtgggccctctgggcacccccacccacgtggagggctaccgccgggtggcggtgctgggcggaggcctgggctgtgccatcgccctgccggtggccaaggccatgaaggaggccggggcccaggtggacctgatcggcggcttccgctccaaggacatcgtgatcctggaggaggagatgggacgggcggccaccgacttgtacatatgcacggacgacggcagctacggttaccacggctttgtcaccggcaagctggaggaactgatccagggcggggcccagtatgaccatgtggtggccatcggccccctgatgatgatgaaatttgcctgcaagctcaccgagaagtaccacatccccaccacggtgagcatgaaccccatcatgatcgacggcaccggcatgtgcgggtgctgccgggtgacggtggggggcgaggtgaaattcgcctgtgtggacggcccggactttgacgggcatcaggtggactttgacgaggtgatcgcccgcaacgccacctatcgggaatttgaggcacggcggaagcaggaccacctgtgccgcctgggaggaggtgccatgaatggctaacatgcagctgaccaagacccccatggcggagcaggacccccaggtccggaaccagaacttcctggaggtggcccagggctacaccctcgaggaggccatgaacgaggccaagcggtgcatccactgcaagaacccggcctgcgtgtctggctgcccggtgggcatccccatcccggaatttttggatcaggtggcccaggggaacatcgctgccgcctatgagatcctgtccaacgccaacgccctgcccgccatctccggccgggtgtgcccccaggaaaatcagtgcgagggcaagtgtgtccggggcatcaagggggagccggtggccatcgggcgggtggagcggttcgtagctgactgggccgcccagcagggagtggccaacatggccaccgcccccaagaacggcagaaaggtggcggtcatcggctccggcccggccggcctgacctgcgccggcgagctggctcggatgggatacagcgttacggtgttcgaggcgttccacctgcccggcggcgtactgacctacggcatccccgagttccgtctccccaaggccatcgtggctcgggaggtggccaacctggagaagatgggggtggagatccagctgaacatggtcatcggcaaggtgctgaccatccccgagctgttcgacatgggctatgagtccgtgttcatcggctccggcgccgggctgcccatgttcatgaagatccctggtgagtccctggtgggggtgtactccgccaacgaatacctcacccgcatcaacctgatgaaggcctatcagccggacagcgagactcccatcctccacaaccgcaaggtggcggtggtgggcggcggcaacgtggccatggacgccgcccgctgcgccaagcgcctgggggcagaggtccacatcgtttaccgccgctctgacgcggagctgcctgcccgggcggaggaggtccaccacgcccgggaggagggcatcattttcgacctgctcaccaaccctgtctctatccagggggatgagaaggggcatgtggagtccatcacctgcatccggatggagctgggagagccggacgcctccggccgccgtagcccggtgcccatccagggcagtgagttcaccatggaggcggacgccgtcatcatggccctggggaccagtccaaaccccatgagctacggcggaactcccggtctggagcgcacccggaagggctgcgtggccgcggacgaggcgggacacacctcggtggagggggtctttgccggcggcgacgccgccaccggcgccgccactgtcatcctggccatgggggccggcaagcacgccgcaaaggccatcgacgagtatttgaagagcaagaaataagacaaagggctccgcacaagctgcggggcccttactgtaaaagtcctgtttttggggctgcttctgcggtaggatggaaaaagaaggggaaagacatgctttatctgaggaggttctccctgccggggcagggggcagaggccagcttcctggcacgtgacagcgagaacaaacggacctgttacggcagccgctaccccttcggcatctttctgtcccgaaaggtccctcctctgacctttgagcccatcaccatcctgtgcggcgggaacggctgcggcaagaccacggtgctcaatctgatggcggagaagttgaagctgcgtcgcgggactgtgttcaaccggagctccttttttcagccctatctggatctctgcgaggcggagacggcaggggccttcggggcggcggagcttgagaacagccggatcatcaccagtgacgatgtgttcgacggcctgctggatctccgatatatgaatgagaacatcgagcacaggagaaaggaactgctggaggaatatgcggatgtccggtacgcccgttttcagatgcgctctctggaggactatgaccgcctgcgccaggtggtggaggcccagcgcaagaccggctcccactatgtgcgggaccgggtgatgaaggatatcccgggctgttccaacggggagagcgcattcctttacttcaccagggagatccaggagggcgggctctacctgctggacgagccggaaaacagtctgtctgcccggctccagctggagctggcccgctttctggaggactccgcccgcttttaccgctgtcaattcgtcatctccacccattcccccttcctgctggccctgcggggggcgaagatctatgacctggaccaggacccggtggagccctgccgctggacccaggtgcccagtgtccgcaccttttacgagttcttccgcagccgccgggaggaatttgaggatgagaacggcgccccggactgaccggggcgccgtttcatttgtggagaaagccatactggggggagctccgccgctttttcgcgcgtttttatgcctgctccgggtgtttctccagccaggagacagcataggtgcaggtggcggcgggggtgccgccgtttttgcggatctgctccagggcggcccggaccagcttatccgccatcccctgcccccggagggaggggtccacaaaggtgtggtcgatggtatagattccgggctgagtgcaggggaatgtgatctcagccaccagacggcccccgccgtccagcccgtagacccgggtaggctcaaattgcagctccatgtttatcacctcgtgcccagtgtagcacacaggtggagaaaaagccagaaaaatcctgctctgaggagaagagctcccagagcgggggaatcagctcttgggcttggacttgaagagcagcgccaccaggaagccgaagaagatggcggcggtgatgccgcccgccgctgcggtgacacccccggtgagggcccccaggaagccctgctcctccactgccttgcgcacccccttggccagcagatagccgaaaccggtgagggggacggtggctccgctcccggcccagtccaccagcttctggtagacgcccgcgccgcccaggaccacgccggtgaccacatagaggaccaggatcttggccggggtgagaggcgtcttgtcgatgagaagctgtccgatcaggcacaggatgccgccgcagagaaacgcgttgaaatattccatatcagtgacctcttttcttggacatgacggggatcatttgacagcggagatggcgatggcgtggcagataccgggcaccgactctccctgaaaggcggaggtgggggagtggagggcgccggtggggcagaaaaggatatttttccagcggccctcccgcatcccgttgagcagatagccggtgagcaccgaggcggagcagccgcagcccgagccgccgcagtggacgtcctgattttccagatcgaagatcatcagaccgcagtcgttgtggttggtggacaggtccaccccgtcctgccggaacagctccagcagcagctcacgccccagcttgcccaggtcgccggtgacgatcaggtcgtagtagtccggcccccggccggtatcctgaaagtgggcggtgagggtggcataggccgccggggccatggcggcccccatgttgttggtgtcggtgatccccttgtcggtgatcttgcccagggtacagtgggtgacgtagggaccgggcccctcccgggccaggatggcggccccggcgccggtcaccgtccactgggcggtgggggtgcgctggcctccgtactccaggggggtgcggtactgccgctccgccgtacagaagtgggaggagaccaccaccgccgcccactccccaaagccgccgtccaaggtcatggaggccagggccagaccctcccccatggtggagcaggccccgtagagcccaaaaaaggggatgtcctgcccccgggcggcgaaggaggagccgatgcactggttgagcaggtcgccggcaaagagccagtccatggcggaggcagcctggccggccttgtccagcgccagggcgagggcctgcttctgcatggcgctctccgacttctcccaggtggcctccccaaaggtgtcatcagagccgatgaggtcgaaggagctggccagagggccctccccttccttcttgcccactacattggcgtgtccggccagggtgggcgggttggcaagggccaccgtttgacggcccagtttttttgttgtcatggcgtcaaggacctccgtgctgttgaaaatcagaggtagcttgccccgagaatgaaaaaatatgaaaaaaggcgcatgtctcgtccgacaaaatacggcggacgggacatgcgcagcagctggtggaaaaacttttttagagggtgacctctccggccaggtcggagtcgaagatatcgcggacctgcaccgggtcctcggtctggcccagggcccacatgagcttggtcaccgcggcttccgtggtcatgtcgcggccggggattaccccgcactccagcaggcgctggcctacctcgtagatggacaggtcgctggactcatagaggcactggctgcacgccaccaccgacaccccgtgggcagtgagctcgcccagccggtccagcaggttccggcggagaaagtgcatcccgccggcgccgaaggtctccaggacgatgccccggtagtgcatgtccatcagcatggagaagaccgccgggttggtgccggggatcagcttgagcagaaagacgtcggggcacagccgatccagcagccgggtggggcggctggggtcgccggggcggatggcgctctcgttgcggtggatgccgttggcgaaaacttcccccagatagggggcattgacgctctcgaaagcctcaaagcccatggtgcgcaccttcactgcccggcagccccggatcagcttgtggtcaaaggcaatggagacgccggggatgcggcagtccacggcggaaaaggcggtatataggttgttgcgggcgtcggtgagcaggttgtcgatgggcatctgggagccggtgaggactacgggtttggtgagattctggagcatgtagctcagcaccgaggcggtgtaagccatggtatcagtgccgtgggtgatgacgatgccgtcataggcgtccagattttccatcaccgcccgggcgatggtctgccactcctcagcctggatgttggagctgtccaggttgaggatgtcccgggcgtcgatgtggtagtgggcgcgcaggtccgacatatattccagcaggccccgggcagagatctggggctccagtccctggtcgccccggcgggaggcgatggtgcccccggtggtgagaagcaggactcgggtcatggaaaacctccttgcagaagagatggaagggtcaggggagggggcgtaagaaccggacgaggacctccgccagcgcttcgggggcgtctgtgttcacctcgtgccccgcaccggggatgagggccagctccccctggggcaccagccggcagagctgccgggcggctttctggttggcatggtcccccgtgccgcagaccgccaggacaggacagcggagccgggccaggcagcctcggaagtccagggccatcatggagcgggacaggcgcatcgtatccgccttgctcagcccgctggcggaaaacatggacccgggcatcaggcggaacatggcgttttggagccggagcaggcccttgggcatgacgaactgggtgccgatcaggaccagggccccaacccggtccgaatgctcgatcccgtattgcagagccaggaccccgcccagggacagaccgcacagggtgaggggggcgggaagggcgccgcagtaccgtgagaaggcctgatagagattttcataacagacctcctttccccgaatcagaccgaagagatcgggacagaggccgcctgactcctgccccagcacgcggagcaccgcctcccagctggccggggtttggcccaagccatggagatagacaacagacatgggatcgcctcctggccctcccggaccggtagaggagcggccggaagagagtaagatcggaccggacagggcccgttttctccatcatacgatatttttcacccgccatcaagggagaattccgattttgttcggggctggggcacggaagagagctgactcgatccgaggcgcccttctggccacagcgatattaagcgggggacctgaaagcctttttactttatctgaaacgataaaagataattattttatgtttatcattaaaaaataattgacaaaaatatgttgagtgatatactgtgtgttaagaaatgaaaggagcctttatttatgaaagaaaaagcgttgaaaagatatgctcattttatctccatacttcttaacatcgtctgcattgttttcggcgtattaagtgtatcgttatttgcagggatcgtggttatcgtttgtgcccggctttttttgccggaaatgttccgccaggcgtgggaaactgctgttaaaggagggcaaactcttagctttggacaatgcgcattctttttcatttgctgtcttggaatgctcatctgtatctttttagccctgtataacgccaaaagattgtttggatgtatcggcaaaggaaattctccttttacagctgaaacagccagtcagatacggaaaatagcattgtatgtcctggtgtttgctgttttttctgcattctctgtctttaaaatggcattttcacaattcttcatgagtggtttgtttgccctcgttctgttttgtatctcccttatttttgactatggatgtgagttgcagcaagaggtggatgaaacgctgtaaaggagatatgatatggcaataattttaaggcttgatagaatgatggcagatagaaaaataagcctaaacgaactatctgaaaaggtcggcatcgcaaatgtcaacttatctaaaatcaaaacaggtaaagtaagtgctatccgcttttctacactgaattccatttgcaaagcactggattgtcagccaggggatatattagaatatcagaaagacatggaagaataaaatttctgtttttttatgatatttttctgctttgtccagtgtgtagtgaaattgacggagttgaaaaagaggaaaaaattgatataataaaaaatcagagatcctgcgtccggcgaggcccatcgggggcggaggctggactgccacagaaaggaaattcgttatgtcggttgaagagccaaagcgtaccctggcttatatctgccccgcctgccgtcagtcggtcattgtggagcgggacctgttttccctggctgccgccacggcccatatcaaatgcccctgcggcagatcggagctgcgggtggaatttgtggacgaccatgtggacctggaggtgccctgcctgttctgcggccgggaacaccgggtgagctgctccacccacgccttcctgcaccagaaggccctggccttctcctgcgcggcctccggcctggactgctgctacgtgggggaggagggccctgtctttgccgctacggcccggctggagcgggcggccgataagctgaaggaggagcaggcggccgaggagaaagccgcgttcctggacgagatcgtcatgcacgaggtgctctccgaggtgaaggacatcgcggcccggggaggtgtctcctgcgcctgcggctccagggaatggaagctgaaggtgaattacagctccatcgacctcatctgcgcccagtgcggcgcccagatgcgcatcccggccgctacggcggacgacatcgacgacatctgctgtaaaaacaccatattgatccggggaaagaagtgaaacggcatgggacagttttttgaatatgagatgacggtggacagccgggatgtggacggctggggccggtgccggccctccgccgtgctgggctatctccaggaggcggccaccctggccgcggaggacgggggcttcgggcgggagaagaccctggagtaccacgctttctggatgctggcccggatctggttccgcctggaccgccccctgcggtgggaggagaaggtgacggtgcgcacctggcaccggggcagtaagacggcgctgatgtaccgcgattttgacctgctggcgggcggcgtcccagtgggcgaggcggtgtccgcctgggtgctggctggtgtggaggaccggaagctgctccgcctgtcccagatgcgggagctggaggggaccgagggcggcgggctgtgcaagcagctgaccctctccaagctgcgcatgcctggagagatggaggagcgggaccggcggaggatggggtacagcgataccgacatcaacggccatgtgaacaacacccgctacgccgacttcgtatgcgatgccctgcggctggagggcctgccccgcagccgctttctgagcgagctccagattggatacaccgcagagagccgggcaggtgatgtgctgactctggaggtgggagaacagggggggcagcactttgtgaagggtgtagacgaggcgggcaaaactcactttgaagcggccgcgaaatttggagaagagattcattgacaagcccgcgaggcggggggtacaatagaaaaaatatgatcctcaaatcccaacatcattccttgctattggagagaaaaggagctgtgaactatggtcaaccaggacgcttcccagaagtttgtcaagcaggggcttacctttgacgacgtgctgctgatccccgccgccagcgatgtgctgcccgctgatgtggatctgcacaccaacctgacaaagaaaatccggctgaatatcccgcttatcagttccgctatggataccgtcaccgagtatcgcatggccatcgccatcgcccgggagggcggcatcggcgtcatccacaagaacatgtctatcagccagcaggcggagcaggtggatatggtcaagcgcagcgagaacggcgtcatcaccaaccccttctggctggctccgggccacaccctggcggaggccgacgagctgatggccaagtaccgcatctccggcgtgcccatctgtgacaacggaaagctgatcggcatcatcaccaaccgggacatgaagttcgagaccgacatgaaccagctcatcgacaacgtgatgaccaaggagaacctggtcaccgcccccgagggcatcaccttggaggaggctaaggagatcctgcgccgccacaaaatcgagaagctgcccctggtggacaaggatttccgcctcaagggcctgattaccatcaaggacatcgagaaggcggaggtgtaccccaactccgcccgtgacgagaagggccgcctgctggtgggtgccgccatcggcgccaccgccgacgtgctggaccgggtatccgctctggtggaggccggtgtggatgtgctgaacctggactctgcccacgggcacacccagaacgtgctggagaccgtcaagcgcatcaaggccctctacccggaggtccagctgatcgctggcaacgtggccaccgccgagggcacccgcgccctcatcgaggcaggcgccgactgtgtgaaagtgggcatcggccccggctccatctgcaccacccgcgtggtggccggcatcggcgtgcctcagatcaccgccatctatgacgccgcctgcgtggccgcccagtatggtgtgcccatcattgctgacggcggcgtgaagttctctggcgatatcgtaaaggccatcgccgctggcggcagtgtggtcatgatcggttctctgctggcggggtgtgaggagtcccccggcgataccgagatctatcagggccgccagttcaagacctaccgcggcatgggctccctggccgccatgaatcacggctccaaggaccgctacttccaggagtccaacaagaagctggtgcccgagggcgtggaggggcgcgtcccctataagggctccaccagcgacaccatctatcagctgatgggcggcctgcgggccggcatgggctacaccggctgccacagcatcgcggagctccagcagaacgcccagttcatgcagatcactgccgccggcctgcgggagtcccacccccacgacatctatatcaccaaggaagctcccaactataccatcagtcccgactgatcgcagagcccgggccgcagctgcggcccgggcttttccatttccatgatcccccttgtcctcccggagcggagtgagtctgacccaatggggagctatccctttttccgtgtcaagaagatcccgacgatcgcggcgatcaggatgatgggggccgctctgacgaacagccattccaacccgtgaagggccaccccgattacagcggtctcgggatcgctgtaatcccagcctaagtaagggctgttcagggccgacaagaaggcgaagatggccgctgtgaccgcgcacaatgagaggaggagccaatgcaggatacgcctccttgtggtttttctctgcgcaagctgcaggtttatcacctccagttttgcggagatggctttcagggtatcaacgtccgacgccatgacagtttctcccagcaaggtgctcacgggggtctcaagggcttccgacagagagatcagcaggtcagagtcggggacagatattccttgttcccattttgagatcgtctgccgcaccacgttcagcttgacagcaagctcctgctgggaaagtccttttgatgttcggatcgcttttatgttttcgttgagcatttgggatggtctccttccatctgttctgtgccataattatatagagagcggcccgttgccgcaagcaacgtatgttaacatttcaggaaaatggccatttttgttccatgatttgaggctggccgctgttcatacgcagaaaaaatgagttcgatctctggatgctttggagcgtttcatatacatgtaaatttccctgcgcttgggagaaagaagaaggggcggaagtccatgaataaggaggagaagaatatggagcggtacaccctgcgggaaggggggcgggtcctctgccccacggagcgcctggaggcggcgctggagcggctggcggcctttgaggacctggcctgtggactggaggaggagcagcagtccatctcccagcgtctggaggagctgagaggacaacggaaggaaaagaccgtccagttccgggaactgctggcccaaaagctggtcaacagcagcctgatccaactgctggagcggaagggactgaaatgagacccagctgtccggcggacgggagggacaagcgggcccccgaagagaaattactttctctccggggggctttgtgctacaatgcgtatagctgaaaaacaggctggagaggggcgaggaccgtgctgaaactgatactgggccgggcgggatcggggaagactaccgccgtctaccgccgcatgtgcggggcgggggcggagcgcccccaggtcctgctggtgccggagcagaactcccacgaggcagagagggcgctgtgcaaggtgggggggaacggagtatccctgtatgcggaggtgctctccttcagccgcctggccaaccgggtctttctggcggccggagggctgggagaagcggagctggacgcaggcggccgcctgctgctgatgcaccgggcagtgaagtcggtggcggcccagctcaccgtgtgcgcccgctcagcggggcgggcctctttcctccgcagcctgatcgccactgtagacgagctgaagagctgccgggtctccccggcagacttggagcgggcgggctgtgaggcggagggaccggagggagagaagctgcgggacctgtccctgatctgcggggcttacgatgccctcactgcccaggtggccctggaccccagggaccggctgacccggacggcggagaagctgaaggactgcccctgggcagcggggagggacctgtggctggacggttttaccgactttactccccagcagatagaggtgctctcccgcctgctggagcaggcccattcggtgacggtcaccctcacctgtgaccatctggaggaggatgagggggggaccggcatcttctcccccgcccgccgaacggccgcccagctgctgcgggcggcccgggagcgccgcgtccccagccaggtggagcacttggcggcggagggaggaggacgggcggcggatctggacttcctggaaaaggccctgttcgcccacgctcccggcctggagcgggagccggagggggcagtggagctctttgccgcccggacgccccggggagaggtggagtggactgcggcccgcatcctggagctggtgcggcgggaggggctccgcttccgggacatcggggtggtagcccggtcctacaggacctatcaggatttggtggagtcggtgttcgcccggtacggggtgccggtgttctcctcctctatgagtgagatcctggataagcccatcctggctctggtgaccggggcgctggacacggtggcggggggatatgtctatgacgacgtgttccgctatctcaagaccggcctcaccgacctaggggaggaggaccgggatctgctggagaactatgtcttgaagtgggacgtccgggggagccggtggacgcaggagaagccctggaccatgcaccccaggggctatggcttccccatgacggaggaggaccaggccctgttggagcgggtggaccgggcccggcggcaggtggcggccccgctggagaggctgcggaaaaattcggcccgtacaggacggggacaggctatggctctctacggctttctggaggagatcggcctgccccggcggctgggagagcgggtggaggaactgcgccggcggggggagcccgcgctggccgaggagtaccgccagctctgggagatcctgtgcggcgggctggagcagtgtgccgccctcaccggggaggtgcctatggagctggaggagttctccagtctgttccagctggtgctctctcagtatgacgtgggcactatcccggtctccctggaccgggtgacagcgggggaaaccacccggcaggccggccaccgggtgaaggtgctcttcctgctgggggcggacgacagctccatcccccaggtgggggcggagcccggcctgctctccgacgacgaccgcaccctgctggcctcctacggcctggagctgaaccagagcgcggaggagcgcctctaccgggagatgaccaccctgtatcagatctgcgccctgcccagccggcgtctgattctcacctggcccgcccagggggcggggggggaggagcggcggtcctgcttcctggtggggcggctgaagctgctcttccccggccttgcagaggtgcgggaggagggactgggggactccttccgcatggcggcccccctgcccgccttggagctggcggggcggagcccggcagtccggcgggtgatggggtccctgccggagtacgccccccaggtggagcggctggaacgggccggacgctgggagcggggcaggctgacccggggggcggtggaccggctgtatggacagcgggtacccatgtccgcctcccggatggacaagtacaagtcctgccacttctcttacttcatgcgctacggcctccaggcggagccccggaagcctgccggattcactgcgccggagtacggcaccttcgtccactatgtgctggagcatgtgctccagagctgccccatcggggaggagagctggggggaggagctgcaaaagcggctgagagcggcggtacgggcggcggtggaccgctacacggcagaggaactgggagggttggagcaccagagccagcgcttccgctatctgttccgccgcctgctgcgctccgtccaggcggcggtggacaacgtggcccaggagctgtgcgcctcccgattccggcccatttcctttgagctgggctttgggagccggggggagctgcctccggtggagctgacggcggagggggttaccatcagcgtctccggcttcgtggaccgggtggacggctgggtggagaacgggcggctccacctccgggtggtggactacaagaccggccgtaaaagctttgacctgacggaggtgtggaacggcctgggcctccagatgcttctgtacctcttcgccctggaggagcggggagaggggttctacggactgccggtagagggggcgggggtgctttacctgcctgcccgggacgcggtggtccggggcagccggaccatgagcgaggaggagcggcagaaggcagtggacaaagagctggtccgccggggattggtcctctccgatggggcggtgctggaggccatggagcggccagggccggggggctaccgcttcctgcccctgcgggtgtccaaaagcacaggggagatcaccggcgaggccctggtgagcgccgagcggctggggcggctggagaagcacacccgcaaagtcctggaggagatctgccgggaactggcggcaggcaacatcgctgccgatcccttctggcgggggcctgagaagaacgcctgccgtttctgcgactacgccgccgcctgccactttgaggagggcagaggcggggactgccggcgctggctgccgggggtcaaggcccaggagttctgggagaacgtagagcgggagacagactgagagaggtgcagcagatggaacatcgtttttataagctggagatctttgtgccggaggactatttcgcagctgtccgtcaggccctgtggtcggtggacgccgggcatatcggggagtatgaccggtgcctgagctggagccgggtgaacagctgctggaggcccctggagggggcggacccctttgagggcatccctggggagctgtcccaggagcaggagctgaagatcgaggtgtgctgccggggggagcggctgagggagaccctggcggcagtgaaggaggcccacccctatgaggagcccgtgatcaacgtgctgcccctggtgggcacagggctgtgagaggaggactgtgatggacatcaggctgtgctgtgtagaggcgggggagggattcccgctggtgctcctccacggcaacggggaggaccacacctatttcaagcggcagatgggacccttttcccagcacttccgggtcatcgcggtggacacccggggccatggggagagccccagagggactgcccccttcaccctggagcagtttgcggaggatctgaaggagttcctggacgggaggagcattacccgatgccacctgctgggcttctccgacgggggcaacatcgctctgctgttcgccctgaaatacccggagtatgtggaaaagctgatcctcaatggggcggacctgtgcccctccggcgtgaagctgaccacccagctgcccatcgtgctgggctggggaatgtgccgggtgccagccctgttcagccggaaggccagggcgaattgggagatgctggacctgatggtgacccagccccacatccccacggaggcgcttgcccggctccctatgcccgccttggtggtggcaggggagcgggacatgatccgggagggccatacccgggccatcgccgccgccatcccggacagccggctggccatcctgcccggggaccacttcgtggctcggcggaactggcagaccttcaatcccctcgtgctggatttcctgctggacggcgcacagatcccgtaggaattggaaaggaaagacagagatggatgattggttcacgctggagcggatcgatgaggatacggacatcctcagtgagtaccgccactgggaggagactcactgctacctgctgcggggaagggagcgcagcctgctcatcgataccgggctggggatctgcgacatccggcaggcggtggaccgtctgacggatcggccggtggcggcggtagccacccacatccactgggaccacatcgggggccaccggtactttccggagttttatgcccacgaggcagagctgaattggctgtcgggcgggttcccgctgtccgtggaggccgtccgggccatggtggcggaccgctgttgcctgccggaagactttgatgtgagccggtacaccctgttccaggggcatcccgcccgcgtgctgcgggacggagaccgcatcgagctgggcgggcggaccctggaggtgctccacacgccgggccactctcctggccacatgtgtttttgggaggcggagcggggctatcttttttccggagatctagtctatcgaggcaccctgttcgcctgctacccctctaccaacccggaggaatacctgagttccctggagcggaccgcctgcctgccgatggagcgcctgctccctgcccaccacgccctggacatcgggccggagctcctgggccgtgtgcgggacgctttccgcgggctgaaagagcagggaaagctccgccacggcggcggcacctttgattacggggaatgggcggtccggctgtgacaggaaaaccggaaaagcagaacgacgaaaaaagaaggaatggaccatgcagcagaacaagaatattttgatcatcaacgacatgccgggatatggaaaggtcgctttggccgccatgctgccgattttgtcccacatggggcataatatctacaacctccccactgccttggtgtccaacaccctggattatgggaagttcaccatcttggataccaccgactatatgaaaaagtccattgccgtgtggaaggagctgggcttctcctttgactgcatcaccacgggctttctggcctcggcggagcaggtggacattatccgcgccttcatcgagagccagaggaaggaggacctgttggtgatgaccgaccccatcatgggggatgaagggaagctctataacggcgtcaccgaggagacggtggagaacatgcgccgcctcatcggggtggcggatgtgatcgtccccaatttgacggaggcggagttcctgacagagcggtaccggggggcggaggccctcgaccggcatcaggcccgggaggtggtggacgccctgctggcctgcgggcccagatcggtagtcatcaccagcgggctggaggcggagaccggccgccacgtggtgtggggctactgtcaccggcaggggcggtacttcaccctgcccttcgacttcatccaggtccactttcccggtactggcgacgtgttctctgccgtcctaataggagagctgctggccgggaccggcctggagcaggcggcccagaaggccatggatacggtggagcgcctggtctgtctggaccgcaacgaggtggagaagaacaagggtatccgcatcgagcggtttttgaaggaattggatctctgagcctccagagggcggaagaaaggaagaaaagggatatgtgggcagtttttgcgctcctgtctgcggtgttcgctgcgctgaccgggatattggccaagctggggatggagggcatcaactccaacctggccaccgccatccgcaccgtggtggtgctggtgatggcctgggctatcgtgttcctgacagggaagcagcatgagatcggggatatatccacccggagctgggtgttcctcctcctgtccggcctggccaccggcctgtcctggctgtgctatttccacgcccttcagattggccaggccagccgggtcatccccatcgacaagttcagcgtggtcatctccatggtgctggcctttgtggtgctgagggaggcggtgaccgtccagaccgtcataggcggcctgctcatcacggcagggacgctggtgttgatcctgtgaatggagcggacagagagaggaggacgcgcagatggcctttgccttgacagaggaacagagcagagcagtccatgaccgggggggcggactgctggtgtcggctgcggccggctcgggcaagacccgggtgctggtggagcggctgctggaccaggtgaccggggagggagcggatatcgacgacttcctggtcattacatatacccgggcggctgcggcagagctgcgggcccggattgctcaggagctgtccgatcggctggcggagcggcccaacgaccggcacctgcggcggcagaccacgttggtctacaaggcccagatctccacggtgcacgccttctgtgccgctctgctgcgggagagcggccaccagatcgggttggacccggactttcggctgtgcgacgagggggagggcgcggtcctgatggcccgggtgctgggggagaccctggaccgccagtacgaggatctggactcggagggggactttgccgccctggtggacaccatggccgccgggcgggacgacagccgcctggagcagatcgtgctggacgtgttcggccgcatccagagccacccggacccggcgggctggctggcagaccagagccgcctgtgggagctggatggggtcaccgacgcgggggacaccccctggggggcgctgctgctggccgacgccaggcggcagggggagcgctgcctggagctgctgctccgggcgctggaactcaccggccgggacagcgtgctcagccagaattacggccccagtctctcccagtccatccagggggtgcgggccctgctggcggcggacagctgggacggcgtgtaccgggccctgccagtggagttcccggcggcggggcggaaaaagggcgtggaggacctggaggcggcggagcgggtgaagggactgcgcacccgctgcaagaagcagatggacaagctctttgaggacctgggcggggacagcgggcagctgctggccgatctggccctggcccggcccgcggtgcggggcctgatggagctgacggcccgctttcaggaggactacgcccgggagaaggcgcgccggggcatactggacttttccgacctggaacatctggccctgcggctgctcacccaggacggggacggagggcccggcccgctggcccggtactggagcggccggttcgccgaggtgatggtggacgagtatcaggacaccaaccaggtgcagaacgccatcttcactgccgtgtccgatggggggcggaagctgtttatggtgggagacgtgaagcagtccatctaccgcttccggctggccgaccccaccatcttcctggacaagtaccgccgtttcaaaccttgggaccaggcggcggagggggaggagcggacagtggtgctcacccgcaacttccgttcccggccggaggtcctggaggggaccaacgacctctttcgaaatattatgtcaactgaattcggggagctggactacacccaggaccaggcgctggcgccgggggccgccttcccgccggagggagactggcgggtggagctggacctggaggacctgtccttcctgggggaccaggaggaaggggagcgggcggacaaaaatctgctggaggcccgctgggcggcccgccgtatccgggagctgctggacggggagctgatgctgacggaggggagcgggcagcggcgggcggagccctctgacgtgctccttctcctgcgctccccgggggcggtgctccaccactatatccgggccctcaacgaggcggggctgccctggtccgccgagggcggggaggacttctttgcctccaccgagatcaatgtggccctgtcccttctccagatcgtggacaatccccgccaggatgtggcgctgatcgcggccctgcgctccccggtgtacggcttttcaggagatcagctggctctgctccgggcggagggggagggggacttctattccgctgtggtccaggccgccggccgggggaaccaggcgtgccgggatttcctgacggagctggaggagctgcgcttcggggcaggggaccgcacctgccgccagctgatctggcacatctatgagcggaccaacctgctgggcctgttcggggccatggacggggggcaggagcggcagggccgcctgctcaccctctatgccctggcggggcgtctggaggaggcggggtgccggtctctcttccagttcctgctgcgcctggagcggatgcgccagaccgggggactgtccctgtccgccccaggccgggaggggggcggtgtgaccatcatgtccatccaccgctccaaggggttggagaaaccggtggtgctgctgtgcggcctgtcccggcggctgaaccgggacgacctccagcggcctgtcctcttccatccggtgctgggggtgggcccccggggcctggaccgggagcggatggtggagtatcccaccctggcccgcaaggcggtggcccggaagctggagcgggagatgatggcggaggagctgcgtctgctctatgtggccatgacccgggccaaagagaagctgatcctctccatcccgctgcggcggggagcggaggagctggagaagctgggggaggacctgtctgttccaccctcccccatggcgttggagcgccagcagagcgtgggcggctgggtgctgcttcacgccctggcccggcccgaggcgtccgccctgcggagcatggcggggctgccggaggtatccccggggactctggggcccgcctgggatattcgatgggtagatggggcggcactggcccagattccggagcagaggggccgcttcgcggatctgcccggagagtcggagacggaaccggaggggctgagagaggcgctggcctggcactatccgttctccctttcctcccagaccccctccaagctcaccgccacccagctcaaggggcggagcctggaccaggagacccgggaggaggccgccccggcggccctcccgccccagccgctctccatcctgcggccccagttcgtggcggaggagcggggactcaccccggcccagcggggcacagccctgcacctggccatgcagtatctccccctggacacggacaccccggagcgggcagcggcggagctggagcgcctggtgtccggcggcttcctcaccccccagcagggggcggcggccgatccgggacagctgtccgcgttctttaactcgcccctgggcagggagatggcgtcggctcccgtgtgccgccgggaattcaaattttccgtgctgctgccggcggaggagttctgccccggcctggagccgggggaggaggtgctgctccagggcgtagtggacgcctggttcgagactctggagggcatcacggtggtggacttcaagagcgaccgggtctcccggtccggggcggcggcccggggagaggagtaccgccctcagctggaggcgtacagccgggccctagaggagatcaccggaaaacaggtggtccgaaaggcgctctggttcttcgaaccgggggagctgatccttctgtgaaagggcgacaaaagggccgagaaaaaagtcaggataattttttgaaaaaatagttgcttttgcgggagatccatgctattatatcagttgcgtttacagatgatccctccatggagaaagaggtgaagatacaatgaaagcaggcatccatcccgattatcagcagaccaccatccggtgcgcttgcggcaatgtgatcgagactggctccaccaagaaggatatccgcgtggaagtgtgttccaagtgtcaccccttctacaccggtaagcagaagatggtggacaccggtggtcgtgtcagccgcttcaacaagaagttcggcctggacaagtgagattgcgcctcaaaagccgcaccgtggatcggtgcggctttttgtcgtattttgctgtcggcccggagtatcctcaccccagggaggggcataaactaacagatgagatcaaaaatgagttaggaggctgtatcatgaagaagatcgacgtgaagagcttgcaggacaacgtattttccctcatcggggaccggtggatgctcatcaccgccggcacggcggagcggtgcaacaccatgaccgccagctggggcggactgggcgtgctgtggggcgccccggcggccaccatttacctgcggccccagcggtacaccaaggagttcgtggaccgggaggagtatttcaccctggcctttttcggggaggagcagcgcaaggccctcaccctgtgcggcagcaagagcggccgggaggtggacaaggtgaaggagtgcggcttcaccgtggcccaggccgagtgcggggccccctattttgaggaggcggagctggtgctggtctgccgcaagcgctatgcccaggagatggacccccaggccatcccccaggatgccaaggacagattttatcctgagaaggactaccataccatgtatatcggagaggtcgtggaggcgctgaggaaataagggcctcagcgcccggaccgcctcctgacagacggggaaaatcccattttggaggatctatgacagaaaacaacacggaaaagaaaaacagggcggtgctggtgggcctgtcctcccgcgccctggccccggaggagaacgccgacgaggcatccatggaggagctctccgccctgctggagacagcggggggagagtgcgtgggcgtggtgacccagtccaaggacagcccggacccccgtaccttcatcggggagggcaaggtggctgaggtgaaggaactggcccatgccatggacgcggacatggtgatctttgacaacggcctgtctccctcccagcagagggtcttgtcagaggacctgggggtgtcggtgctggaccgctccgccctgatcctggacatcttcgcccagcgggcccgcacccgggagggccggctccaggtggagctggcccagtataagtatctgctcccccgcctgatgggcatgtggacccatctggagcggcaggagggcgccatcggcacccgcggccccggcgagacccaactggagagcgaccggcggcacatccgccgcaagatctccaagctggaggaggagctgaaggatgtgcgccgggtgcgggccacccagcgggagcggcgcatcaagaacgaggtgccggtggtggccattgtgggctataccaatgcgggcaaatccaccctgctcaaccggctcaccggggcggccatcccggccaatgaccggctgttcgacaccctggacaccaccacccgcaccctggagatctccgacacctgcacggtgctcatctccgacacggtgggctttatccgcaagctgccccaccatctggtggaggccttcaaggccaccctggaggagctggagtacgccgacctgctgctccatgtgatcgatgcctccaacccggagtggcgggaccagacggcggtggtggaggacctgatccgggagctgggggccgaacagaccccccgcctggatgttttcaacaaatgcgaccggtatctgggggacatccggccccacggggaggacatcgtctccatctccgccaggaccggcgagggggtgcccgaactgctggccgccatcggcaggcggctggacaacggcgcccgccgggtgatcatccatctgccctacgaccagggcgggctgctggacaagctctaccagcaggccaaggtggagtcggtggagtacggcgagaccatcgatgtggcggcggtctgcacccccaaggtgatcggtcagctgggcccgctggtggagggctggaggccccatcgggagccctgggaagactgaaagccccatctcagaaaagaaagggaaaggaccatggacgtgatgctcagaccctggcgcccggaggacgccccctctatcgcccggcatgccgatgacccccaggtggccgccaacctgcgggatgtgttcccctgcccctaccaactgtcagacgcggaggagttcatccgcctgtgcagggcggcggagccggagcaggccatattccgggccatcgtggtggatggacaggccgtgggcagcgtggccctcacccggggcacggatgtctgccgccggtcggccgagctgggctactggctgggccgggccttctggggccggggcatcatgaccaaggcggtggaggagatgtgccggacgggctttgaggcgtgggacatcgtgcgcatctacgcggagcccttcgcccacaacgccggctcccgccgagtgctggagaaggcgggcttcgctctggagggcgtcatgcgcagcggcatatggaaaaacggccggctgcgggactactgcatgtacgccctgctgcggccggagacccagtaggactgccacaggcggcggagggcgccggcgtcctgctccaggctgtcccccagccgctggaggaggttttcggagatttcccgggaaacctgctccgggcggcaggagaggccgtccatatagtccagcagaagggagagcagcagcgtgtcctctgtgatgcgggtgaccgtgtcgttcagatggtccagcagttcgagctcgttcatcatttatgcacctcacaatatatcgctgaaagcgattataatggagttgaggagaaaagtcaatcgcttaaagctatatattttcatagacatagctatgagctataatagcttacggtgatggattttgaaggactataaagaagtgattcgagaaaagagaatagagttgggattgagtcaatataagttggcgaaatctgtggggattgcgcaatcttttatgaatgagattgaaagtgggcgaaagaccccatctctggatgttttctttcggatctgcaaggaattgcagatcaaagtctttcccgacgagccctaaggggcgccgcggccccggtccctgcgcagggacgcacactgtgcgcccgccgtccgtgaggatgcggcccgatgcggcccgatgcgggcatcgggccctgcggggtgcgtgcttctccctgtctttgtgtaggggtggggcttgcccccgcccgccggtcccaggtctgcgatgtgccgcaggagtgattcccagacctgcccgggctattgaatcgctctggcggaagaacgccccctcatccgtcacggcttcgccgtgccaccttccccccggaggaggggaaggcttttcgggcggctggaggccgcccctacatgatattttcggcctttgcgcaggggcgcgcaatgtgcgcccgccggtttcccaccagccgcccctattgtgccaatctaggcgcgccccgcgagtattccccaaaacgtgcaaaggcaggtgaccccatgacagagtattacatccccacccaggccggtgaggcggagctggtcgagaagcgctcccgcttcatcggccatgtctggcgtgtggagagcgaggaggaggcccgtgcccgcatcgaggagatgaaaaagcggtactacgacgcccggcacaactgctggtgctacctgctgcgggaggggccggtgcgctactcggacgacggggagccccaggggacggcgggccagcccatgctcaacgtgttccagcgggaggaggtcaccaacgtctgctgtgtggtcacccggtattttgggggcatccttctgggggcgggggggctggtccgggcttatactcaaagcgccaaggatgccctggacgccgccggcatctcggtggtgcgccgctgggtggagacgctggtgccctgtccatacagccttttggagcgcctgaagtcggagaccgccgcctggggcggcgtgatcccggagacggagtacggggctgatgtgaccctcactgtcttgctgccggaggagaaggcggaggcatatctggcacacatcttggacatgaccgccgggacggtggagggcatcgccaccggggagcggttccaggacgtgccttggcggcccgccggaggggccggcggacccggataaaaaattttttgaaaaattttgattttttagaaggaaaatggggagcggcctcgtataagataaagtgtacggaactgtacgacctcacatgcaccccggcggggtgggacaggagggaccatgacgctgagagagcagactgaacagagggagcgggagacactgtcctcccgcgcctgcctggcggagcagacccggggccgggcgcggccggaggagccctgcggcgtgcgcacctgcttccaggtggacacagaccgcatcgtctactgcaagtccttccggcggctgaagcacaagacccaggtgttcctccagccggagggggaccactaccgtacccggatgacccacaccctggaggtcagccgcattgcccggaccatcgcccgggggctggcgctgaacgaggacctgaccgaggccatcgccctgggccacgatttgggccacacccccttcggccacgcgggagagcggctgctcaactccatcgtgcccggcggcttcgcccacttccggcagtccctgcgggtggtggagcggctggagaaggagggagccggactgaacctgacctgggaagtgcgcaacggcatcgagcgccataccggcggggaggacgccgccaccctggaggggcaggtggtccgtctggccgacaagatcgcctacatcaaccacgacatcgaggatgccctgcggggcggagtgatctaccccatcgacatcccgctggaggtgtcccaggtgctgggctttacccacggggagcggatcaacgccctggtggtggacgccatctccgccagccgggggcaggaccgcatctgtcagtccccccaggtgggggaggccatggcggtgctgaaggagttcatgttcgccaatgtctacaccaaccccatcgcaaagggggaggagagcaaggcccaggacatgctgaagatgctcttcgggtattaccagaaaaaccccgatgagctgcccgccgacttccaggcgatccgcctggaggagggggtggaccgggcggtgtgcgactatatcgcagggatgaccgaccccttcgcggtgagcgagtacacccggctgttcatccccatgggatggggcgtgaagtaggcctttttccccaaatagggataaagagccgggattcgggccatcaatagcggaagggggagaaaaatgcccataccggagcggtttttggacgagctgatcgcccggactgacatcgtggacctggtgggcgagtatgtgcgcctgaccaaaaagggccgcaactactggggactgtgccccttccactcagaaaagaccccctccttttccgtctccccggacaagcagatcttcaagtgcttcggctgcgggaagggcggcggggccatcaacttcatcatggagctggacagcctgcccttccgggacgcggtgggagtgctggccaagcgggtgaacctggaggtgccggacaccggcggcttcagcgccggcatgaaggagcggcgggaaaagctgctgaccatcaacaaggcggcggcccgggtgttccacaagtggctgtacgccccggagggggcggcggggctggcctaccttcagaggcgcgggctgagccgggggaccctgacccggttcggactgggcttcgcccccgaccgctgggacggtctgctgacggccctggcggagcaggggtgggacaaggccgacctgctggacgccgggctggcggtgagcaacaaggacggccgcatctatgaccgcttccgaaaccgggtcatgttccctatcatcgacatccggggggacgtgatcggcttcggcggccgggtgatggatgactccacccccaagtacctcaactcgccggacacgccggtgtacaacaagagccgcaatgtatttgccctgaacatcgccaagaagtccagggcggggcgggtgatcctgacggaggggtatatggacaccatctccctccaccaggcgggctttgacagcgcggtggcctccctgggcacctctctgaccgcggagcacgcccagctgctggcccgctacttcaaggacgcggtcatcgcctacgacggcgacggggcgggggtgtccgccgcccagcgggccatccccctgctggagcgggcggggctgaatgtgaaggtcctccgggtgaagggggcaaaggacccggacgagttcatcaagaaatacgggcccgaggccttcgcccgtctgctggacaagagcgagaaccacatcgactaccggctggagcagctgcggggacggtatgacctgagcgacgacagccagcgggtggagtttctgcgggaggccaccggggtgatcgcctccctgcacagcgcggtggagcgggagatctatgggggccatgcggcccagatggcgggcatctccgccgaggccatggcccaggaggtcaaaaaggagctccgccgccgcatccagaaggaaaaaaagcagcaggagcggcgggacctgtcccccgccatccagctccagcccaaggccagggggatgcgctacgacaacatccgctccgcccgggcggaggagggggtgctgcgcctgatcctgctggacagctccctgctggaggagacggagggcctgacgggttcggagttctcctctccgctgctggggcggatctttgacctgctgcgcagccgtgcggcagagggactgagcacccagctgcccgccctggccggagcgctggagccggaggagatggcccacctggcctgggtggccgagcagccggaaaatctggccaacagccgcagagccctggccgactacatcgccctcatccgggaggaggggctgcgccgcagcgggacagatgaggaagctctgctgagggcggcgcaaaagagatatcaggaaacaaaagcatatatggaggagaagccatgagcaccaagaagacagagacttccgccgctgtggaagagaagaagagcaagaccgacatcgagacccgcatggaagcgggcaaggtggaggtcatgaaggtggtgggaggcatcccaggtgcggaaaagctggccgaactgatcgagcggggcaagaagaagggcaatctgtcggccgccgagctgatggacgtgctggaggacatggatctggagtccgagcagatggacaagatctatgatactctggagaacctaggcatcgacacagtgggggaggactacatccccgagctgcccgacgacgtggagcccaccattgaggccatcgaagagctgcctgaggaagagatcgtggaccccaacaccatggtggacgccttcggcaccgacgacccggtgcggatgtatctgaaggagatcggcaaggtcaacctgctcacctccgatgaggagatcgacctggcccaggccatgggggcgggcgccgaggcaaaggagcagatggaggagctggagagctccggagaggagatccccgccgaggtccgcaccgagctggagaaagccatcaaaaagggcgagcgggccaagcagcggctggcagaggccaacctgcgcctggtggtctccattgccaagcggtatgtgggccgggggatgcagttcctggacctgatccaggagggcaacctgggcctgatcaaggcggtggagaagttcgactacaccaaggggtacaagttctccacttacgccacatggtggatccgtcaggccatcacccgggcgatcgctgaccaggcccgcaccatccgcatcccggtgcacatggtggagaccatcaacaaggtgatccgggtctcacgccagttgctccaggagctgggccacgaccccacgccggaggagatcgccgacgagatgaacatgccggtggaccgggtgcgggagatcctgaagatcgcccaggagcctgtctctctggagacccccatcggggaggaggaggacagccacctgggggacttcatccccgacgaggatgccagcgagcccgccgaggccgcctccttcaccctgctgaaggagcagctggtggatgtgctctccaccctgaccccccgggaggagaaggtgctcaagctgcgcttcggcatcgaggacggacggacccgtaccttggaagaggtgggaaaggagttcaacgtcacccgggagcgcatccgccagatcgaggccaaggccctcagaaagctgcgtcatccttctcgttccaagaaactaaaagactttttgaactgatccggggatcgttttgctgagtgttccggggcgcagctttccggggcccccgggcgggcccagcgcagcgggccgcacggggagagccggagcgacggaatgagtgagctcccgcctccggcaggggcgagggatatgcagtccgcgacggcgacgcgtcatccttctcgttccaagaaacgaaaagactttttgaactgacaggcgggcagagcaccggagggccggggcgcaggtttcaggtgccccacctgcaaaaaggaccccagcggaacacacatcccccggagcgcggctccgggggtgtgctttgcgggaaagagcggagaacgactatgacaaagcaggatgttttgaagcagtatttcggctatgacaccttccggggcggtcaggaggagatcatcgacgcactgctggccgggcgggatgtgctggccgtcatgcccacgggagcggggaaatcggtgtgctatcaggtgcctgccctgctgctgcccggcatcaccctggtggtctccccgctggtctccctcatgagggaccaggtgacccaactggtgcagatgggagtgcccgccgcctacctcaacagctctctcacctaccggcagtatctgctggccctggaccgggccagggagggccggtacaagatcatctatgtggctccggagcggctggataccgaggggttccagtcctttgtccgctcggcccagatctccatggtggcagtggacgaggcccactgtatctcccagtgggggcaggacttccgccccgcctatctgaacatccctgactttgtggaccggctgccccagaggccggtggtgggggccttcaccgccaccgccacctcggaggtccgggaggatatccagcggctgctggagctggaggcccccctgtccatcaccaccgggtttgaccgggacaacctgtatctggaggtgtgccacccctccgtaaagcgggtggagctgctggcccgggtgcgggagcggccgggggagtgcggcatcgtctactgctccacccggaagaacgtggaggaggtctgccagttcctccagagctccggcatctccgcaacccgctaccacgccgggctggagccggaggagcggcagcagaatcaggaggacttcctcttcgaccgggtccaggtgatggtggctaccaacgctttcgggatggggatcgacaagtcggacgtgcgcttcgtcatccactacaacatgcccaaggacctggagagctactaccaggaggcgggccgggcaggccgggacggggcggaggcccgatgtatcctgctgtacagcgggcaggacgtgcgcacagcccagttcctcatcagccagagcgagcccagcgagcagctggacccggagacggcgcggcagctccaggagcgggacttgggtcgtctgaagcagatgacgttctactgccgcacccggcggtgcctgcgtcagtatatcctgaactatttcggccagtcggccccggactactgcggcgcctgctacaactgcctccacaatttccaggagatcgatgtgggggaggacgcccgggccatcctccgctgtgtggcggagaccggccagcggttcggcgccggactgatcgccgcagtgctgtgcggcggggagaacgagaagatccgccgttaccggctggagcgggagaggacctatggagccctggccgccctgagtcagcgggaggtccaggaccgcatccgcttcctggtggacgagcacatcctggagctcactgacggccagtacccggtcctccggtgcggggagcgggcggaggacgtggcgtacagcgacggaccgctgatgatgaaggccgttcgggaggagcggccggcggccgaccgccggcgggcggaggacagccccctgacagagcggcagcaggccctcttccagcggctgcgggaggagcgcgcccacctggcccgcctccggggcgtgccggcttttgtgattttctccgacaagaccctgcgggagatggcggctgcccagccacgggatctgcgtcagctccagaacgtgggcggcgtgggcagcttcaaggcggagcagtacggagctcagttcctggagatcatctcggattttcaggagacagcggcaatataagagcctgccccagacagatggtgtccggggcaggctcttatatacatattttacttcggagcgtgggggccgcagcgagtgtggtgtccgccgcacccgccgcaggtgccgcagtccccattgcagtggccgcccgacttgtgggactgccacagggagcggaccgcgagggcgaccacgcccgcaaggatcagggagacgatgatggtaggcagcagctgggacatatctgaccctccttgtcgatcacagattatttcttgccggcagggatgtcggtcaggtgacggacctcctcgctgggctggtagcccctgcgcaccagcaggaagatgatgccggccagcagggcgatggcgatgacggtgaagacgctgaaggcggcctcgccggtgaacagaccgccgatctgatagacgatcatggcagtcacataggcgaacaggcacatgtagccgatggcgcccagagtccacttggtgttgtgcatctcccgcttgatggcgcccatggcagcgaagcagggggcgcacagcaggttgaagatcatgaaggagtaggcggagatggcgccgaagtcagcccccaccatagcccagatggggctggagtcctccatcagatcgatgtcgccggcgtagtggtacagcacaccgaaggtgttaaccacctcctccttggcgatgaggccggtgaaggtagccactgcggccttccaggccatggaaccggtccagcccagggggtagaagatccaggcgatggcattgccgatgacggccagcagggagtcgttgttgtcctccacggcctggaacacgccgtccacaaaaccgtagccctggaggaaccacaggatgatggaggagatcagaatgacggtgccggcccgcttgatgaaggaccagccacgctcccaggtggcccgcagcacgttgccggcggagggggcgtggtaggcgggcagctccatgacaaagggggcgggctcgccggcaaaggccttgaatttcttcagcatgatgccggagacgatgaccgccgccacgccaatgaagtaggcggaggtagccacccaggcggagttgccaaagacagcgccggcgaacaggccgatgatgggcatcttggcgccgcaggggatgaagccggtggtcatgatggtgattttgcggtcacggtcctgctcgatggtgcgggaggccatgatcccgggcacgccgcaaccggtagccaccagcatggggatgaagctcttgccggacaggccgaagcggcggaagatccggtccatgatgaaggcgatgcgggccatgtagcccacatcctccaggacagccagcaggacgaacaggaccagcatttggggcacgaagcccagcacggcgcccacgccggccacgataccgtcctggatcaggccgtacagccagtcggccaccacaggctcgccgctggcgttgagcaggaagctgtcaaagaagccgggcacccactcaccgaagatggtgtcgttggtgaagtcagtggcggcggtgccgatggagatggcccagccgcccatggcgatggcatagatcagaaacatcactgccacgaagatgggcagggccaggacacggttggtcacgatccggtcgatcttgtcggaggtagtcaggctgtgcttgggggccttcttttttactgccctgttgaccacagagttgatgtacgcatagcgctggttggtgatgatgctctcagcgtcgtcctccagctcgttctcacagtcggcgatgtgggcctccaggtgggcctccaggtctttggtcagggtcagggactccagcaccttctcgtcccgctcgaacaccttgatggcataccagcggagatactggtcgtccaccatgccctgaatggactcctcgatgtgggcgatggcgtgctctacgctgccagtgaacacgtgggggagctccccggccttgtgggcctgggccgcggctacggcccgctcggcggcggccatgccgccctcgcccttcagggcgctcatctccaccacctggcagcccagggcctggcccagcttctggaggtcgatcttgtcgccgttcttccgcaccagatctatcatgttgaccgccactaccacgggcaggcccagctcgatgagctgggtggtcaggtacaggttgcgctcgatgttggtgccgtccacgatgttgaggatggcgtccggcttctcattgaccaggtagttgcgggccaccacctcctccagcgtatagggggacagggagtagatgccaggcaggtcctggatgatgacctccttgtggcccttcagcttgccctccttcttttccaccgtgacgccgggccagttgcccacgtactggttggagccggtcagggcattgaacagggtggtcttaccgcagttcgggttgcccgccagcgcgatcttgatgttcatggtatttctcccttcagaaagttagaagtgactaactaacagtgaaaaacgaaagcggagctcagaggatctcgatcatctccgcgtctgccttgcggacggacagctcatagccccgcacattcaactccatagggtcccccagcggggcgacctttcggatgtggatctccactcccttggtgatccccatatccataatgcggcgcttcacggctccctcgccgtggagcttagccacgatgacggtgtctcccaccttggcgtctttcagcgttttcatcctttctctcctcctcagatcataatacggttggccatggtcctgtccacagcgacccggctgtcctttacctgaaggatcaggttgccggccatctcgctgatgacggtcaccgactcgtccaccacaaagccgagctctgccagatgctggcgcacctcgtccctgccggtgatctttcggatgaccacggtctcgccgggtctggccattgtcaggggcatcatgagactccctcccagatcaggttgacttttgctgctagaattgcttgaaaagctggttagcttaatctaacccgctgaacagatagagtttacttctgctaaccggatttgtcaagcccttttctgaaaaaattgggccgcgctccgcacttttccagccgcgacaaaagcagccggtgaacagagcaggatcccgtctatttttcccagagagaaaaaagcatggcccgccgtaccagcggcgggccatttgccttatttcacgttttggccggggaaggtgaggcggatggtggtcccgcggtccggctggctctccagggagaggtcggccccgtggaaggccgccccgtgcttgacaatggacagtcccagaccggtgcctccgatggctttggagtggctcttgtccacccggtagaaccgctcaaagacccggctctggtcctcaggagggataccgatgcccgtgtcagatacagagagctccgcgccccggtcggagcgggagacggagatagtgacccggcccccaggacgattgtacttgatggcgttgtcgcacaggttgctgatcatctcgtccaaaagctggcgcacgccagagatccgcaccggtccgcccgtcacctccagggtgacctgccccttgacagcggcgggggtcaggcggccggccacctcctgggccaggtggtacaggtccacctcctccgtctgtagggagctgcccccttcatccagctgggacaggcggaggatgtcctccaccaggcggatcatgcgctgggcctcgccgtagatgtcgtctgcgaagccggggatgtcctgcggcttgaccagcccgcccttgatgatctccgcaatgccggagatggaggtgaggggggtcttgagctcatgagatacattggcggtgaactcccggcgcagctcctcccgctgttcccgctcggtgacatccaggatgaccagcacggcgccggccacctggccgtcttggatcacggggttggccagcagctggcagcaacggcctcccaggtccaccagctgctcgtcccgcctgccggtgagggcggcatccaccgcttggcggaagcgctcggtgcggttcagagtgaggtagctggcccgttcctcaggggcggcggcgtggagcaggcgcagggcaccggagttgtgggagaggatgcgcccctgccggtccagcaggaggaagccctcgctcatgttctcggtgatggcggtgaactcgttctgcttctggcgcagctgggccatctgctgggcgatggtctggttctgctgcttgatgcgggaaagcaggggggtgagctcttcgtaggtgtcggagtcctctgggtgctccaggtcgatggcaaggacgggcttgatgatgtgcttggaaaggcgggaggccagcaccgccgacagggccacggccagcaccaggatgatgaggatgggctggaccatggacaggagcagggaagggaggctgcgctgctcactggacacccgcagcaccgtcccgtcagccagccgctgggcaaagtacagggtccgctgagagagggtcgtggagtagcgggaggcggtgcctgtctcgctctccagagcggcttgcacctcctcccggtcggcgtggttctccatctgggcggggtcggcctggttgtcaaagaggacagtgccgccggcgtcgatccaggtgatacggttggcggaggagagaccgtccagataatccatgctgcccatctccaccccacgggcagccagggcggcctccgactccagctggatcagcagctggctgccaaaatactggtacagcacgcccatgaacagagcgatagagagaaagaacaccgcaacgcccaccagaaaggagttgcggaagattttagatgtcatggctgttcctcacttttggacggatcagattccgccttgtagccaacgccccgcacggtctcgatgcagcggcccgcctcccccagcttttgacgcagggtacggacgtggacatccactgtgcggctggcgccgtcgaactcatagccccagatggtgttgagcagctggtcccgggtgaatacggtccccgcatgctccaccaaaagggagagcagctggaattccttcagggtgagggtgacttcccgcccgtgggccagcacctgatggcgggccggatcgatgcgcagtgggcccaaagtaagggcgtggaccggctccgcctccccgccgctgtggcgcagggcggtgcggatgcgggccatcagctccatcatgccgaagggcttggcgatgtagtcgtccgccccgccgtccaggcccaccaccttgtcgtactcggtccccttggcggtgatcaggatgacggggagcctagcggtggaggcgccggcgcggatgcgcttgaggatgtgcaggccgtcctcctccgggagcatcaggtccagcaggaccagggaggggagctgccgctccatggcggcccagaactgggagggcagttcaaagccctccgcctccatgccctggctgttcagggtataaatgaccagcttgcggatgctggggtcgtcttccagaaaataaatcatgggtaggacctcctacggctgtgaaaattggggcgcccgccgttcagggcaggtcagcatggtgcccggtgagggagtactccacccactcggcgatgttgacggcgtgatctccgatgcgctccagatatttggcgatcatcagcaggtcgatgcacacctctccgctgtcccccatgccgatgcggcggatcagctcctcacggacctggagaaacagatcgtccaccacgtcgtcggaggagatcactgcctccgccagacccaggtccttgcggacaaaggagtccacgctgtcggtgaccatcttgatggtggcccgggccatgtccccgatagggaccaggtccttgatgctgttgtcggcgatatcccgggtgatctcagcgatgtctgcggcttggtcgccgatgcgctccatgtcagagatcatcttcagggcggaggagatggtgcgcagatcccgggccaccggctgctgctggagcagcagcttcatacacaggctttcgatgtcccgctccttttggttgatgtcccgctccgcggccagcacggtctcccgcaggccggaatcgccgtccagcagggccttggccgcgccggagatgacctcctcgcacagggcacccatggtgataagttctacgttgagccgctccagctgtgcttcaaatttgactcgcattatccaaacctcccggtgatgtagtcctcggtgcgcttgtcctggggcatggaaaagagctgctccgtgtccccgtactccaccaggtcgcccagcaggaagaaagcggtctggtcggagacgcgggcggcctgctgcatgttgtgagtcaccatgacgatagtgtactcgcttttcagctccatggcaaggtcttctattttggatgtagagatggggtccagggcggaggtggcctcgtccatcagcagcacctccggttggacggccagggcccgggcgatgcacaggcgctgctgctggccgccagacaggcccagggcaggctttttcagccggtctttcacctcgtcccagatggcggcctgacgcagggacttctccactagctcgtccaaggccagcttggagcgcactccatgggtgcgggggccgtaggccacgttgtcgtagatagacatgggaaaggggttgggcttctggaacaccatgccgatgcgccggcgcaggtcggtgacgtccacgccgggggcgtagatctcctgcccgtggaaggtgagggaaccggtgatcttcacgctggggatcaggtcgttcatccggtcgatggtccgcagaaaggtggacttgccgcagccggagggcccgatgagggcggtgatcttgttggctttgatgtcgatggagatgtccttcagtgcgtggttctcaccgtaatacaggttcagcccgcaggccgagagaatgacagattgatccatagttgtcctccttagcgctttttcaggcgcttgcccaccagcttggcggacagattgatggcgagggtgatggccagcaggaccagggccacagagaaggccaggtcgaactcggcccgctccttggcgtagacgtacagggccacagtgagggtggcaccggagctgtcagtcaggccgctgaacagaagggaaaggtcaccggtggacagaaaatgcgacagagcttggtcgttgaagctgccgaaaaagttctggagggtggtgcccatgccggcggtgaacatgagcaccgcagactcgcccaccacacggccgatggacaggatgcagccggtgacgatgccgtccacggaggaggggagcaccacggtgcggatcatgtgccacttgccggcccccaggcccagggagccctcccggtagctctggggcaccgtcttcagggactcctgggtggtgcggatgatggtgggcagggtcatgatgaccagggtgagggcgccggccagcagggtcttgcccaggtccatgacctgacagaagatcagcatacccaccagggcgtacaggatagaggggatgccggccagagtctcggtggcgaactcgatggcagagaccagcttgtggttggaggcgtactcggtgaggtagatggcggcccccacccccaggggcaggatgaagatcagggtgaccacgatgacatagagggtgttctggatggcaggcatgatgccgtcggtcccccgcaggacactctcctggctggtgaggaaggtccagttcagattgggcaggccccggtagaggatgtagccgatgagaaagaggagcagcaggcaggtgatgcccgcggagagatacagcagcccgcgcatccccacctcataggtgcggcggcggggggagaggcccttggactggtagctctgggcctcttccgaggagatcatggcgttggtcatagctcagccctccttgttccgtttcaggaatacgtttaggatcacattgatgcacatgataaacagaaataggatcagcccaatggagtacagggcgttgcgctggaggctgcccacggcggcatagctcatctcgctggcaatggcggtggtgaggaatttgacgctggagagcagagagggcatgttggccacattgccggccaccatcaggatagccatggcctcaccgatggcccggcccacgcccagcaccacagcggcggcaataccgctcttggctgcggggacagagacccggaagtaggtctccagctcggtggcccccagggccaggctggcctcctcatactcccggggcaccgcattcagggcggtctcggacaccgagatgatggagggcaggatcatcactgccaatacgatgatggcggccagcaggctgtcaccggcggcgatgtcaaaggttttacggatggcggggagaaggaccatcatgcccaccaggccgtagaccaccgaggggatgcccgccagcagatccactgccggacggatgacggcggccaccttggggggcgccaccttggagagaaagacggcggtgaggaagccgatgggcaccccgatgaggatggccccggcggtgccatagatagaggtgaggataaaggggaggatgccataggcggggtcggtcttgtcggtggaggcccagcgagtgccgaagaggaagtcggtcaaccccacctcacggatagcgggcaggccggagatgatcaggtacacggtgatcagcaggacaaaggcgatagcgatgaagccgcagaccagaaatacggtcttcatgatccactccatggcctctttggcccggagggcgcccccgccggggacgccgggatgctcttttttcatagtactcaaccttttcttgtagattctgtctcctcagctgacacacgggcgcgggggccgtgcctgtgtgtcaactgaggaaagggggcagaaggggagacatcattcaaaacaagcccccgggctcgggggcttgttttgaattggatcgggtgagctcaggcgttggcagacacagcgccggcaacagcaatgatctcagcggcgtcagcgctcatggcaaaatccaggaaagcctgggctgcctcggagagctgggtgccctccttggtgaccataacgaagggacgctggatctcataggagccgtccttcacggtgtcctcggagggggtcacgccgttgaccgccacggccttcacggtgtcgtccacggcggacagggaggcatagccgatgccgttggggttggaggccacgttgccgatgacgtcgccggtggaggaatactcgttggtgtacgtacaggcatcttcaacgcccacgatctcctcaaaggccccccgggtgccggagccggcctcgcggccaaagaccgcgatctcggcatcagcgccgcccagctcggaccagttggtgatctcgccggtgaagatctgggcgatctgctccacggtcaggtcggtcacgccgttctcggggttgacaaccacggccacgccgtccagggctacgatgttctctacggcgccgttgctcttctcttcgtccttcagggcacgggaggccagtcccaggtccacagtgccgtcgatggcggcctggatgccggtgccggagccagtgccggagtagttgacggtcacatcggggttctgctccataaaagcctcagccagggccttgaccacgctctccatggaggtggagccgtctgtgttcacggtgccgctgagggtggtggtctgggattggacaggggtggagctggcggcgggggtgctggtgggagtggaggtggtcccattggagccgcagccggccagcaggccggccatcagggccagagacagccccatgcaagtcagttttttcatgtaagatcttctcctttattgcattcgttttgtgtttcctctggagtacagggctcagtataaaaaagaaatgtaaaatgcgaaacagcggatatgttaaatctgcgtaaagtgcggtaaaatcagagagtaaaaatgtaaaataccggccgccgggacttccggcggccggtttggaatatcacatgttctgaatggaacggtggactggcctcagctccgctcctccacggggtccttgtcccggaagagcagagagatgcaccacacggcggaaagacccaccagggtatagatcacgcggctgatcatactgccggaaccgccgcaggcgaaggccaccaggtcgaatcgaaacagacccacgctgccccagttcaggccgccgatgatcagcagagtcagggcgatcttatccattatcatggttcatacctcctcgcattggtattccggaggtagtttggccaaaagagagctttttattccgtcggttcaaaaattaagggagcccggcccgaagccgcagggcagcagggtggagagcggggcggactggaaggcaccgtcccctcggacggccaggacccggagctggggagcaaattcaaacagcatctgccggcaggcaccgcagggccagcagaagtcgcttccccggccggcgatggcgatagcggtgaagccgccggtgcggccctcgctcaccgccttgaccagcgccgtgcgctcggcgcagagggtggagccgtaggcggcgttctccacattgcatccggtgaacaccgccccgtcactgcacaacagggcagcgcccacgggaaaatgagaatagggtacataggcccgctcctgcatggagacggccgtggagatcagctcagcatcagtcatagtttgctcctttctgtggcggatatccggaaagcgggaagcgccggcgctgcggaatgccccggcggggaccgcaaagggagacatcgctctgggggaaaaacagaatatgaaggagagagggccatattataaaacagagtgtgaaaaagacctgtggtttcctttacggtcagtacaggcagagtccctgcatctcgtctctattttaccacagagaccggtgcttctcaagggcctccacgtctcttctgtgccgggaactgccaggggatggctccggcagtttgaaaaaaaccgggtgatcggagacactgccttgcaaaggacaggacaacatggtggagtaaagcaaaaaattttgtgccctttggcgggaggaacgccttgttacgcacccggggccggcctgggagaaacaggaacaagcaggagcaaaataagacatttgttccaaacagtgattttttgcaacgacctatgtgaaaaaaacaagttcctgctcttgccagaacgggacacagagcttataataagaaaaacgacagcagagaaaaatgacgagaaaagggagctcgcatgacgggctgagagggagctgttcgctccgacctgtgacctgatttgggtaatgccaacgtagggaaatatacttgcggaactaggccgcggggatatcccgaagtggggtgccccgcggtttttgctgtctgcggacaaaggagagagggatatggagctgggagcctgcctggaccgggtgcgggagcggaggccgctgatccactgcatcaccaactatgtgacggccaacgacgtggcaaacctcctgctggcctgcggggccagccccatcatggccgatgagccggaggaagtggaggagatcacggcccggtgcgccggactgtgcctcaacttgggaacacccagccggcgcaccatccccagcctgatgcgggccggggtcaaggccggggagctgggccgcccagtggtgctggacccggtaggggtgggggccagcgccctgcgtctccgcacggcccaggagctgatggcccgtgtcacctttaccgtgctgcggggcaatgtctcagagctgcgggccctggcgggcggccaggagcacacccggggggtggacgccggcggggcggacgcagtgacggaagcggaactggagcggggggtggccttcgccaaagggaccgcccgccgcaccgggaccgtagtggcggtcaccggggccattgacctggtctcagacggggagcagtgcgtcgtgatccgcaacggccgcccggagatgggtctggtcaccggtaccggctgtcagctgtccgccctgactgcggcctgcctggccgccagcccggagcgccccctggaggcggccgccgccgcggtgtgcgccatgggagtggcgggggagctggcctgggcgaggatgtcccctcaggacggaaacgctacctatcgggatcggatcattgacgctgtgtgccggatggacggcgcggcgctggagaaaggagccaactatgagatgcgataaaaaggatttgctgctctacggcgtaacggaccggagctggctgggggacaggaccctggcccaacaggtggaggcatccctgcgggggggcgccaccatgatccagctgcgggagaagcatatggaccgtgggagcattctggcccaggccctggaactgcgggagctgtgcgggcgctacggcgtgcccctgatcctcaacgacgatgcggaactggcccaggcggcaggagcggacggcgtccacgtgggccagagcgatatggaggcggggcgagtccgggccctgctgggggaagacaaactcatcggcgtgtccgcacgcacggtggagcaggccctggccgcccaggcggcgggggccgactacctgggggtaggagccatgttccccaccgggaccaagcaggacacccgaccagtgagctatgacaccctgaaggccatctgcgccgccgtggatatccctgtggtggccatcgggggcatcggagccggcaatgtggcggagctggcggggagcggcatcgccggggtggcggtggtctcagccctgtacgcccagcccgacgtggaagcggccacccgctccctccgggcccaggtggagcgggtggtgggcccatgaggatcgagggggccatcttcgatctggacgggaccctcaccgactccatgtacatctggaacgaggcgcccaaggctctggtccggaagtttggaggagagccgccggaggacctggcccgggacatccgggagatggggcggcgggaagcctcggagtacatggtggatacattttgcctcccctgtacgcccgaacaggtgatggaaggggtgaacgccctggtgacaggggaataccgggacagggtccccatgaagacgggggcggacacactgctggagcggctgggagccctgggggtcccctgcggcatcgccaccgccagcgaggcctttcaggcacgggacgccatggtccgtctggggctgtggaagcacttcctgttcgccttcagttcccttcagtacgggcctaagaccggaccggacctctatcgggctgctgcccgcagcctgggcagcgcgccggagcgcacggtggtctttgaggatgccctccatgccgcacgcagcgccaaacgggcgggctttctggtggcgggggtgtatgacccctccgccgaggaggatcaggaggcactgcggtgcctctgcgactggtatcttccccggctggactccccggatttcctggcagcattggagcggggctgagccgggaatggagcgggtgcggcccggagaggaggggcagaggagcacagtgagggatggccgtcagaccgtcccgaacacagcaaaaatgggggcagccgtaaggccgcccagccggggcgcagcccagcggagcgggtgcggcctggagaggaggagcaagggagcgcagtgagggatggccgtcaggctgtcccgaacagagcgaaaatgggggggccgtaaggccgcccagccggggcgcagcccagcggagcgggtgcggcccggagaggaggagcaagggagcgcagtgagggatggccgtcaggctgtcccgaacagagcgaaaatgggggggccgtaaggccgcccagccggggcgcagcccagcggagcgggtgcggcccggagaggaggagcaagggagcgcagtgagggatggccgtcaggctgtcccgaacagagcgaaaatgggggggccgtaaggccgcccagccggggcgcagcccagcggagcgggtgcggcccggagaggaggagcaagggagcgcagtgagggatggccgtcgggctgtcccgaacagagcgaaaatggggggggcgtaaggccgcccagccggggcgcagcccagcggagcgggtgcggcccggagaggaggagcaagggagcgcagtgagggatggccgtcaggctgtcccgaacagagcgtactttgctccgacgacgcggcacctcgggggcaccacctggtgtcgcggaacaaaacttcaatgcggagaaaggagttttctgatgaaaacagcattgacgatcgctgggagcgattccagcggaggcgccgggatccaggccgacatcaagaccatgactgccaacggcgtctacgccatgagcgcggtcaccgccctgacggcccagaataccaccggcgtctacggcatcctggagtccaccccggaattcctggccagtcagctggactgcatttttaccgacatcttccccgatgccgtcaagacagggatggtgtcctctaccgggctgatccaggtcatcgcggacaagctgaagcggtaccaggcccggaacatcgtggtggacccggtgatgatcgctaccagcgggtcccgcctgatttcggaggaagcggtggaggcgctgaagagccagctgctccccctggccgccgtcctcacccccaacatcccagaggcggaggtcctgtcgggcctcaccatctccggtccggaggacatggagcgggctgcccgggagatcggggagcggtacggctgcgctgtgctgtgcaagggcgggcacgacctgaacgacgccaacgacctgctgtggcaggatgggagctgcaaatggttctgcggacgccggatccataaccccaacacccacgggacaggctgcacgctctccagtgccatcgcctccaatctggcgaagggctgcgacctggagacggcggtggagcgggcgaagatctatctctcgggggcgctgtcctccatgcttgacctgggggcgggcagcggccccctggaccacctcttttccatcccggagctggacctggaccgcatccggtcccttcagtcccccgccggaggaaggtgaggggcggtccgcctgatgaccgagatccatgaaataggaatcaatagataaaggagaagatctttatggaacgcaattataccacacagatggacgccgcccgccgggggatcgtgaccccggagctggagactgtcgcccgaaaggagcacatgtccgtggaggagctgatgcccctcgtcgcggccggcaaggtggccatccctgctaaccgcctgcacaaatgcctggacccggagggcatcggctccatgctccgcaccaagatcaatgtcaacctgggagtctcccgggactgcaaggactacgacgtggagatgcagaaggtgctctctgcggtgaatatgggggccgaggccatcatggacctgtccagccatggcaacacccagcccttccgccagaagctcactgccgagtgcccggtgatgatcggcaccgtccctgtctatgacagcgtcatccactaccagcgggacctggccaccctcagtgccaaggacttcatcgatgtggtccgcctccatgcccaggacggcgtggacttcgtcaccctccactgcggcatcacccgtaagaccatagatcagatccgcaagcacaagcggaagatgaacatcgtctcacggggcggttcccttgtgttcgcatggatgtgcatgaccggggaggagaatcccttctatgagttctacgacgagatcctggatatctgccgggagtacgatgtgaccatctccctgggcgacgcctgccgccccggctgcctggctgacgccaccgatgtatgtcagatcgaggaactggtccgcctgggcgagctgaccaaacgggcctgggagaaggacgtgcaggtgatggtggaggggcccggccatgtgcccatggaccagatcgccgccaacatgaaggtgcagcagaccatctgcatgggagcccccttctatgtgctgggccccctggtcaccgacatcgcccctggctatgaccacatcaccgctgccatcggcggggccatcgccgccatgagcggcgctgctttcctgtgctatgtcaccccagccgagcacctggcgcttcccaacctggacgatgtgaagcagggcatcattgccagcaggatcgctgcccacgccgccgatatcgcaaagggcatccggggcgcccgggacatcgacgacaagatgggcgacgcccgccgggccctggactgggaggcccagtgggcctgtgccctggacccggagaccgccaaggccatccgggacgaccgctcccccgagcatgacgacacctgctccatgtgcggcaagttctgtgctgtgcgctccatgaacaaggccctcagcggggagtatatcgacatcctctgatggattgtctcccatcagaaaagggagcaggagggagaggcgccccccagggtgggcgcccattcccggaccaacagctgaacagcgctgaagaccgccctctcacgagggcggtcttgacaaatacggggggaaatgccggagacgggccgcttcgttgttttacccattaaaataataggaaaatttctgttttcagaaaaaatacagttagacatttggagcagaacgtgctagaataggggcagatcctggcgagaaggggctgagcgccgtttgaggagcggagtcccggggcaaactgatagaaagaaagcggagcccggtcggagcaggtccgggcctgtacgcgggaggaacctcatgttagagttacaaaacatcagctatggcgtggagcaggacggcgacagcaagaacatcctgcgggacatcagcctgaccatcgacgagcggttcgtggctatcacagggcccaacggcggaggaaagtccactctggccaaggtcattgcgggcatcctgacccccactcaggggcgcatcctgctggacggggaggatatcaccgggctggacatcacccagcgggcccagaaggggatcagctttgccttccagcagcctgtccgcttcaagggcctgacggtgaaggacctgatcaccctggcctcgggcaagcagatcggggtgccggaggcgtgcggctatctgtccgaggtggggctgtgtgccaaggactacatcgaccgggaggtggacgcatctctgtccggcggagagctcaagcgtatcgagatcgccatgatcatggcccggggcaccaagctgtctgtctttgacgagccggaggcgggcatcgacctgtggagcttcagcaatctgatccaggtgtttgagcatctgcacgagaagatcaacggctctattatcatcatatctcaccaggagcgtatcctggacattgcggaccggatcatcgtgctggccgacgggcgcatccagacccaggggacccgggatgaggtgctgccccagctgctgggagaggtcccgggcgtgtgcagcgccctgtcggaaaaagtgcggtaaggagggagcagagagatggacgcgatccagaaaagcctgctggagcaggtggccgggctccacgaggtgcccgagggggcctataacatccgggcaaacggcaaggcggcggcccgaaacactaccgccagcatcgacatcgtctccaaggaggacaaggacggcatcgacatcatcatcaagccggggaccacaaaccagtcggtccacatcccggtggtgctgagcgagagcggtctgacggagacggtatataacgatttcctgatcggagacgactgcgacgtgaccatcgtggccggctgcggcatccacaactgcggggtgcagaactcggagcactccggcatccacaccttccatgtgggcaagcgctccaaggtgcgctatgtggagcgccactacggcgagggggacggccggggggagaacatcatgaaccccactaccgtagtggagatggacgaggacagctacatggagatggagaccacccagatcaagggggtggactccactgtgcgcaccaccaacgccaagctggggccccgcgccaccctcatcatcagggagaaggtgatgacccacggcaggcagctggccaagtccgacttcactgtggacttggacggagaggactgccacaccaacgtgatctcccgttctgtggctaaggaccagtccaggcaggtgttcctggcccgcatcaacggaaatgcccggtgctacggccactcggagtgcgacgccatcatcatggaccagggcgtggtggccgccatcccggaggtcaccgccaactgcgtggatgccagcctggtccacgaggccgccatcggcaagatcgccggggagcagctcatcaagctgatgaccctgggcctgacggagaaagaggcggaggagcagatcgtcaacggttttctgaaataaacggaccacgggagagaggacggagacgtcctctctttctttttccgccgggatgtggtacaataccggaaaaatcctttgtaaaggggggcgggccgtgaggaccatttatgttgacctgggggaactggaccagtccggcgcgctgggactcttcagcagtaaggtgcggatccttccagccggggcagtgatccgcacggagcaggccgagattcgggcggaggtgccccggtatcaggagatggcagagcgggctggggtattctttttctttgaggatgaggagctcccggaactcccattcttcgcggtccccggcctggagctggcggcccgggaccgggatggcagctggtacggccgctcggaggccctgggggagggtgtgtactgcgtcaccccggaggggactgccttccgagtgtcagaggacatgggccggttttccagccgcctgctggcgggggaggaggtccgggagatgtgggagccagccccagggctcagggtgtacccctccaaggcggaggcggcgggacagatccggctgattccgctctcagaactggccccggaggcactggaaaggggagaataggctgtgtatcagatcgctggcgccgcccagatgaaggaactggaccggcaggccatagaagaatatggggtctcctcgctggggctgatggagcgggccgcccaggcggtggcggaggaggtgcgggggctgctggagggcggcggcccggacttcatcggcggagccgactctgtgacggtcctgggagcaggggcggagacggaggaggaccggcgggagctggaggcccttcaggcccttgcggaggagaaaaatcaggatcacgctccctgggtgggggtgctgtgcggccccggcaacaacggcggggacggcgtggccgccgcccgcatcctccggggcatgggctttcgggtccgggccttcctggtgggggaccggaggaagatgacgccggacgagcgggccatggagaaaaagctggaagaagctggaggcgtgctggaggagttccggccggaggaccgccggcagatgctgtggttgtctctgtgcggctgcctggtggacgccctgttcggggtggggctctcccgccctgtggagggggacgcccttctggctgtgcgattgatgcagggaaggtccccgctgaagcgggtggtgtcctgtgacatcccctccggggtccacgccgacaccggcgccgtattgggtgaggccgtccgcgcggaccggaccgtcacgttcacctgcgcaaagcccggcctctatctgggggagggggcctcttgtgccggactggtcacagtagcggacatcggcatcccccacaggctcatcttcggccccggagcacagatgcgcttcccggtgggggtgatgggatatgaggatgtggtcctgccccggagaaagcgggactcccacaagggggactacgggcgggtgctgatcctggcagggagcgtgggctataccggggccccggtgctggccgcctccggcgcggtgcgcggcggggcgggcctggtgtccctgggcgtgccggaggagatctggcccatcgcggcggtgaagtgtctggaggccatgcccttccccctgccggcgcggtatgaggatatcctgaggcgggcgtcgtcctgcgaaggggtgctcatcggcccgggactgggccgggcgccccggacggagcggctggtccgttccctgctggaggacctgaaggtgccggtggtgctggacgccgacggcataaacgcgctggacgggcatatagatagtctggacggacgaagggctcccaccatcctgactccccactccggagagttcgcccggctgaccgggcggcccctgccgctggaggaccccctgacggcggcccgggactttgcccgggaccaccggtgtgtgctggtgctgaaggggcaccgcaccgtcaccgctgccccggatggccgggcctggatcaacaccacgggcaatccgggcatgtccaaggggggcagcggcgacgtgctggccggactcatcctcgccctgctgggacaggggtgggagccggagctggcggcccgggacggcgtatatctccacggggaggccggggaccgctgcgccggcagcctgggggagtacggtatgacgcccggggacctggtggagcggctgcctgagaccctggaggcccacgtccggtccggatcctgaatttggaggtcggagcggtgcggagatccctgctgatttgcgtactgatgatgaccctctccctctccgcctgcggcggaggcgggggaggcagcgaggcggaggagctcgccctcaccatccggggggagtatctggctatgacgtcctgcgcggcccaggctgtggtgacagcggattatggccagcgggtctaccggtatgagctgtcggctgcggtgaacggggaggaagccctcctcaccctgaccgcgccggagacggtggccggcctgacggcccggatcgaagaggatgagggctggctggagtacgatggagccatcctggagaccggggagctggctcccggcggactgacccccatgggggccatccccgccctgctggagaccgctcggtccggctatctggacacctgtgtcctggaggagctgggggaagtccaggccctgcgggtggtgagccgggacccggaggagaaacagggcagcgggacggagaccaccctgtggttcgacgccgccacccacgccctggtccggggagagatctcccaggatggggtgtgtgtgctccaatgcgaattttctcaatttaccaaggaatagaggttttaccatgacagagaccgcgcaaatgaggacctgggcggagatatccctggaccgtctggcccataactaccagactctgcgggccatgctggctccggactgccgctttttggggctgtgcaaggctaacgcctacggccacggggccctccaggtggggcggaagctggaggcgctgggggccgatatgctggcggtggcctgtgtggatgaggcggcggagctgcgccgcggcggcgtgaccatccccatcctgtgcctggggcagacgccgccccagctggccgagctgctgctggagcatgatgtgacccagactgtctccgacctggagaccggccgggccctggcccgcgcggcacaggctgtgggacggacgctgaagatccacgtgaaggtggacaccggcatgacccggctgggctttctctggcgggaggggggtgagcgggagaccgccgccgccattgcggcgctgtgcgccctgcccggcctggaggcggaggggctgtttacccattttgcggacgccgacgggaacgaggagtacaccatggggcagttcacccgtttcctggatgccaggcaggctctggaagcgctgggggtccggttcaaaatttgccattgtgctgccagcgcggccgtgttaaactatccttgtactcatatggatatggtccgtcccggcatcgccctgtacggctattatcccgcgccgggactggagggtctggacggctccggactgctgccggtgatggcgctgaagactcgggtggccgccgtgcgggccgttcctgcgggcacctgtgtcagctacggctgcactgcccggctggagcgggacagccgcctggccgtgctgccggtgggctatggggacggatatccccgcctgctctccaaccggatggaggtgctgctgcggggccggcgctgccccgtggtgggccgtatctgcatggacatgtgcatggtggacgtgacagatgtcccggacgcggtccccggggacgtggcggagctctatggccgggagggtctgctggagcaggccgccgcgctggcgggcaccatcccctatgagctgctgtgcaacgtaaaccccagggtcccccggatctatacgggccggggggagtgacagggaccgatcccagctgccccgcataagatggtatggagcagcgggccgccgcccgccgccgggcaggggctgcggagttttttccctgcatgtataaaccttgccgccccgtgggaaaatcataatacagcgttacataaagaccgctgcgggtccgctgtaacgccgtattatcttccggcggagtgtgaaatcacgtggacaacagtgtagtcaaacgaggcgatattttctatgccgacctgagcccggtggtgggcagcgaacaggggggcgtgcgcccggtgctgatcgtgcagaacgacaccggaaaccggcacagccctactgtcattgccgccgccatcacctcccagaccggcaaggcgcgcctgcccacccacatctccctggctgccatgagctgcggcctgcccaaggactcggtggtcctgctggagcagatccgcaccctggataagcgccgcctgcgggagcacatgggccgggtggacgaaacgatgatgaagcaggtagacacggccatcgcggtgagctttggccttcatccagacacgatggtataaaagtgcgcctgtcccggaactctggggcggcgcggaacacgaaggcgttcccccatggcccggccccggccgggctgcgggggagcagaaaaggagtacataggatgaagcagaacaagaaatggagcatgcggatcgcctccttctgcctggccggtgcctgcctctgcggcggcgcggtcctggcggcggggggagatgagtccgaccccctggtcaccctcagctatctcacccagacagtcacccccaatatcctcaagcaggtggacgagcaggcggccaagcggcagagtgagctgctggctcagctcaataccgccatcgcggactataagatggcagtggagggcggcggggcctccggggggaccagtgcctcctactccgtggtcactctcacctccgggcagacgctggccctgggggtgggatgcgaggtgatgctgcgggtgggcaccgccaccctggcggccaacacggacccggggctgatcgacgtaagcaccggggggacgctgaacaacggcggcgcgctgaccgccaaccacctttacatggccaccatcgcggaccggacagtccaggccaccgccgccaccgtcaagctgctggtgcggggagagtacaccgtctcctgagactggagcacagacagagggcccggcatgtctctgtgacatgccgggccctttctgatatgatcgaagcagagagaacggaaagccccgaagacgggagagtcagagagtggaggcgcattttccccgcggagggggacgccggtagagaggagagaacgtgtctatggctgttaaaatgcttctgattgctatattgatcgctgtgctgatgacgctcttcagtggcatctacccgggctctgtcctgtatggttggctggaccaaaacggtctgaacttcgtatgggccggactgacagcggggatcatagccgcctgcctgctcctgtaccgccggaggaaaaagtgatcgtattatgagtatgaaagacaaggcccctttttataaaaggggccttccatgaaacaaaacttggaattccttgcggagcacccctgtatggcagcgaaaggccggacctctgcctgaatgtgagtgagctgctggagctgatccaatgactccttgggaaaccgcatagcggaggaatctttcgcggatgccggacagcggttccgggccggtcaggaggttgcaccttcctcgtcttcctcctgcacaccgccctggcacacgccggcggaggaggctggggagatggcgttccggccgtacttggcccgaatctggtccagcgtccggtccaggcgttccaggcggtcccgcctgggggcgtctgcctggcccagcaggtccagctggacgccagcctggtcctcggagatcagatagagggcggtcaccgtcagggcacggacgggactgtccatgttccagcagccctccgccagggagacggcggcctgggacagctcccgggccaggcaggtggggggctccagccggcgctggcggctgatatcccggaaatccgggtcccggatggccagagagacgccggcagccttcatccctgcccggcgcaggcggacggccacccggtcggacagcatggcgatgccggagcagatctcttcccggccggacaggctgcgggggaaggtaaggccgttgccaatggacttgggtgcgttctcctgacaggcggaagagacgggactgcggtccagcccgttggcgtaggcatggagctgcctgccgtggcgccccagcagggagaacagggcttcccggtcaaaccgggccagatcgccgatggtccgcaccccgaaccgcttcagggtgtctgccgcagcccggcccacatagagcaggtcggtcaccggcagaggccagaccagggcacgaaagttatccggcgaaatcagggtgacggcgtccggttttttgtagtcgctgcccagcttggcaaacaccttgttgaaggagactcccaccgagatggtcaggcccagctccccccgcacccggcggcggagctggtgggccagggccagggggtccccgccgaagaggtggagagagccggtgacgtccagccagctctcgtcgatgccgaagggttccaccagatcggtgtactcctgatagagctggtttacctggcgggagaactcccggtacttgtcgtggtgggcgggaaggagaaccagcctgggacactttttccgggcctgccagatggtctccgcggtcttgataccgaaggccttggcaggctcgttttttgcaaggatgatgccgtggcggctggccgggtcgccgcacaccgccactgggaggtggcgcagctccgggtggtccaacagctccaccgaggcgtaaaagctgttcagatcacagtgaaagatgacacggtccaccgggcgctccccccttattaggatgtccttattatatccctttgggccatgaaagtcaaacctttgttcgattcctcttgacggagcgatctggatatgctatggtgaaaataggaaaggaggtggggagatggagtatcttccggctaaacatctgctccaccgcagccgggacacccggtggttcgggacggatcacaccatgaatatctatcgggggtgctgccacgggtgcctgtactgcgacagccgcagtgcctgctatcaaaacccggactttgatacggtaaaggccaaggcagacgccctgcgcatcctgcgggacgacttggcacggaaggtccggcccgccttcatcgctaccggggccatgagcgacccctacaatccctttgaggcgtccctccagctgacccgacacgccctggagctgatcgacgcctaccagtgcggggcggccattgcgaccaagagcgacttgatcgtccgggacggggacattttggactccatcgcccggcactcgccggtgatctgcaagctcaccatcaccaccacggatgacgccctggcggcccggctggagcccggggcgccctccccctcccggcggctggccgctctccgggagctggcggaccggggactgtttgccggggtgctcctgatgccggtactgcccttcctggaggacacggaagagaatgtgctggaggtggtggagcgggcggcggaggcaggggcatcttttgtctacccagccctcggcgtgaccatgcgggagggccagcgggagtatttcctacaggggctggaggacgccttccccgggcaggggctgcgggcccgctacctccggcggtacggggaccggtattggtgcgccagccccagggccagacggctgtgggaggtgttctctcgcaggtgcggtcagttgggcatgcggtaccgtatggagcagatcgtctccgcagccacccgggactatggggaccggcagctgagctttttttgacggaaaatacagaaaaggagcgggacagatgaaatatacggcagtggtgctctctgtggcggatgtcaaggccgccagaggattttatgaggatctgttcggattggaggtctgccaggactatgggatcaacgtatcctttacctgcgggctctccctccagcaggagtttgactggctggtggggctgcagaaggagcggatcgggaaaaagagcaacaacatggagctttgctttgagacggaggacctggaccattttctggagcagctgagacgataccccggggcagagcgcctgggggacgtggtggagcacggctggggacagcgggtggtccgcttttatgatttggacgggcacctggtggaggtgggggaggacatgggcatggtggtccggcgtttcctccgcagcgggatgaccatggaagaagtgtccgacaggatggatgtctccatgggggacctggagaagctgctggagagagacaccggcggccactcctgagcgttccggccggaatgaaaagccattgacgaaccgctgcctgggccttacaatggcggtgcgggaataaaaacacatcatggttggtagtccatgagcgggccgcgctcccgtcagtagccctccctcccgggtcgtccgtttcccgacacaagtgtttgggaggaatcgaatatggaccggaacgtgagcagctttacggtgtgctttcagccccccttctgggtggggatcgcggagcggtggacggcggacggctatgaggccgcccgggtagtctttggaccagagccctccgacgcccagatctaccagtggctgggggtggagtggcacaagctgcggttcagtcctgccgctccgggggagcgggccagagtccggccggaaaacccaaagcgtgtccggcgggaggccagaaagaccctggagagctccggagctggcaccagagcccagcaggccctggccagagagcgggagcaggcgggagaacggctccgccaggagcggcggcagcgccgcctccagtcggaggaggagcggttccgtctgcgccagcagaaaaagcgcgaaaaaaagagggggcggtgacgccccgggaccggagggccgcgggagatctcccgcggccctccggcatgaaaataggtgaaatgacatatgagaagtttcaatagacccattcgcgtcaataatacatgtgcaaaatagacaggagtgacgggaaaatctttgtcagatatggagaagattttttctcccttgagagtttttgtagggatttgaagcggggctggtatcctgtgcctatccggagcagaaagaagacgcgctccggccattctaggagagaaaaggagacagagagatgaccattgaactgaatgtcctccagacgacagggctggccatgctgctgttcgtgctgggccgcttcatcgtgaaccacgtgggattcctgcggcgctgctgcatcccggcccccgtggtgggagggctgatcttcgccattttccacctggtggtccatcagacgggactgctcaccctgacctttgacgagaccctgaaaaatgtgttcatgatctggttcttcaccagtgtagggtacggggccagcttcaaggtgctgcgcaggggcgccggaccggtgctggtgttcctgctgctggccaccgtcatgatcacgatgcagaactttgtgggcgtaggcttcgcccagctgttcggcttggatgacccccggctgggcctgtgcatgggctccattcccctggtgggcggccacggcacttccggctccttcgggccccagttcgaggcggccggcgtggcgggagccgaggtggtggccatcgcctgcgctacctacggcctggtgtccggcagcctgatgggcggccccatcgcccgggcgaagatcaaaaagtatggtctgcactcctccgtgaaggcggaagccgtggagaccgtggagacggtgcaggagcccagcccggccaaggaccagggcgcggacagcatcctgaaggcattcatcctgctgatcattgccgccggcatcggcacctatatcaatgcctactttgacggcaagatcaccctgcccacctatatgggcgccatgatcgtggcgttgatcattcgcaatgtcagcgactggcggaagatcgagctgcccatgcacgccatcgacatcagcggaaatgtctgtctgaatatcttcctggccatcgccctgatgaccctgaagctgtgggagctggcggccttggcggttcccatgatcgtcaccctgctggtgcagaccctcatcatgttcctgttcgcctccttcatagtattccgggtcatgggacgggactatgaggcggcctgcatgaccaccgctttctgcggcttcggcatgggcgcgacccccaacgccatggccaacatgctcagcgtcaccggccagtatggccccgcgcccaaggcgttcttcgtggtgcccattgtgggaggcatgtttgtggacttcaccaataccgccgtcctctccgtgttcctgaatttcctgcccaaatgagggcagaccaaaagctcccaccgcctgcgggcggtgggagctttgccgctttttcgagaaagatgcagtctgccgcggacaaacctcacactggcagcctgagcagtgttttccccgacacgcatgtcgccggggaaaacggatcagaactggattcacgcctgcgggagcgaactctgcgaggctttttccgtgggaggccgacggctatgatctgggcgggggtcagtccggcccgttctgccgggcggcggccaggcgctccgcctctttttttcgcttcttggccagatatcggtcctcctcgctgaacacacagccgcagtatttctgcatatagaagccgtggtcccgggcaaactgctgcccctcccggaagagggggcggaaatcccggtacaggaattccacgccgtactccccgcccatggcccgggccacggcgcagatggcctcgtggttctggtaggggctgatgagcagggaggtggtgaagctgtcaaagccgtgctcggcggcatagcgggcggtctcctccatccgcacccgatagcagtaggcgcagcggccgtcgatgttgtcggctacatgctggacgaactggcgcagaccgtagtcattgactactaccagagggagggagatctccctggcgtagtcctccaggcaggtttttcggctgcggtactcggtataggggtggatattgggattgaaccagaagccggccagctcgatgccctcctcccgcagggcggcgatggggcggttggcgcagggggcgcagcagatatgcatcagcgtcttcatgtcagtctccttgttctgggtcgaggatctggacggggacgccctgacgcatggcgtaggccagggtctgggcggttccgcccttgggtacgccgtcatagaccgacagcaccagggcagagcggtccaccatatagcggttccgccgctgcatacagaagcggtcatagcggtgctggaccagagtctcgaagtcgcactggtccagaatggcctgataccggtgccgttctgcctcaggccaggcgtcagcctggctctcgcaggggcgggcggcctccagggtgacgccggagcggcacaggcgcagggccagcaccgcctccgcaaagtacaggtccgtcccccgggccatgccgcagatgaagtggcgcatcccctgggtgtaggctccctccaccgcctgggtcagacggcgcttcagcgtcagacagcgggggtccgactcccggctgccccagggcagcttgtccgggcggtgcccggtgaagcagcaggtggtggcgcggtccacgggcatccctcccagcagtttttttctattgtaatctgaatagggaggattgtcaacggagatagaaaatttgttcgaggcactcagctgaaaaagtcccgcaccgcatcagctgctgccaggccgttggaggccagcgccggatgcgccccatggtcgaataggcacatcctggcctggggcaggatctccagaatatgctggtattccgcctccagatctttccggcacatgacgtcctcccggctgcccatcagcagtaggggggcctgcagctcctccaggggcctggagaaaagggggaggccctcccgggcgcaccggaccagagatcgggtgtcacggtccaccacttcctcccagtccgctccctggcaccactggtaaaactgacgcgcctggtgggacgctttggctgcggcccgctcctccagcagctcccggtcaaagccgcggtgaagggtgcggccatcaaagctgtcggccacgatcccccgcaccagatcagggtgctccagccccgcgttcagggcggcccaggcaccgccgctggtccccaccagaaagacgggaccaaggcccagatgcctgatcagagcggcggcctgcctcccctggtcgatccagagctggggtggaagctccggcatccgctgagagcgcccgctgcccaaaaaatcaagcaggatacagtgaaagcagggggtatagaaggggagcagaaactgaaacatctgggaagaggcggtgttcccgtggaggaacaggaggggaggacccacaccggagcaggtgtagaagcagcgcttcccctgatagaaaaaatagggcaaaggaaagcacctccttaattcggatcggagcagagggggaagacggcggaaaggcgcggcggtgcggtcagccgcggcagcgggacgaggcgaaggcgaggatcaaagagggaaggatagaggcgatcaaggggccccattgggtggaccaggaggtgagggagagggggacccaaacgatgcccaggcagatgcaggcggcggaaaataggagctgccgcctccgagagtggtgctgggggacataggggtacagatggagagcccaggcaacgccctgccagagattatacaggcccagcagaaagacagagggggtgaccacaggcaggagacagaagatgcacgcgagaaaaccagccagagtgaggaagacatagacaccccagtagatccattttttcatgccgcgatccatgtgagagacctccttgtccgcccggtgccggatggcagacagctcatccgggctttgccaacagtatagcacagggacgtcccgtgttccatgctttttcttgccgaaatggcggggcggggcccgcgagaagagaagcgccggcgggctcaggcccgccggcggagggatgggggagcggagcgctcagggggcagcggggcccagcagcaccggctggagctggcggccctccagggcggcctgggcggcatcagccaccagggagaagtcggccaccagggaggcgggcttctcctccgggtcgtcctgccggaaggggaccagatagatgtacttccgggccatcagctgccccaggttccgggccgaggcggccagcccgtcgttggtagagggagccagcaggatggggcggcagttgcgcaggtgggccttggcagccagggtgacggtggtgtcggcgatgccgcaggccagcttgcccagggtgctgccggtgcagggggcgatgatcagcaggtccagcaggcccttggggccgatgggctccgcctccttctgggtggcgattacccggtggtcgcagatgcgctccatctcccgcatcaggtcgtgggcggtgccaaaccgggtgtcggtgtctgccaccacctcagagacgatggggatgacatggtcataccgggccttcaccgcctccagggcctccatggccctgtggtgggtgcagaaggagccgcacaccgcgaatcccacagttttatgttccatattgcagccttcctttccagatatcacacgtccagctcgtggagcatgttgtagatggtgctccgaatggcgccgccagcggtgacaggggccaccttgccggggagggacagggcccagatcacctgacgtcccaggcggtcggcggccttgcggtccaccccgccgggcttggaggccaggtcgatgatgaggcagtcgggccgcagatctttcagttccgtctcccccagtaccggggcggggacggtgttgaccaccagatcgtagccgcacagccagccgtccagaccgccgatctgctctgcgccgtagccctcgctctccgccagagccagctgctcatatcgccgggcggccacgctgacccgggctcccagggcggcgaagcgccgggccgcggcctgcccaacccggccgaagccggtgatgagcacccgagccccgtggatggtgacaggcatctgctccatagccagctggaccgccccctccgccgtggggactgcgttggccaccgccagctcctcccgggcgaagtagtcccgaaggatcagcccccgggcgtcagccatagcggcggagaccgggtctacccggccgccgcacaggatctgggggggtgagagggcatccagcagagaggccaggggaagggcagagcgggtaaggggggtgttgaccatcccctcggccccggccaccgggagagggaggaccacgcagtctgcccggccgatcccgtccagcgagtcggccagggtcaggttttccgtgggcgtgaccacgctgccgctcagggcgtaagtatggacgcggtggccgtcctccgccagcaggcgggccagacaggcttggcgcaggtccccgcccagcacccagaaattcagttcacgtttcatggcgtcagcctccattctttgctggttcagtctatgacgggggagaaaagggagttccggggccggagagtggctgtcagggcccacttgctgggaaagtaaaaaatgcggagcggggcgcggcattttccgtgggctttccgggggattttctttgcaatgcgggggtattttgctataatatactatctatcggtatggacagatcgaaaatcttccgacatccacgggggagggaccgctctcccgcggaggcgaggtgtgtgtttgtacttaaaagcattggagaccagcacctgcgcgctgtgtccattttacccaggccgcccgtctggcgctcagcgttcttcaggaggggcggacattatcatccaacagatggcgaggcgcaggaaatcaccgaaacgatgaaagccgccgatcaaatgacatggagcggtaagatgaacaatatccgagccggtgcaatggaagttgtagacaaggagatcatatacacataaagtgaagtgacagcggagcaatgccccttttatcgtatttctgaggtgttggctcacccgacccgatttctggtggctgacagcagatgcagaaatcctatatgctctgacgccagaccgcatggggccatgcctgattatccctgtttgttgagtgtggtatgcagcccataagaaggtgcgtctttactggaagggctgagataacagttcttggaagagactgtattcaaaaactgatgccagctatccacataccgctcatactgagagcgctgcgtgtgtgttttgtcatgccaggtgcattcctgcgccgtataaaactggttccagtagtgatttatagaaacaccccagcggggtatcttgggatgtggttgcccagcccttgcggtggcttctgtcaggcccaaagcgcacagtacctaaacccgcagttccccgacttcacagactgttctgtagacggattatatgagtgtgccgccctgacccagtggttctggagtcaggcagaagaggctggagggcgctttgaccgccgcaatggctgccccaattaccagaagacgttgcgggcggtgcggagggactgagcaaaactatgatctgatggaattgatacagtcttctctcatcaaatccgtcagtgctgacggctttgagagagccagtcacaaaatacagatttcagtctgagacagaaaaatggaataaataaaaagttaccgagaaccgtagctccggggttctcggtaactttttatttgccttcatttttgaaaactattctgcgacagagccttttcttttgaagctgtcaatcgacctgctggcgaaaggctccggaggagaagggcatgaaagaaaaccatctggctcttttctgcagagtgagtaaagggagccgaacatccctcaccttttgctgtgcttattctgacagtgatacagtgctgaagtttgcgatttgctgctccatggcagtgagacaaacgcattgtttcgctcttaacgacgggctggatcatttttcttcaaatatttcgacactgtactatacagcagatccatctcaacaggcttcgagatgtgagcattcattccggcctccaaagcgtcacgcacatcctgagcaaacgcatttgccgtcatcgcaaagatggggatggatgctgcgtctggatgagcgagcttccgaatttctctcgctgcctcatagccattcatcaccggcatctgtatgtccatgaaaattgcatcgtatgttcccggctcagactgatcgaactcgttgaccgcctgaaggccgtcacacctaagtgtaaatgtggctccccacatctgaagcagctctcccagtatctcagaattgatctcattgtcctctaccagcaggaaatgatagccggacaagtcaccaggctccacctcaatgggcacatcccggcagtattgttcctgatcagagggaagatcaaattccagttccacctcaaactttgtcccttgccccagcttgctttccacttggatcgtgtcgcccatcaaatcgaccagtcccttggtgatgctcaatcccaggccggtcccttccaccttggagacctttttgctccggttaaatggttcgaacagtcggttgaggaattcatcactgatgccgattccggtatcctgaactgtgaagcggtagcgtacgcatccgtgcctctctgcattgatctcctcaacacggaagatgaccataccgccctccaatgtgaacttgaaggcattgctcagaagattgatcaagatctgcttgattctcagcgcatcgccggtaaatttgatatgctggaacacactcgtctcaattttgaagcacaggcctatgttttccgcctgagaggtcataatagaggatatatttccaatcagctcctcaatatggatcgtttgaaggttcagatgtattttagactgttcgatctggctcatatccagaatgtcattgatcaggctgagtaaatgctgggatgacacagagatcttgtacagataatccttcagtttgtcggtgttatccaggttcgcaagggccagggtcgtcataccaacgatcgcattcatgggcgtacggatgtcgtggctcattgaggagagaaaatcacttttcaccttactcgcgttttccgcttcgcgcagtgctctttcaagctcttcctttgcctttcgctccgcgttcaagacgtccgttacatccgcccggatgaagcagacccttccaagccgcagatcgatggccgaaatgtgcatttttttcgttcggatctcaccggcggcattgtacacagaaaagatgaaggagtagcttccctgctcttttaaccgttccagcatcgtggcaggatccagcatcttttctacatatccctcttcgccccagtcttccacaagcgtctctcccacgactttccggatgcgctcagaattacagcctgtcatctcagggatattgtcatctccaccgctcacgatctcatattggtcggtaagaagatccacatccgccaccaagtcatatttcgtagaggacagcgttaaaaatatcttatctcgtatcgtctccttcgtgatgtccgtcacagtcaggataccagtaatatctcctgtgtccggcatctctactaaacgcaccttaaattggacatatcttccggcacgctgcttcgggaggtcgataaagcagggcatgacgatttctctgtcgccggcggcataggctctttgagacggttcgttcaaatatttggagtaaaaggtctttcgctcctcctgatcgacgatcagggtccccagccctgtgaaaaaattttcccgctccgaaccaaacagagaaagaaggtcggagtctgtgtggtccacgatctcaaggatctgattttttgtaatgttacagtgtccaagaatcaaagcatccggtccagccaactgatagtgctggtgtatctgctcctgatactgctggcgcagctgctccttgacctttttttctgcggtcacatcgtgataatcggcatagacccttacacagtcgccgtcgcactgaatgacagacaccttggtcttgacccagatgtactccccgtttcccttttgcaggcgatactcaagctcatatttctcgcgtttttcgctaatacagcgatccagattctcacgaacgaacgcctgatcgtccggatgcacgccggcaagggcgctctcctgatacatggcccaggcgtcctcatggcgcatacccagcatttctgaaaagccttctgagagatactccggtttgatgcttccgtctacatcatgtcggatcacggccatgccgccgggaagatatttcaccgcagtctgaaaatactgctccagccgctcctttgccctgcgttctttcagttcctcagtcgtatcgcgtacatatttgatgtacgccggggtcccattccagtctgttacccgggtcctcgtcgtataggtccttccgttcagttcgtggacttccacaccttccgattgtgcagacgcgcctgaatacagggagcagaactcacatggttctgttctgccgtgcagcacctcgtagcatttcccggctgggaaggcgctctgtgctccgcccctggatttcaggctgttggcatacaggaggtcgtagttttccgaatcgatcacataaatatcgtccgccgattcactgacaatgtgctgaaacagctggaactccggagatagtccggagaacagcacctggaactcctctcccaccatccatcccaccagatgacaccagatctgacgcccgcccttgcttttcagccagaaatgcgtgctgagctctgtatgctcttcccgcgccacgcgcaaggcttgttccacctgctcccggtcgcactcgcaaacgatctgcagggcgtttccacgggtaagcgcttcaaattccgaccgatcgccgcagatcagctttacaagcgtatcagagcaatactgaaacacaaatttgtccgtggacccgtcatagacagcaaggcctccgtggagcgcatcgatccctctgttttgattctgattcataaacgatccttcctgcctctcagttttcacgtcggatgtggagtttttcaatgcgcatacctctggacacagagccacgcgcatcgtctttttgtcggcctgcttaccggccgctgaacccacaggaaagcgtcaaagggaggctcacggcaggacctcgttgaatacctggtcgatccggctgtgcagcgtctgcaaggtcttttgtaagtgctggttctccgctttcagatcctggataaacagttggcgcttgatcttcagccgcagcagctctgcattcacaggcttctgaagaaagtctgacgctccgttggtaaagccctccagttcaatatccacgccctccaggctggtcaggaagatcacggatatattggaccagttttcagattttttcagcaccttgagcaggtccatgccgctgacgcccggcatcaccatatccagcaggatcagattcaaatctggcgaacgctgaagctcgcccagggcctctactccagtattggcgctgaccacctcaaattctggctccagcagagccttgacgatggccacactggtcacatcgtcgtctacgatcatgatttttttcatccgcgttccttctttcaaccggtttgttccgctaggaactgggtgatgctctgggtgaccctgcggtactcctgggtaagttggcgttgataagttgtcagctcactagggggcacagcggttctgatctgctccagatattcggcagacagctggcgcagcggctcgatacccagattagcagtcaggcccttcaacgtgtgaacatggcgctccaacgccttcatgtcacgaatgtcataggcatgggccagggcgctgaaggtcgggtcctgtggaaatttcaggataaagcgcctcaaaatcgactccattcctcccaatctggccacagttgccggtgcatctaccccgattcgctccagcagttcatgaaattccatacagtgtcactcgctttctaacaatcgagctgcgctctcttcgcagagcatttgaacccgatgtctgctcacagtttgtctttatctaattgtaacagtatttttacgatctgtatagataggaaatctcaaattctacaaaaagttacagtatgtctacaagggaggagacgagattgttctgcataaaaaatgatccggccctgtacggaagcgcactccacagatctaacttaagagtatggcattgataattgaacaagatataccggccaaaggcaaaaggagtattgattttcagataaaattatgttgcacatatatcacctatcaccgagctcatttgcgcttctgatgatcttaagacagtacaatatctggaaggtcatgaaaacagcaaaataacagcggactttgcattaaggtgaagtacagtaaaccacatcacttccctcgtgtttaccggagaatgttataattgatgtaagcaccgaatgaccgtgaggctgtgcggtgtgttttgctgtcagcctttcgggtaagcctccacgatacatccctctatctcccggttgtgtcccagcaccctgcggagcttggcctcatccagcaggccgatggagctgacggtacggaggagttggttcaggatgttcctgctgctgcgaacttcatagaccagcgttggcatatcaacaggaggggcttcctagatggcatcgcggttgatgcactgccggatgaaccgcttatgggagcctcgcctgctgctgtactggtcattgagacgggagagctccttgttagacggacagatgacgatctggttgctcgcctcaaaagatatggcacccaaggatatgcaggagctgctggacaaggcagcctgcggggagtaaaagtgttcccctgtttcagcctgtaaggtcaaaaacaagggaaactatataagactcaaacattgatattataagcgattatcgctcactatggggatttaaaactgactctgcctggctcagacaataacaaacaaatattcggtccggtccgggggctgagattctaattgagaggctcgcaattttggacgcaaagtgcgcgctggcgccgacttttacaacagagacgttcctccatgaacttttgatgcgaaatgtcaatgaccatgccagtgagaagcatgtccccttgctgctcggaaaaggagccattcatcaacagccatacgacctccccatcgggacgaactacacgatattctaagctgatcgttgactccctctgttttatggcgttacgcagccgctgctcaatccagggaatatccgagggatgtaccaagtggatcgcttggttatttaatttgttgcggaatgtctcccttgtaaagccatgcagagcatagtagtgatcgttcgcatagatcaaggtaagatcccgatccgttctggcacggaaaattccgcccatcggacattgaacgatggactccaattcagcctgcgcctccatttgaccggtgatgtccaagcataagctgaccagtactgatgcgccattgggtaagaccgtctgtactcctgtctcttttacccagatatagcctttgcctctgcacagcattctatatgccgttgtatagttatttccaacgagaagggcctgtgcgatctctgcctttacattttcgcggtcctctggccgaaggcaattgatcatggctttcccgacagcggcgatgagatccctctggcttggataattcaaaagagacagcatctgttcatcaatgtaatagagggggaagcccggagcattataagtaatcataataccgccgaacatacatttgctcagcaaatccagcattgctttttctatacaatgctcaagctgtctcttctcgtcaggtttatgaacgaagcactgcgaaggggctggcattttcagatcactcttcattcccacataactctcccatatacatattgaatagggctctccttacactgctgttttttgagagacggcacttaatgcagcctgccggatcgtagaggtcaaaactttcatctcagcaaggatctcgttgtatatctccgcacggcatacggacatattattgcataaagctgtctctctctgatgtgagtcctgtttccaccgcagaaacaagactttgagttgattggagctttgggtattgacggggtccagataatgccccgccaatttcgaatccccgcgtgtcagggcaccctcaaaagcgtagcgtatcccgcgctctacctgtgcgaaactggctccgttctgcttggctatctttgcgtataacgcacagatctttccggaaaaatagtagggatctttatccatgagttctaaagcatcgtgaatatatataaacccttttgtattgaccggaatccctgcgcgcagcagagtatccgcgatttcatcgtatatcataataaatatcctttcaatgatagattgcccagccgttcctatgggggccacgtacatttcctggttgacaagcgctgtcttttgctttagtattatcgatatacttaaatacgccgttcgtggtacatatgtccatgtaacacgttcagcacccttagcttacaacaaatatctttgaaagtcaaccaatttttacaaatttcttgttatcctctttttgcgggcaagagatttgtgaggcagaaaatggggattgtagcgtctgataaggaggacctcacatgagcctgggagatagattacggcagaggagacaggaaatgggcctcaccaggccccagctggcggctaaaatatgcgtgactccctcagcgattgccaattacgaaaatggtatcagcaccccgaaacctgatatcctgatttccctaatcaatgtgttggaggtcgatgccaattatatttactccgattatcttggacatagccaagtaagaaatctttatgaccaggacctgaatgcggaagaaattgattctattcaaaaatataaaaagctttcggaagagggaaagcggctcgttcggctgattatcaatgaggaatatgcccgaactattaccaagagtcagcttaccctcccctgctatctgcctggtgtgcgtaagctccacaccggatttctcatgcaaacgaaattgggcagcgcgcacatcatgcaaaaagatctgcctgacggaaccgatttttgctttcaaattcaagtagatcaatatctgcctgtctttcgaaaatttgatattctggcactccagagaagacaggcacggcacaatgagatggggctgttctgtctcaatggcatttactatatccgtacccttttccaggagaagggagagtgccgtcttcgatctctaaatgtaattgatgaggatattttggtgaaagaagcggatgaattccactgtattggtacggtccttggccaagtaaatgccgttttggaaacttaaatgaaccctgctttccgaatgtttttggcgaaaagaagggatcttcgttgtgaaaagccttggggcttttactttttatgcagatttttgatattagtaagaacttgtaaaatataaatataaaattttgtatttggcctaacactacataaatatagacaatggaagctcaaaaattgcaccgcatagacaagaaaaggcccatcaaaaaggctggcgctctctgcctgccctctacaaacaggtatcccccatctataatggagccatgaggcagctagagggcgggagatatatactgagtggcggcctgtgaggatgagcgtgatgcctaggagcagatctgcgacctgtgccgcgggattctcaccgggtttaagtcggagcacaccatctctgccttgtccagcgccggggagctggccgccgcgctggacggcggggagcggtttgaacttcttattatatatggatatcctgatggaggccggacgggaatggaactggcccgagatccgcgggcagagaatgaacagaccagcatcctcttcatcgccagcagccaggaatgcctcaaggacggctactccgtccgccctatccagtacctctacaaaccggtggaccgggcggagctggctcaggccatggagacagatttccgtctgcaccaccggccggaccgggtgaccctgcggctgggcagcaagacatcggtgctgccgctggataccctgcgctatgccaaaagccagagccacggcacggtggccgcctttcccaacggccagccgcggaagcacagcagtgccgccgccactgccgcgcacagcaggaaaaaagaagcattcatgatcgtattcgcttcacggcgcagtcctcctatcctcttttgtttggtatgattgtaccaagatgctgggcaagtcctcatagttccttctggcagcgacacctataccttctatatttcccttggagccaaccagcgcctgaacacttcgtcaccttctcctggcgggccataagcggcagtgtccaggtggagggcggggcaaaaaacgtgaccctggatggtactttcgcgctggaagtaactgctgaccgcagctccttactgacgaagggcaacgggacctttatggtacaggtctacgacctggaaaacgccccctttgaaaacggcgccgaccgctgggagcatagggtgacggtggaggtggacaatctggcggtctatgccaagaaagcgatggataccgttactaaatagaaaatttcatgccagagaagcagatgggtgtatttcctgtcctgcagctttttataaagtaaagggtgcttcgccctccgaagtcttatctagccttaccagattccccccgcgctgtttgcagctcttgccatcagccacccggtcacagtaccggggggcctttttcattttcggaatgaaatatttccagcactagttacatcgactgacctgctggttgtcctgttcggagtaaagtgtcagaaccaacggccgaaaatccagcaaactacgcagccggaacagccgttttttctgtgaaggcaactttgtcgggccacagatccgtacgatatcggcgtaaactgctcgcaaactttcgcactgctcggcaatatttattttttgttgaagttatattgacaatttgttgagatatcattataattaccccattaccaatgagacacagaaaaggggactgaccatgcgtcaagaggaggcgttcgagtttctctgccgtctggcccaggggattgccagtatgtttggcgacagctgtgaaacggtagtccatgagatggagggtgagcggatgaagaatctggtgattttcaatggtcacgtctccggacgcagcgccggctccacgctgagtatttatggaagggataccatccaggatgacccggaagggaccagtctggatcaggatttcctgaaccagatggtagtgacccccagcgggaagaatatcaaatcctctactttccacctgcggggcgaggggtaccattatgcccttggcatcaactatgatgtctcggtgatgggggcgatgcgccgcctgctggagaactttaccgagtcctctggcagcctattggactctatctcagaggaccgctctgatttggatgccatcttcgatgcctgccaggccaaactggacaagcccatgtctcagatgcgcaagggcgaccgaatggcgctggtggccctgctgaaagagaagggtattttccacctgcagcgcagcgtcccctatgtagccgagcgtatgggtgtatccaaatatacgatttacaactacctcaatgagttggagcacatttaatgaagcagaccataatgctggagaaggggagacgcccatgacaattgtagaggccgcagaagtccgccagcggctgaccatgcctgtgtgtatcgacctgatgcgcaccagcctgcgggagctggaggccgggaattacacccagccgctgcgctccattgccctgctgccaggcggagagaagtttgggtttatgccggcctgtttgggggactgctttggagccaaagtgctttcagcgtttccccagaatgcaggaaccaaatacccatcccacatcggctatgtgctgctatttgagggagaacacggcagcttcctgggaatggccgacgcggcggtcattactgagatccgtaccggcgcggtctctggcgttgccaccgacctgctggcccggcccgatgcccaccgcctagccattatcggggcgggagcacaaggacggtctcacttggccgccatgaccgttgtgcgggatatccattccgtgaccgtctatgatcaaaacactcagacggcccgccgctactgtcaggagatggaggaaaaatttggtattccggtcaccgctgcagacagtgtccgggaggcggtatgcgacgctgacatcgtctgcaccgtaacgcccagtcgggagccatatttggagagcgactggattgcccccggcacccatatcaacgccgtgggcgctttcacgcccaccacccgagaggtcaccagtactctggtggccaaagccagactgtacgccgatcaggtggaggccatgcgcaaggagtgcggtgaatatctggtccccctgcaggagggactgatcggtccggaccacattgtgggctctctgggcgacgtgctgctggggcgtgtcccgggccggagcagcggggaagagattactctgtttgacgcgctgggcctggccgtggaggatgtggcctgtgtcaagtatctgtgcggcggaagccgcagctgaatggctggccccatgacccgacaacaataaatttatctgaggaagaaggaaaccgccatgaaaaaatgcattgccctgcttctgaccggtgtgatgctgctgggcctcctgtccggctgcaacacctaccaaaatgatgacagcgcctccagcgccggaagcacctcaaacacggcagatggagtcagcgccgacttcaccatggcctacaatggtgtggtgactctgaaccccattatgagccagagctccaacgattttaaccttttctatctgacccagatccagttggtgcgcttctacggcgatgagctgcagtacgacgctgccgagcgttacgaggtcagcgatgactataccgtctacaccttccacctgcgggacggcctgaagtggtcggacggccaggcacttaccgcccacgactttgagtacggcgcctactgtctgctgaatcccgacatgggcagcccggcggcatacagctggtttgccatcaagaacgcctcggcctataattcccgcgagatcaccgattgggccgaggtgggcgtgaaagccctggacgacctgaccctggagatcaccctggagcggccgctcaactcctttgaccgcaccattgctgtgcgcggcctgtaccccctgcgccaggattttgtggagcaggtaggcagccagcagctgggctcatcgccggagaccatgctgttctccggcccgtacatcatcactgactgggtgctggagagctccatggagctgaaaaagaatgatctctactgggacagtgccaattccctccccacccagaacctgcacttcatcgaggtggaggatgacaacaccaaggtggccatgttcgaaaatggcgaggtggacgccattgagcagatctccagccagtattttggacacctgaatgagtacctgaactcctttgtgggcggcggcattatgttcctgtggatcaatcaacagggtactagtccggagaccgccgcactgttgagcaatcagaactttcgtcaggccctgaactatggcttcgaccgttccgccaccgtcaatgcggtaaaccccggttataaagcctataaccgactggtggactccaactttgccggtcccgacggcggcaagtttgtggatgagtacccggtggaaacggtgcctctgtccggcgacgtggataaggccaaggagtatctggccgcggccatggaagagttgggctactctgatgtctctcagctgccccagctggagctgatcacctgggatacctcggagcagaagctgctgctggagaccatcatcgaccagtggaagcagaatttgggcctggagaatatccagctgacccagtatgtgattggcactgccattggcagcttctacgacctgagttatgatttgtttgccattacctgggaaactgacgtgctgcccaccgacattatggaggccatggtcactggcggcgaggtcaattacggcatctggagcgatgcccagtttgactccctggtggagcaggccatcaacgagctggagcccgacaagcaggcggagctcaccgcccaggccgagcagatcttcctggacaatgcggccatcctgcccctgtatgaaaacggcgtgaccggcgcagtgcaatcctatgtggagggcttccagatgtccgccaccagctccggttatcagttcaatcacctggtggtacacaagtaaacaagtagttttgcgcagcggggagcgcggcggcttttcaggccccgtctccccgcgtatcgttcttcgaaaggagacccgccttgaaacgatatattctaaagcggctggtgatctcgatcatcaccatctggctcattgccacatgcagcttctttctgctccatgccctgccggggacccccttcggcaccacgcagctgatgagccaggagatgcgggacaagatgatggcctactatgggctggaccgcccgcccctggagcagtacctgacctttctgtccaacctgattcggggtgatttcggctactcgctgaaatatgtagggcagtcggtcaacggcatcattgcccagaccttcccggtgtcggcgcagctggggctgcaggcatatctgctcagcttccccatcgggatctttttcggcattattgccgcccggcggcggggccgtcccctggactatgctctggtgggcttctccgtgctgggcgtgtcggtgccggtatttattctggcatccctgctgcaatatgtatttgccaccgaactggggtggttcccggtggcccagtggaagggctttgcctacaccatcctgcccacactgaccctggccatcggctccatcgccggaaaaacccgcaatatgcgcacgctgatgctggaggtcatttcggaggactacgtcaagactgccaaggccaagggcctctcctctgcccggatcgtctggagccaccagatccgcaacgccatcatccccatgatcccctccctgggcatggagatcgtgaccatcctgatgggatcctttgtggtggagcagatttttgccatcccgggtatcggcgcgtattttgtccaatcgatccagagcctggactacaccatgaccctgggcttaacggtattcttcggtgtgtttgtggtcagcgccaactttgtgatcgatttgatttacggccttgtggacccgcggatccgggttgcgaaatgaggtgcattcaatgaacaaacccgcttcctctctgaccgagcaggattttgtccgtctgcccgctgaccgaagcatggccgacgccatagtgcgccccagtgtcagctactggcgggacgtgctgcgccgtattcggtccgacaaagtcgccatagtcagtctgaccttccttgtcatcatcatcctgatggccatttttgcccccatactttctccttacggctatgagaccaccgatctgctccacaccaaccagcctcccagtgccgagcactggttcggcaccgacgccggaggccgggatctgtggacccgggtctgggtgggggcacggatctccctgattatcggtctgggcggcgccattgtgccccagatcatcggcatctttttgggcggcctgtccggctttttcggcggctgggtggatatgctcatcatgcgcatcattgacgtgggcgtgtgtatcccatcgctggtgtatgtgaccctgattatgctctggctggacgcgggccccgtggccatcatcatcgccattgccattaccggttggatggactcagcccgcgtcgtccggggccggatgctccagtttaaaaaccgggagtttgtcctggctgccagcactctgggggcctcccccatccgcattattttccggcacatcctgcccaatatcctgggccagcaggtggtcaacatctcctctgccatcccggcggccattttcctggaggcatacctgagctttatcggcctgggcatcaaatcccccatgacgtcctggggtcagctgtgccaggtgggctcggagttttaccgcctctacccctaccagctgtttattcccggcgtgtttatcagcgtgaccattttggcattttatctgttcggcaactgtctgcgcgatgcgctggacccccatctgagggactaaaggaggcgccttatgacgaaccatcttttggacgtgcaggacctgcatgtctcctttgacacccacgccggcgaagtccaggcggtacggggcgtcagcttctggctggatgcgggtgagacgctgagcattgtgggcgagtccggctgcggcaagtcggtgaccatccaaaccattatgaagctgctgccctcccctccatcccaaatcaagtcgggcgccatcacctaccagggcaccgacatcacccatttgagcgacaaagctatggagtcctaccggggcaaggaattttccatgatttttcaggattctatgaccagcctgaacccaaccatgcgggtgggacggcagatgtgcgagggtattttgcgccatcagagggtgtcccgccaggaggcccagcagatttcggcagagctgctggggcaggtgggcctgcccaacccggagctggtggcaaagcgctacccccataccatgtccggtggtcagcgtcagcgggtcatgattgccatggctatggcctgcaatcccaagattctctttgccgacgagcccaccaccgccctggacgtgacgatgcaggcgcagatcttggatctgatgaaccacctgaaggagaagcgagggacctccatactgctcattacccatgatttgggcgtagtggccaagatggccgaccggatcgccgtgatgtatgcgggcaagatcgtggagtacggcgacgcgcggcaggtattttaccgccccagccacccctatacctgggggcttctgggggccatgcccaacctgatccaggacgtgaagagtgagctgtacgccattcccggcacgccgcccgatctgtatgccccgcccaaggggtgcgcctttgcggcccggtgtccctacgccatggaggcgtgcttgaaggaagatcccccggaatttgcctgcggtcagggccacggctcccgctgctggctgctggacccaagggcacccgatgtaacgccgccggagggcattccgcccctgccgaaaggaggcagtgatcatgtctgatgcaattctccaggtttccaacttggaaaaacacttccgtgtaggccggggcaagatcctgcgggcggtggacaatgtatcctttgccatccagcggggcaagaccctgggactggtgggcgagtccggctgcggcaagaccaccgtgggccgcaccctgctgcgtatctatgagccggacgggggcaccatcgtgtttgacggccaggacatcagtaaggtgacccgggcccaggccaaggccctgactcgaaagatgcagatgatctttcaggacccctacgcctctctgaatccctttttcaccgtaggcgagatcatcgcggagggcctggagctgcataagctttgcgccaatgccaaggagcggcgggagcgggtgtatgagctgctgaacatggtaggcctcagcaaggagcacgcaaaccgattcccccatgagttctccggaggccagcgccagcgggtgggtatcgcccgggcgctggcattgaacccggaatttatcgtctgtgatgagcccatctccgccctggatgtgtccatccaggcccaggtggtcaatatgctgatgaagtttcagcgggagctgggacttacttacctgtttattgcccacgatctgtccatggtccgccacatcgccgatgagacggctgtcatgtatctgggcaccatggtggaatacggccctacggaggaggtttacggccatccggcccatccatatacccagggtctgctctcggcagtgccggtggccgacccagactatgaaaagacccaccaccgcatccctatggagggcgaggtgcccagccccatcgaccccaaaccgggctgccgtttctgcggccgttgtccccgggctaccgagcagtgccgcacgcagacgcccgcgcccaaggacctgagcggcggacattttgccgcttgtcatcatctggattaggaggaacactaccaatgaatacaacagaaatggttcaaattgccctggatctggcccaactgcaggaactgcctctggattcctccgtcacggttccaggggagaatatcacccgcgtgctggcgggcattgatatgggtgctgccgagctgactctggcccgccagctgggctatgactgcgtggccaggcaccataacatggtgccccgcctgggtaagctgggagagctggttgcccaaagccactatgagaagctggtacactatggtgtgcccgtcaacgtagcccaaaagctgctggagcaccgcaagcgggctacggagatcatgtttcacggctccaacctggacggggggccgtctgtggcccggctgctggggatgccatatctgggcctgcacacccctgccgacctgctgggcgagcggatggtggaggcgaaggtggacgaggtctatgaagccaatgacaaccccaccgtccaggagatcctggacaatttaatgaccatccgagagtatgcccaagcccccgagggccagcgccctgccatctgggtgggcgaaaaggacagctacgcaggaaagactgtggtggattttgccggcggcctgggggcggagctggacgagctgaaggcgctgatcaccgccggtgtgggtacctttgtctgcatgcacatggacgctgacatcgtcaaagccctgcaggaggacaaccgctgcaacgtgctgtgcatgggtcacatggccagcgactccattggctttaaccagatcctggacgcctgggaggctcggggcgtagaggtcacccgcatcggcgggctggtctgacaggaggcccgccatggcatggactttgattcggggcgggactgtggtagacgggaccggctccccgcccttccaggccgatgtgtgcatccgggacggcgtaatagacgccgtgggccctgacctctccgccccggagggagcccaggtgatggatgccgcagggaaactgattaccccgggatttatcaacatgcactcccattccgattgctccgccgccatgtaccccaatatggagagcacgctgggccagggcattaccacggaatttgccggacattgcggcctgggggtcgccccagtacagcatagttggctctacatgttcccagagaaaaaggcattcaccaaggtcatgcctgagccgcctgggggtattaacccatataacgcctatctcgttcccactcagcggctgcgggagccctttgcccagacctacggtcaggagctggactggactacttatggccagttcctggagcatctgcgccgagtggggctgggtgccaacctggctgtggtggccgggcaggcccagatccgtctgcaggccatgggcaccgactatcaccgggacgccactgagacggagatcgccgccatggagggcgccctcagcgaggccatggatggcggcgcgctgggactgagtctgggcctggactatgagccgggcctctttgccgggcgggaggaactgctgcgcctgatgaagctggtggctgcccggggcggcatcgtcactgctcacacccgcagccgcagccacccctattatggccatgctcagagcttcctggacggtctgcgggaatttttggacctgggacgggagagcggcgtccgcatccatgtcagccacatacaaaacggctacaacgtcaccccggcccacgacggtttgatccgtgccgccgtggccaagacgctggaggagctggaccgagcccggcaggcgggtgtaaacgtcacctgggatgtgatccccaagtacgcctatggtcccttccactaccctatggccgcctctctgttccaaccctacgtggagcggtgtgggggctgtgccgctttttcccgggcgttgaccctgcctgactttcggcggcaggttgttgaggagatccggaccggacgccatccgtctcagggggtctttacccgctttgatccgcaggccgacccagcctgggacacccgctaccggtttacccgtgtgcagcgggcaggctgtgtaggcaaaacgattcgagaggcagcgcagggggcagacagcctggagctgctgctggatgtgctgaccgaagacccctacgccgctatgatttccctggggcgccgtccggaacatacccccgaccgggacgcctttgtggcccgaacggaggccaccattggtctggatacctggaccttggactacgacgcggccctgtccgagggcgacctgccgctggagtgcggctcgcccgccacatacgaggggatgaccgtgtttctggagacggagcgggacaagggcgctgccatagaagagacgatacgcaagcttaccggcaatgcggcccgcaccctgggactgaccgaccggggctttgtctcccaaggtctggctgccgatctgttggtactggactgggagcatttctctgccagggaaaatcttgctgatccccgacatggcccgcagggactggactatgtgctggtggccgggcagatcgccgtggaccacggcgtccatacccatgtgcgcagcggcacggttctggggcctgaacatcgaaagggagagaactgagctatgtcttttgactttcaaactctggccgacgccattgactacggcttcggcaccgggttccgaccggactataccgtgatggccggagcacagctgcatgtaaaaaccgccccctgcattatcgacgcgctgaccaggttttctcagagtggtctgtatggttggaccgactccgatgaccccctgtacatccgggctgttgtcaactggatggcaaaggtccgcggctgggagatagaaccttcctggatcgtgccgtcctacgggatccttcaggccatgtgtgcctccatccgcgcctttactcagcccggcgacggcatcattgtgcagcagccggtctatctgctctatgcccgcgccatcgccaactgcggtcggaaattagtggacagtcccctgcaactgcggggtgaccggtatgagatggactttgccgacctggaggagaaaatggccgcaccggaaaacaaactgatgctcctctgtaaccctcataaccccactatggatgtatgggagcgggaggatttggagcgagtggcggctttggcccaaaagcaccatgtgctggtggtggcggacgagatctttgccgagcatgtgtggcagcccggtctgatggttccctatgccgccgttccgaacgcgttggaccactgtatcatctgtaccagtcttggcaaggcgttcaattttaccggtaccagccactccaatgtgatcatccccgatgcggccatccggaaggcctaccgcacccagcgggatgccgatcactatggcagcctctctcccttcatgcgggccgcggtgttggcggcctacacagatgagggcaaggcgtggatcgacgagctgatggactttgtgcatgagaacgagtccttggtgcgggactgctttgcccgctgtatgccggcggtgaagcttctgcgccacagagctggtacgctaatttgggcggacttccgcggcttggggctgtcggagctggagctggagcggttcttcttgtccgccggcgtggagcctgacctgggcagcaagtacggcgctgccgggaccggctttttgcgcctgcaaattggaatgccccgctctgagctgaccggagcgctcacccgcttggaagctgccgcccggaaatgcggctttgcccaagaggcgccttacatctaataaaaatagggctctgcacgaaaaatgtgcagagcccttgttataggcgacgatgatgccggaagacctttgaaaagtggagggaagaggttacttcagtatgtagaaaattaggcgaaaatataaaaggtgtatttcaaccttgcgcctatgggtcagcatttcagataacaaattagaatttgtcaatctttatctttgtcattctttttcttctcgttatagatagcaaccgccactcctatacctattgaaagaattacacaaatcataatcaatccaaagtttggtatcataatttttgcactcctttgtcaaattcttattagcttaataccttttactctgtggtttcatttagttcatcagtagaaatgcaatattgactacaattcccacacacgaaaagataagaccaaaactataaattcatctatatagacgtaaacatttctttgatgttttactctttattattttatcatccgtgaatgcttcctgcaaggcacactggtgaaatcgccggagttggaatcatcaacacctttcttaaacagggacgcattatctagcatattgaaaagggatagatggtgtgatacaataaaaaattatcactaacctcaggctgttgcaagatgtgatggggtaccggaacatctgtacaactatggaaacttacacaaaagcgttaagagaaaagaaattggaaacaattcaagccctaaatgaggcgttcaaaatctcgtgaccatactgccccaacggttacgcggtttttgtggtgcagaattccatgaaatcccatgttgcaccgatcttacaccaactcaaaaagaaattatggtgagttttaagaatttatgaaaaagcagaaagcttggaaaccattgcggcgcaaggatttgaaaggatttaagaagaagggggcgacgttgtgtacttaaaagcattggagatccagggcttcaagtcctttccggacaagacggtgctcacctttggggaggacatcaccgccatcgtagggccaaacggcagcggaaaatccaatatctccgacgccatccgctgggttatgggggagcagtccacccgggccctgcggggagggaagatggaggatgtgatcttcggcggcactgctcagcgccgccagacggggtatgccgaggtgtccctcatcctggacaacaccagccacatctttcccatggatgagagcgaggtcatggtgacccggcggtattaccgctccggggagagtgagtactatatcaaccgccgctccgtccgcctcaaggacgtcaacgagctgttcatggacaccggcttgggccgggagggctactccatcatcggccagggcaagatcgacgagatcctctccgtcaagagcgccgaccgccgggaggtctttgaggaggccgccggcatctcccgctaccgccaccggaaggaggaggcagagcggaagctggcccatacggacgagaacctggtccgggtcaacgacaagatcgccgagctggagctccaggtggagcccctgcgggagcagagtgagcgggccagaaagttcctggtgctgcgggacgagctgaaggggctggaggtctccgtgtggctggacaccctggagcggctgcgggccagccacatcaagctggacgccgattatcaggaggctgcccggcagaaggaggaggcccgggtggccctggagcggctgtatgccgccgccgaggccctctccgcccagatgcgggagaaggacgtggaggcggaccggctgcgctttgagagccagagccgggaggccgctgcggcggagctggagagcgctatcgcggtgctgaagaacaatgtgcagaacaacctggacaacgctcagcgcatccgggcggacctggaccagcaggaaggccgggcggacagcctggcgggccagatcggccagcggcaggagcggctggccgaaatcgaggacaagctgactcggatgcgggaggagctgcggggcaagagcgagcaggcccaggaggcggcccagtctgccgggaccctggcacgggagctggaggaactgcggcagaaggaggccatggagacggccaccgccgccgaggccaaggccctgctctccgccctggcggctgccgctcaggaggtgctggaccgggacgagacggtgcgccaggagctgcgggagctggacagccggctggaggaggggcgcgccgcccagcgtcaggcccggaaggccctggccaaggcggtggaggagcgggacgcggtgcagaacgtcatcagcggctacgccctgcgcctggagtcacgccggaaaaaggcggagcaggcccgggagcgccatatgaagctccagatggacgagaatgccctgtcatcccgggtgaagatgctcaccgagatggagaagctccacgagggctactccaaggcggtcaagctggtgatgggggaggcccagcggggaagcctccagcatatccacggtccggtggccgacctgctgaaggtgccggaggagtacaccgtggccattgagaccgcgctggggggcgccatgcagaacctggtggtggaccgggaggaggacggcaaggccgtcatccagtatctgaagcgccgagacgcaggccgggccaccattctgcccctcagctccatccggccgggggagctgagggagggacaggccctccggcgggagcccggcttcgtgggggtgggagatcagctgatctccttccagccccagtaccggaacgtgttttccaacctgctgggccgggtggcggtgatggaggacctggaccacgccatcgcagcggcccggaaatacggctataagttccgcatcgtcaccctggacgggcaggtgctgaaccccggcggctccatgaccggcggctccgccagccgcagtgccggcatcctgagccgtgccaacgagctggagcggctgaacgaacagggccggggcctgcgggagcagctggcccaggccgccaaggcgctggaggaggcggaccgggaggccgccgccgccggctatgagatggagacggcccagagccagctgcgggagtgggaggacgccatcctgaaggctgagggcgaggcggcccactgcgacagcgtggtggccgacctggagcgccagtcgtcgtcccagcgggaggagctggagcagctgaagagccgctctgcccagatcgagtcggacacccggggggccaggagccgcatccaggagctggagggggccgccgctgccctgaagagcgaggcggagggaaaggtcagaggccagacggatctccaggaccggtccgcccgcatcacccgggagctgtccgagctcaccgcctccctggccgccctggaggcggagcaggagaccacggccaagagcctgggtgagctgaagagcctgcgggacgacatggcgggggaccgggagcagaaccaggccctcatcggccagtatgaggagaagaaccgccagttcacccaggagatcggggagaagacagcacgcctccaggagttgcgggcggagaatcaggtccgcagcgaggagatccgcgccctgggcgacgaaaagctggccctggagggacagcgcaaccaggcagataaggacagcagggccaagaacgacgagctgctggccatggagcgggaggtctccatactggagcagcggaaggtggctgccgccatggaggagaagcagcttttggacaagctgtgggagacctacgagctgtcccacgaggcggccaagcagcaccgggtggagatcgagtcggtgcccaaggccagccggcgcatcggggagctgaagcgggccatctccagcctgggctccataaatttgggggccatcgaggagtatcagcgggtcaacgaacgatacacctacctcaccgaccagagagacgatgtccagcgggccaagggggagctggaggagatcatcgcggacatcaccggggagatgaagaccatcttcgcccgggagttccagaccatcgaccaggcattcgggcagaccttcacagagctcttcgggggcggcaaggccacgctggagctggaggacccggaggacatcctcaactgcggcatcgagatcaaagtgcaacccccgggcaaggcgctgaagatcatcaccctgctctccggcggggaaaaggcattcgtggccatcgccctgtatttcgccattttgaaggtccggcccacccccttcgtggtgatggacgagatcgaggccgccctggatgacaacaatgtggcccggttcgcccattacatgcgttccatggcggacaagacccagtttatcgtcatcacccaccggcgcggcactatggaggaggccgacgtcctctacggcgtcaccatgcaggagcagggcgtgagccgtatgctgacgatcaatctcaacgacgtggagaaagagctgaagatccggtgaatttcctttccctgctcctgcatggcgggaccccaggccgggcccagcgaagcgggccggactgggagaggaggcgcaagggagcgggcgagggatgcccggaggggcgtcccgagcagaagcggactttgcaccgacgaaggagcagggcgtgagccgtatgctgacgatcaatctcaacgacgtggagaaagagctgaagatccggtgagatctcattcctccccctgaatgaggacgattttctggatcactgggcctatatcgaccccaatactgcccgctgggcggagaacagatattttacggcatagaaccggggaggacacatttgaaggagaaggaaaagggcgggtggctgcccattgtggggctgatcctgctgattgcggtcctttttgcgggggtgaagctggtatttgcggggctgggatatgttatcccccaggacgaaggtcccgaagagacagggacctggtaccagatgtacaacgagcggggggaggcggtgcgctacactctgcgggagccgggagagatcgacctgtccgcgccggacatcgcccagtggatggagcaggcggccggagaactggagcagaccccggagacagaagggattgtcttctggctctaccgccaggacaccgacgagtatctgctctatctgccggaccaggaccgttccctgctggagggcgggctgaccgcctccgaagagacggaggaggacagtgaggtgtgcctggtcctgcgggcccgcaccccggagaacagcaagccggtggcgccggaggagacgctgtactgcttcgccactacctccgacagctggaacggaatccgggtccgagtcatcctggacggccgggagcaggaggtccgcaagctgacctccattggagaccggctgtactcgacggaggagacctatatcggccgggaccgactggaagggagcgggacatgagccggaggaccctgagatgtctgcgctgcggcgggacgatggagctgctgcggcgggaatttctccagctgggaaagacagggtgggtcctgggagatctggacaacctgctggccggggcgctggatgtggatatcctgtgctgttcagactgcgggaagctggaatttttccggggagagtggtctgagctggaggacccggagggcagcggcatcgcccggatggagtgtcccagctgcggcaggagctatgagctggacagccccaagtgccccttctgcggaaagaagaataccagattgttttaagaaaggatcaaacgtatgggcttttttgacaagctgaaaaagatcaatatttttgccagcttcggttcggagctgaccgacgacttttacgatgagctggaggagtccctgatcctggcggacaccggcatggacaccaccctggagctggtggaggaactgcgccgccgggtgcgggaggagcgcatcaagacggtggaggaggcccggacctgcatgtgccggtgtatcgccggcgccatgcaggtgggcgacccagccctggacctgtccaccaagccttcggtggtactgttcatcggggtgaacggggtgggcaagaccaccaccatcggcaagatcggggcacagctgaagaaggagcggaaaaaggtgctgctgtgcgccgccgacacattcagggccgccgccgcagagcagctgaccatctgggcggaccgctccggcctggagatcatcaggcagcacgagggcgcggacccggcggctgtggtctttgatgctgcctccgccgccaaggcccggaacacagacgtggtgctggtggataccgccgggcggctgcacaacaaacagaacctgatgaacgagctgaacaagatctcccgggtcatcgaccgggagctgccgggctgcgtcaaggagaccctgctggtgctggacgccaccacagggcagaacggactgatccaggccaagcagttccgggaggccgccggcatcaccggcatcgtcctcaccaagctggacggcaccgccaaggggggcatcgccatcgccatcgcccgggagctgggcgtgcctgtgaagtacgccggggtaggcgaggggatcgacgacctcagaccctttgacgcgctggagtttgcgcaggcgctcatttgagttagggattaggaattgggagccggccgtcctggcgctcgccgttgtaacaccatgtcaccggcggggcagctgccgcctcagagttaagaaaaattaagagtcatattcatatctatttcaacatttttcctcagcgatatggtaaaataaaatgacgtctcccggaacgggaggggaatacggagggagggcctgccgtgaagcgtatcgggaagatatttctgggcgtgctctgtgccgccgcattggcggcggggggcttttggatcaacgaccgcctctcctaccccatcgatcctggaatggacgggctggagggctctttgacgaactggctgaaccgggggatagacgcggtccatggctatcagccccggctgcatgagccggtcaccctgggagagcggacctatgtccccatggaggtgggggagaagctgggctacgctctgctggagcggagcatcaccggcagatatcggatcgcccacacctcttccggaaacgccccctttcggtgcggtgtgatcgaggagaacggcggaaagcagctgctttttcagggacggaacaccttcggagagatcgacagggtccaaatcacactggacaggggctatgaatatgagctgaagctgccccggaaagaggtctttttcatccacaccggggtggacagccgtatccccaccggacttgcctccgtggagcagatcaccctgtacgacggagaggggcaggacatcaccgaatcatttttcatgagcatgggaggcattcagtaaagaccgcataaaacagaggggccctcagcgggccactcagagaacaggagaggacaagacgatgccgcgtattgacggaagaaaaaacgatgagctccgaactgtggagatcatcccccatatcaacaagtttgccgagggctcctgcctgatccggtgcggaaacacccatgtgctgtgcaccgccagcgtggaggaccggccgccccgccacgtgcccgagggggaggggtgggtcaccgccgagtactccatgctcccccgggccaaccgggagcggtcccgccgggacatctccaagctgaagctgaacggccgctccgccgagatccagcggctcatcggccgtgctctgcgctctgtggtggacatgaagaagctgggaccctggaacatcaccatcgactgtgatgtgctccagggggatggagggacccgtaccgcctccatcaccggcggctttgtggccatgatgctggccttccgaaagatgatggaagcaggccagctggcggagtatccggtcagcggctatgtggccgccgtgtccgccggcatcgtggacgatgtgcccctgctggatctgtgctatgaggaggactccgccgccatggtggacctgaactgcgtcatggacgaccagggccgcctcatcgagatccagggcaccggcgaggagcggcccttcacgctggatgagcagcgtcagctggtggagctgtgcgagaagggtatccgacggcttcagacggtccagcgggctgtgctggaggggtaactccaaacctgaggaggcggaggccttctactgtccccgactgccgccggattattgtccctgtgccggagatcgagaccaccggacagaagctgaaaaagaagctggatcagatcaggtctgatatagaaaagacccgggagaactggcaggagcagaagacggagcaaaaagaggataaaaagtggaacaaacgaaagggcaaggacccgtgggagtggtaactatgaagctggtactagcaagtaaaaacaagaaaaagctggcggaaatgaacgatatcctgtcccatctgggcgtggaggtctgctctgaggctgaggcgggggtggatgtggaggtggaggagaccggcaccacctttgaagagaattccctgctgaaggccagggcggtcatggaggccagcggtctgcctgccatcgccgacgactccgggctgtgcgtggacgccctcaacggcgcgccgggggtgtactctgcccggtacggagggcctgggctggacgacccgggacgggtgcgcctgctgctggagaacatgcggggccagatgccccggacctgccgctttgtatcggtgatcacctgctgctttcccaacggagacgtgctctctgccagaggagaatgtgagggcaccgtggccttcacccccatgggggagggaggcttcggctatgacccggtgttttttgtgccgccgctgaaaaaaacctttgctcagctgacggcggaggagaagaacgccatctcccaccggggaaaggctctggaggcgtttcaggtgaagctgagggagtatctggagaaaagctgacgcccggccccaaatgggagcccagcggagcgggtcccatttggagaggacgagcaacggaatagagcggatgtccgccgggaggcggacggagcggaatggagtttgtgaggacgatggatttgacaagcaaacagcgtgcccagctgcgcggtctggccaacgggatcgacaccatcctgatcgtgggcaaggagggcatcggtgacaatctggtcaagcaggccaacgatgccctggaggcccgggagctgatcaagggcagggtgctggaaaacgccctgatgtcggcccgggaggcggcggaggcgctggcccccctgaccagaagcgaggtggtccaggtgatcgggaccaaatttgttctctaccgccagagccaccggaaggacaaaaaggacaagatcgtgctggtggagggaaagaagagagaaagcgtaccccagagggagccataaaaaacagaattgtctctgaggagcggcagcaagaaggactgaagcggaagaagggctgagaggaggcttgtctcttgaaacggagaaaatggcgtgcggccctgaccgccctcctgcttctggctgcggtggggggactgctctggtgcttctttccccgctccatgatggagggagagctgtactgtgtgaccctgtgggacggacaggcgagggtagacctgacggaccgggcagaccgggaagctgtgacagagcggatcgcgcgctgccgacgggtctatggcgggaaggtgggcggctaccaactggataggtgccccttagagctgggcttcagctaccgggggggcagctggtatctgatcgccggaccggagggcgccttcgcctatgacagcggggagcgtttaaactggcgcattctggacggagaacagctgtggcgggatctggcatccgctctcccgtccagctcagagccgggggagcggtgaacttggaaaggaagggtgtctgtatgaaaattgggatctatggagggaccttcaacccaccccacctggggcatctggaggcggcccggacggcggtcaaggtgctggagctggacaagctgatcctgatcccggcggcggtcccgccccacaaggccctgccggaggggacgccggagggcgcccaccgtctggccatgaccgagcggatggcggacgccctatccatgccgaaggtggcggaggtatcccgcatggagctggaccgggagggcaagagctataccgccgataccctccgggccatccgggctcagtacccgaacgcccagctgtggctgcttatggggacagacatgttcctcaccctccacctgtggcacgacccggaggtcatcacccagctggcggggatctgcgcctttggcagaacagagcaggacggagaggagctgttcgccccccagagggagttcctctcccagaagtatcaggcccagatcgtcaccatcaccctgccgggactggtggatgtgtcctctacccggctgcgggagctgctggcccggggggagggacaggagtatctgctcccccaggtgtacggctatatcctgatgaaccggctgtacggcacccacgcggacctgaagcggctggagcttccggagctgcgggcctgttcctactccatgatccgggccaagcgggtcccacatgttatgggcgtggaggaggaggcggtgcgcctggccgagcggtggggcggagacgaggggatggcccgccgggccgctatcctccacgactgcaccaagtatctggaactggacgaccagctccgcctgtgccggcagtacggggtggagctggatgagctggaacagcaggcggtgaagctgctccacgccaagacgggggcctgtatcgctcgggacatttttggggaacctgatgaggtgtaccaggccatcttctggcataccacggccaaggcggacatgaccctgctggaaaagatcatctatatcgccgattacatcgagcccaaccgggacttcgagggggtggaggagctgcgccggctggcgtatgaggacctggaccgggccctgctgctgggggtggagaccaccatccaggagatgtgggaccgccggctccctatccacaccaataccctccgggcccgggactggctgagagagcacgggacaaaaacagaggaatgacaagaggaacgagcagatgagcactgagaacagaggacgcagagagcagcatcgggagcggcgctccctgggagagaagtttcaacagtggcggcagcagcgccgggagtggatcgccgggatgacccggggacagcgcatccggcaccgcctgctccaggcggcggtggtcctggccatcgccatcatcgcggtctgggcggtgatgagcgcctggatacgggtgcccaaggtgcctgacccgccgacggccggcccggacaccacccagcagcccggggagggagaggacatccagttcacgggggcagagctgcccaatgtggccaagagcggacggaaggagggctactacaccttcctggtggtggggcgggacgtggccagcggcctgacggacaccatcctcctctttacgttcgacaccaacaacaagagcctgaacgccatcagcctgccacgggacactatgatcaacaccagcgccaagggcggttcgctgaagcggatcaacgtggtgtacaaccgcaaccggggcccctccgacctgccggaggcccagcgggtggagaacggcatgactgccctgaagcaggaggtgagccgcctgaccggcatctaccccgacttctatgtgatggtggagtgggaggccatcggcgagctggtggacgccttgggcggagtgtacttcgacgtcccatttgatatgaactacgacgatccctatcaggacctgcatatccaccaggaggctggctaccggaagctgagcggggaggacgccatggaggtcatccgctggcggaagaacaacggggagccctctccgggcgatgtgggacgtatccagatccagcaggacttcctctccgccatactggacaagtgcctccagccagcaaccctgctgaaggccccggcactggcccaggtgttcctgaacaacgtgaccaccgacctgacagtgggcaatatcctggccttcgcacagctggctatcggcatggacccggagagcgatgtgaaattttccactatgccctataccggggtcatgtatgacagggcctcactggtgctgccggtggagaaggagctgctggagatcctcaacagcggcatgaacccctatgtggaccagatccagtccagcgacctccagctgatgtacaaaaagagcggcgggggatacggggtcaccaccggcaccctgctggactccagcatggcttacgccgggtcctccagctcctcctcggggacacagactacccaggagacagaggagcctgagacagaacagccaggggagacggacgccgggacggagacccccggcaccacgcccccggagggcacggagaccggaaccggggaacccggcagcaccggctcggagactggggagcccggcacgcaagggccggagggagagactcccgatacggatgaccccggggctgtgcagcctgaagggcccggccagggggagggaactggagcctcccagccggagcaggaccctggcggcgggaacgggggtgcgtcacagtccgaaccctcccagcccggcacagagggggagagcggcggcagcgatctgcccccggagtggctgctgcctgatgtggcgtgatgcctgatacagaatacaaaaaggaaaggaattttgcccatgacatcccgagagagtgcgatcgtgttagccaaagccctggacagtaagaagggcatggagatcaaggtgctgaagacggaggagctgaccaccctggcggactacttcgtcatctgtactgcctcctccaccacccagatcaaggccctgtctgacgtctgcgaagaggcgatggagcggaacggagagcgggtccaccacattgagggccaccggggcggcacctgggtgctgatggatttctcctccgtggtggtccatatcttcatggacgaggcccggaaattctatgacctggagcgcctgtggggcgatgcccaggaggaggatctgagccaggtcctgaagccggaataagagagaacgataaaacagacaaagaggccggtgcgcttgcgcaccggcctcttcggagtaagaaagaaaaccaccgggaagttggtcctctgatcgaatgggagatgggggcgctacgccagagcgagggcgggcaggccccccatgtccccctggtggaccgtccggagctgatggatctgacagaagtcggcaggacggaccagggccggcggcttggagagttccagcgccccgctgtcccgcaggaggccggccacgaactgggagcagaagtagtggtcacgccggtccagcgggaggttgaagaagcaggagagggcacccagcagattgtagtggtatcgctgccgctgggcgtacatagcactgatctgccggcggaggctggcgtatatctctggggagacggacagctcatagaggcagcaggggacctgctgcctcttggtccggagctccggaccgatttgttcctccaccagcccggccgggagggcaaagtgggagtatttccgggcaaagctgtaaaagggacctatggggccgtccagtccaatggatgcatgggtataggaatccgcagtggccagatggatcagacgggaaaaccaggtcccggagcgggtcaaaaggatgtagatggtgcgcgcctctgtggtgtttcccatgatgttttctcccttcctgtctgtgtgcattcaggatacaggatggattctaagaggcaataaagagaagattaagattttttgaaagagagatgagaatttttttatcatctcttccgggagacggacgcggaaaaaggggggagcggcccttgcaatcatcgaaattttcggatataatattacggaatttatgcgtatgcctgccggagggttcactccggcgcagaaatacaggaaagtgtgattgatttgaagtacgatttcacagccatcgaaaagaagtggcagagcaggtggaaggaggaaaagaccttcgcctgccagaacggcgacacctccaagcccaagttctacggcctggtagagttcccctacccctccgccgccggcctgcatgtgggccatcccaggccctacaccgccatggacgtgatcgcccggaagaagcggatggacggctataatgtgctgttccccatcggctacgacgccttcggcctgcctactgagaacttcgccatcaagaatcacgtccatcccgctaaggtgaccaaggacaacatcgctaactttacccgccagctccatatgctgggctactccttcgactgggaccgggtggtggacaccaccgaccccggttactacaagtggacccagtggattttccttcagttatataagcacggtctggcctataagaccaccatgcctgtgaactggtgcacctcctgtaagtgtgtgctggccaatgaggaggtggtagagggcgtgtgtgagcgctgcggcgcccccgtcatccgcaaggaaaagagccagtggatgctgaagatcacagagtacgcccagaagctcatcgacggtctggacactgtggactttatcgaccgggtcaagacccagcagcgcaactggatcggccgctccaccggcgccgaggtggtattcaaggccactaccggcgaggacatcaaggtctttactacccggcccgacaccctgtttggtgcgacttacatggtcctctccccggagcacgccctggtgcggggctggctggagagcggcaggctgaagaatgcagatgcggtcgtctcctatcagaaggcggcggcctccaagtctgacctggagcgcaccgagctgaataaggaaaagaccggcgtggagctggacggcgtccggggtgtcaacccggtcaacggcaaggagatccccatcttcatctccgactacgtcctgcccacctacggcaccggcgccatcatggccgttcctgcccacgacgaccgcgactgggagtttgccaggaagttcggctgtgagatcatcgaggtggtatccggcggcgaggacgtgcagaaggccgccttcaccgccaaggacgacaccggcatcatggtcaactccgacttcctcaacggcctgacggtgaaggaagccattcctgttatcaccaagtggctggaggaaaagggcatcggcgaggccaaggtgaattataagctgcgggactgggtgttctcccgccagcgctactggggcgagcccatccccatgatctggtgcgacaagtgcggctggcagcctgtgcctgaggatcagctgcccctgctcctgcccgaggtggagagctacgagcccactgacgacggcgaatcccccatctccaagatgaccgactgggtaaacaccacctgcccctgctgcggcggcccggccaagcgcgagaccgacaccatgccccagtgggccggctccagctggtacttcctgcggtatatggatccccacaacgacaaggctctggcgtccaaggaggccctggagtactggggacaggtggactggtacaacggcggtatggagcataccaccctccatctgctctactcccggttctggaacaattttctccatgacataggggtcatcccctgtgctgaaccctatgccaagcgcaccagccacggcatgatcctgggcaagaacccccattatgtgggcaatgtggagaccgaggaggagaagcaggcactcattgaaaagtacggcaatcaggccctgcgtccctctgtcaagatgtccaagtctctgggcaacgtggtcaaccccgacgacgtgatccgggattacggcgcggacaccatgcgcctgtatatcatgttcatcggcgactttgaaaagacagcggtttggtccgacgactccgtccgtggctgcaagcgcttcctggaccgggtgtggaacctggccaccgagcaggagcacaccggcgaggagtactccaaggccaacgaggccgctgtccacaaggccatcaaaaaggtgtctgaggatatcgaggccatgaagttcaataccgccattgccgccctgatgtccctggttaacgacttctatgcccacggagccagccggggcgatatgaaggccctgctgctgatgctctcccccttcgctccccacatgtgtgaggagctgtgggagatggccggctacggcgggcaggtatgcctccaggcatggcctgagtatgacgagagcaagaccgtggccgccactgtgcagatggcagtccaggtgggcggcaaggtccgggccaacatcgtggtccccacggacagcgacgaggcggctgtagtggcctccgccctggcggagcccaagatcgcacgcatggcggaggggatggacttagtcaagtccatcgtggtcaagggccgcctggtgaacctgatcttcaagcccaaggcgtgagacccatccgggcggagcgggttttcataaaatgttcaaattttctcgggaaactggagcttgacaagaaggaaaaagtctaatataatgaatctgttaaagccatatgaatggccctttcgcggcaggggacgccccgccgcgccggagggagggaaatataaatgtcggaagtccgtgtaagagaaaacgagtctttggagagcgcgctgaagcgctttaagcgcagctgtgccaagtctggcgtgctggctgaggtccggaagcgtgagcactacgagagccccagcgttaagcgccgcaagaagtccgaggctgcccgcaagaatcgcaagaagttctattaaggcatcaaaaacgccgcagcgtgagctgcggcgttttctaatgacaaaagccctccagaccggagggcttttccgcttttcaggcaggaaagggggtcacagctcgatgttgccggcggccttgtcattgaccacatagtaggccttgccatcctccggcttgacatacaggcagagcttcttgatggaggcggcgcggtggccctcagccagataggccgccttagcgcgttcggctaactcagagacgttccactctccgctgccaaactggacaaagatatcctccgtcttctggggtgcggccttggcagcgggctgctttttagccttggcggccttgggcttggcgacggtctcagcggccttttctgtcacaggcttggaagcctgttccactacggtctcggccgccttctcagcgacaggctcagccgccttctcaattgtctccggggtcttcttcatagtaggacactcctttttcttacgcaacatgatgcgatagtgggctgaggaagaaaaatcgacctttcttgtatgttacacttttattctgtcactttcaagagtatgatggaaaataattgaatttattcgctcaaaacaaaaaagcggaggaaaaaagcccttttcttatgaggtttgttggtgtgtttttggaggaaataggataaatttaaaaaaccggttaggaagcccgcattggaaggggaccttgccggcggaggagtggaagaaagcacagggatggccccacaattttatcagttcttaagattttcggtcttgcaacttaaactgtctatgctatccttatagtacagtcgggccggacctgctgagccggccggaaatgaagcttctgggggagagagtatgtacacgatactgatttgtgacgatgaccgggacatcgtctccgcactggatatctacctgaccagcgaggggtaccgcaccatcgcggcatataacggccgggaggctatccaggcggcggaggaaaacgagatccatctgatcctgatggacgtgatgatgcctgagctggatggcatccgggccacggccaagctgcgggaggggagcaatgtgcccattatcctgcttaccgccaagagcgaggatacagacaagatcctgggactgaacatcggggcggacgactacattacaaagcccttcaatcccctggaggtgatcgcccgggtgaagagccagctgcgccgctatacggcactggggggagcggagaaggcgcccggtatgctcaccgtgggccccatctctatggacgacgggtccaagcaggtgatggtggacggtgcgcctgtgtccctgacgcccattgagtataacattttgaagctgctcctctcccacccgggacaggtcttttcctctgcccaaatctatgaacaggtatggaacgaccccgcctacggctcagagaacacggtggcggtccacatccggcatctgcgggagaagatcgagatcgaccccgccgagccccgctatctgaaagtagtgtgggggctgggctataagatcgagaaagggggagcgtgagtgagcgatgtccgaaagagcgtgccggccaaggtgatcgcctcactgctgattctggtgtccgtcttcagcctgtgctggcaggggatggctgtgctgcgggggatcgactatgtgctgacagacagctggcaggatacctgggagttcaaagagctgatccgggaacgggaggaccagctggccgagtggttcgcggccagagctgcgctggaggatcctggactggcctatctggaccaggtgcggtatgagacagatgcggagcggatcggagcagcaatggcgcaggatcagacctctttccgctaccgggtgctcagtcaggacgggacaaaggtcctagccaccaatctggcgccgggggagtccctggagcagctggtgcccgagatccactccgctgtgttccgtccaggggagcacctgacccagccctggaacagcagccccgatgcgggggaccctgcgctggtgacggaggggtcggaggagagcggagatgcctattatatcatcgagtgtggcgtcccccaggagctgtccggggcagaggatgaattttctgagctccatgcccgcgacacagggggccggaaagagatccccctgaggatcgctgccacctgtgtgtgcctggtgctctcccttgcctgctttgcctttctcatgtggtcctccggccataaggagggagtggaggggatcgtcctcacctggcaggaaaaaatctattttgacctgtatctgatcggggcgggggtcctgtttttcattctgattttcccgctgatggagttcctgtacggctgggggtatgcgtctcaggagagctatgagaaccaggtgagcgccatcgtggtctctctgtgcgtaacggctatgacggcgctggccgtgctggtcctgcgcaccctggtggtgcgctgcaaggcgggggtcctggcccgcactaccctggtttgccgggcatgcagctggatatggagcggtctgctggatgccatccgctccttccccatgatatggagaagcgtggcggggtttttggcctatctggtgctatgcttttttgcccgccgcatctggtgggacaatcccatccctctgtttctgatcaatcttgggatgctgctgtggctgtgccactggagtgtctgcttccagcgcctgcggaaggggagcgaggccatcgcgggcggcaacctgaaccaccagatcgacactacccgcatgccccacgatctcaggctccacgccgaggcgctcaacaacattgctgacgggctcaacggtgcggtggaggagaagatgaagagtgagcgattcaaggcggagctcatcaccaacgtctcccacgatctgaagactcctctcacctctattataaattatgtcaacctcctgaaaatggaggaggtggaaaaccccaaagcccgggaatacatcgaggtgctggatcggaagtcccagcggctgaaaaagctcacagaggatctggtggaggcgtccaaggcctccacaggcgcgctgacggtgaaccgggagaagatcggaatgtgccagctggtggaccaggctctgggggagtacgaggagaagctggaggcccggaagctcacagtggtccccagtctgccggagggggagacctatgtgtatgcggacgggcgccatctgtggcgggtcattgacaacctactgggcaactgtgccaaatatgccatggaggggacacgcatctatctggagctggtccgggggaaggggcaggtgaccctgtccatcaagaacatctcccgggacccgctgaacgtgccgccggagcggttgatggagcgcttcgtccggggggacgagtcccggaccaccgagggctccgggctggggctgtccatcgcccgcagcctgacggagctccagggcgggaccttcgagctggcggtggacggggacctgttcaaggccaccgtgaccatgccccagtcgggctgagcggaaagagaggagaggcatccgcctctcctctctttctgtcctctgcgcgaaaaagggcgtgtgtgcctgcctcttgcattggaactggtttcctgctataatcaacacgaaaaacaaaaatgcggcagtttgcgggcgcgccaacgcccgcaaacctgcgcaggtgctgacaccacctacacaacggccatccggccgcaccgcatggatattatacgacattccggtctttcttgtaaaggtcggttttgctgttgtactcctgcgtccgtgttgcatggagaagcccgtgcttctcgcgctgtgtaggcttgccctgcacggcgtttttgtttttcgcccgccgcccgggggcgggagcccccggggccggtgcggtgaagaacacaaatggaggagtatcgaacatggacgcagagacacagagacagacgccaaagcttaggaccaacctggacacgaactttttgaagctgttcgccatcctgactatggtggtggaccacgtggggaccgtctttttcccccagcacccggaattccggtgggtaggacggctggccttcccgattttctgctactgcctgacagttggcctgatgtacacacgggacatcaggcggtatctggggcggctggcgctctttgcagtggtctcccagcccttcttcgccctggccttccatccccacaacttctgggaagagctcaccagctggaacatctttgtcactctgtttttcagcctgctggccatctacggcgtgaaggagcggaagtggtggtggttcctcctcggggtgctggccatcaacgttctgaacgcggactacgccaacacgggcgtcatcctgaccctgatcttctacctgtgccggaacaagccctggctgggggcgctgctctatgtgctgagctacctcccggctctctggggcgggtccctggaggacccgatggccctggtggtggggggacacgccatcggctttgagatctttgccctcctgtccgcgccgctgatcttcctgcccacccacgtggagcccaagattcctaagtggttcttctacgccttctacccggcccacctgttcatcatcttcctggtgcggacggccctgcatatctgatgaggaggagagagcacagccgcccggctaaggccgggcggttcagattgtaaagccttgcagagttcacgtccgcaggtgcgaatcaggttccgaagtgttttccccgccggcatgtgcgtcggggaaaacacttctcaggctgcaagtgtaggggttgtccgtttgccacggtcgccccctgctcacggaagagtgcagctttttcgacagtgtcagccgcctcaaaatggggccctctgacaaaacgttgattttcctaaaacaatccctgatgtgtagcctttttgtccgaaaatccgtgtatgaagcagacagagaaaagggaggcgatgctatggagcgggaggaagcagagcggctggtagcgcggtacggtccatctgtctaccggctggcgtatgcccgcacagggagcaaggaggatgcagaggatgtcatgcaggagacctttctccgtctggtgcgcgccgccccggagtttcgggatgaggagcacggcaaggcgtggctgctcagggtggcgacccactgcgccgcagacgtatttcggatgccttggcggaaacgggatcttccgctggaggcggcccggggcgtgtcatccgcaccgccgaaggagccagacagcaatgtgctggcggcggtgctgtccctgccggagaaataccgcctcccggtccatttattttactatgaggggtattctattgcagagacagcggctgttttgggccggcgggagagcacggtgcgggcccagctcaccagggccagagccatgttgcgggaaaaactggaggtggaatgtatatgacaggacagaaatatcggcgggcaatggagcagatagagctgtccccggaccagcgggagcatctggttcgggctatgctccaggaacagccgaggagaaagcggaagagagctccggtccgtttgctgctggcggcggcactggcctgcggcgtgctgactatatcggtgctggccctctctccggccctgcgggagtatctgactcaggcgttgggaagttttgctccgtatagccaggaactgagcggggccacagcagtggatcaaaaggtgaaggtcagggtggtgtcggcggtaacggaccggtatcgcgtcaagctctatgtagagcttaccgacctgacaggggaacggattgtggacgagaataccagactgtcggcaaaaattcaaagggaggcgggggaagacggcttgcggtcccggtgtgtgggatatgacccggagacctgcaccgcattgtttgagttaaacgggaacatggaggagggaggaaaatatcaggagcagatgaggctgcgtatcacacaggtcagacctcagcagtaccatgagtacaccatagaaacccaatccatggcggcagccttgtcggaggactatgcgcagacaatggagctggaaacaggggaggtggttttgctccccggccagacgcagctgaagctgccagggctggagcgggcggaaatctcatccctgggatttatggaggatgggacgttccacacgctgttccgcctgccagagggggcggtcctggaccaagagggactggatggctcctggctttgtgtggacatgacagtaaatggggaaattccatgcagaaccgtagagagctgctgttttgtccgcgatggtattccatatctagaagtaatccacgatcatgtctctctggacgatctggacggaatttcctttcaaggggtggggggaaacattgtgcaatcggaaaaaatctccgggaactgggaaatcctgttccaggtggagaacatgagcgtccgggaactggagctgaccggggccgcggctggatcgactatttccactcaactgattttgacgccgctgggggcgatgatcacaggggaatacgagaaaggatactggggcgggcagagctgtgctgtggtctatcaggacggcacacgcatggatcacacagagatcgaggcaggtcggatgagcccggaaggggtctgtattctggggaattggacctttggggaggctgtggatctggaccgcgcggcggcgctggagatcggcggtctctggattcccctaaccggagcggacgccggtgtagtgcgggcagattagaacaaaccggcacctggacgtgtttcgtccaggtgccggttttctgtgctttgggccggatcagatccgcttccacaccgctccgccgggcacgtcagtgacttcgatgccccgggccttcagctcgtcacggatgcggtctgcctcggcaaagtccttggccttcttggcctcgccccgggccttcaccagagcgtcgatctcgggggccccctcgccggtgacggtgtagcccgcctgggcctgggcggcctttaccttggcctgctcctcccgcaccgcagccgccttgtccagcagggacagggagagcacctggtcgaagctgtccaggatggccagccgggtggctccgctggccttggctttcagggcgtcgtacagcagggtgacggccatggaggtgttcaggtcgttgcccatctgctggagaaatttctctttatactccgccagaacggcttcgtccacagatccgtcctgggggtccagggcggcgatgcgggcgatgagcttgtcaaaggcggccctggcgttgtccaggttctcccaggagaacaccagccccttgcggtagtggctctggaggcagaagaaccggtaaaccaggggatcatagcccttctcctccagcagggagacagtgaggaattcgccggaggacttggacatcttgccggaattggtgttcaggtggtggacatggaaccactggcggcaccaagggtggcccagataggactcggactgggcgatctcattggtgtggtgggggaaggcgttgtcgatgccgccgcagtgcaggtccagatactccccgttgtacttcatggagatgccggaacactcgatgtgccagccggggtagcccacgccccagggggagtcccacttcagggcctgatcctcgaatttggacttggtgaaccagaggacgaagtcatttttattgcgcttgttggtgtcctcctccacgccatcccggacgcccaccgccagatcctcctcatcgtggtcgttgaacacgtagtagcgctccagcttggaggaatcgaagtacacattgcccccggcctgataggcgtagcccttctccagcaggcgggtgatgatctggatatactcgtcgatgcagccggtggcgggctgcaccgtgtcagggcgcttgatgttcagctttcggcagtcctcaaagaaggcgtcggtgtaatactgggcgatctccatcacggtcttgtgctcccggcgggcgcccttgagcatcttgtcctcgccggtgtcagcgtcggagctgaggtggccaacgtcagtgatgttcatcacccggttcacatcatagccggaccagcgcaggaatttttccagcacgtcctccatgatgtaggagcgcaggttgccgatgtgggcgaagtggtacaccgtgggtccgcaggtgtacatctccacgtggccgggggtgtgggtctggaactcctccttcttgtgggtggcggaattatataacagcatgataaaaaacctccattttcttcggtgagggcggcctgggccgcccgggatcgtgagagaactatgcccgttccttcaggaaccggtcatccagcagcttctccaggaattccacccgctgagacagggcttccagccgttccagggtgggattctccacgctggtctggtctacgtcatcggcgtagtgggtgacccgtccggcgatgcggacgatctgggcggggatgcccacggcggtggcgtcctccggcacctcgctgagcaccacggcgttggacgcgatccgggcgttgtcacccacccggaagggccccagcaccttggctccgcagctgatgagcacgttgtttccgatggtgggatggcgcttgccgtggtccttgccggtgccgcccagggtgacgccatgatagatcaggcagtcgtcgccgatctcggcggtctcgccgatgacgatgcccatcccgtggtcaatgaccaggcggcggccgatcttggcgccggggtggatctcaatgccggtgatgtggcgggccagctgggagttcaggcgggccaggaagggaaggtggtgacagtagagccagtgggagacgcggtggaagatgacggcgtggacgccggggtagaggagaaagatctccagcttgctgcgggcggccgggtcgcgcttctgataggcgcccagcaattcactcagtgactgaaacatgatgtcctccttgggggagatccattccgtctccccatttattgtgggcgggaagaacagcacccgggacatcgcggtgcgctccggcggctgtgccggagccggggaaagggaagatgcaaggggaacgcctccttttcgcagcttggacacaaacaaaagcgcccctcatgcccacaggcataagaggcgatcgctcgcggttccactctcatttttcactcaaaggccggtatcggggccagaccgggcggcattacccgccgcgctcccggacgcacttcacatcccgcggactgggaccgctctcagtcggtggcgttccctctctgtcgaccggtggaggatgctacttttccgttcacagcgcttacaatttattatactatcatctgaaggaaggggtgtcaaggaggagggagggcttttcaaaaattttcccgacgccccgccggggcgccgggaaaagggtcatcggaaatagaccaggggatcgtccgggcggtcggcccgctccacccgctgggcgtagaggaccacgccctccccctgatagacgggggactcctcccactggatgcgggcggccaccatgacccattcccccttcttcagggagcgggaccggtcatacttgcacaggaagccgaagaagcggatgtcctcggcgcagcaggtcatggcgttgcggccggggatgaaggtgcccttgggcagcttcatgctggtcatggcctgggcccgaaagaccacggtcttgccggtgtagcgctctgggtgctcctggatgtccaagtaccagatgccgtagtcctcgtcctccaggacgatggtgtccgcctccagggagtaggggaggatgtcctccacctccagctcctcccccttctcgtcctcaaagacgatctcgcacatgcggtttaccgcccggatggagcgcttccagccggacaggggcatgtccggcgtgcagcggttgaagaggaccatatcggcctcggtgaccatgtcgatgaccatggactgcatgttggagcggtacatctcgaaggtggagccgtcgatgacgtcgatggcctggtagagcccccaggtcttgggcagcttcaggtcccggaggatctggatgggccacatgccgttgtactccaggagcacccgctccggctgatagcggcggtcgatctcctggagaaagctggtgttcagctgggcctggtcctggacagggaccaggcgggtgttccgcctggtcagctgctccggatcatactccgtctcgccgtcctcacacatcagcaggacggtgcgctgcccatcggcaaaataatccatattcagggtgtcggtgagcagagtggtcttgccgctgtccagaaagccggtgatgaggtacagcgggatacggggatctttcatgcagcctcacctcacgccagcaggaacagcttttccagcctggcctcgtccaggcccgcgccgatgacgcacaggcggccggtgtagtcggcgctgccctcccggatctggaactcgccggggaccaggtcgaagtggagccagccctcgctgtcctgatcggggaccatgcccttggagcggaggatggtgccgtaatcctccgtcatggccaggacggaaagaatgtcctggagttcctcccggctgtacttccgaggagtctcccggccccagctggtgaacacctcgtcggcatggtgatggtggtggaaggtggagtggatgcagctgtcgcacaggtcgcaggagccgcaggccccctcgcagcccagctcagcgtggatggcgtccagctcctcctgggtgtggtgatggccgcaggagcaggagtccccgtggtcatggtcgtggtggtgctcgtgctcatgctcgtggtcatggtggtggtcatgaccgcaggagcagggctcgtcctccctgtggtcgtggtggtgtccgatctcctccatcagctcgcgggccaagtcgtggcccccctccatggcagagacgatctgggcgccggtgagctggtcccagggagtggtgaggatagccgccttggcgttgtggggacgcagcatggctacgtcggcggccagcttggcctggtccatgttctgggtccggctgaggaggatagcggaggcgtgctccacctggttgttgaagaactcgccaaagttcttcatatagatcttgcacttcaccgcgtccaccacggtgacaaagctgtgcagttccaggggggcaccgccgtcccgcacccgctccacggcggcgatgacatcggacagcttgcccacgccggagggctcgatgatgatgcggtcgggcgaataggtatccagcacctccttgagggcggtgccgaaatcccctaccagggagcagcagatgcagccggaattcatctccgtgatctggacgccggcatccttcagaaagccgccgtcgatgccgatctcaccgaactcgttctcgatcaggaccactttctcgccatggaaggactcggagaggagcttcttgatgagcgtggtcttgccggcacccaaaaacccggagataatgtcgattttggtcatggtgacacagatcctttcttcaaacaaggcggcagggccgccggatggacagagggggaagggggagcgccggataccagagcctggtatccggcgcatagcagtccgggaaattacttctgccggacggtgatctcgttgcgcttgggtccggtggagaccagggtgatgggatagccgatcctggactccaggaagtccacataggcctttgcctgctgaggcagggcctggtagtcggtgcagccccggatgtcgcacttccagccggggagcgtggtgaacacgggcctggcccgcatcagctccgggggggtggggaagcggtcggtgactgtcccgtcgatctcatagccggtgcacaccgggatctcatccagatagcccagtacgtccaggcaggtcagagccacctgggtggccccctggaccatgcagccgtacttggtggccacagtgtcgaaccagcctacccggcggggacggccggtggtggcgccgaactcgcccttgtcaccgccgcggcggcgcagctcatctcccgcctcgcccagcacctcgctgacgaagggctcggtgttggagcccacagaggaggagtacgccttggtgacgcagatcacgtcctccacagcggtgggggggacggcggcccccacgcagccgaagccggccagggtgtgggaggaggtggtcagggggaagatacccaggtcagggtccttcatagagcccagctggccctccagcaggacggtcttgcccgcccgcagggcgtcgtgaacaaaggtgacggcgtcccccacataggggcggatctgctcccgcagctccatcagctgctggtacagctcgtccacgtccagggagggcttgtggtacaggtgctcgaacagcacatttttcagggagacggcggcggtcaggcgctcccgcagccggtcctcgtggaacaggtcgcagacctggatgccgatcttggcgtatttgtccgagtagaagggggcgatgccgctcttggtggagccaaaggccttgccgcccaggcgctcctcctcgtagctgtcctggagacggtggtagggcatcaggatctgggcccgctccgagacaatcaggttgggggcggggacgccctggctggtgatggagcccagctcgtccaccagcttctggatatccagtgccacgccgttgccgatgatgttggtcacatggggatagaaggtgccggaggggaggatgtgcagggcgaaccggccatagttgttgatgatggtatggcccgcgttggccccgccctgaaagcggatgaccacgtcggactgctctgccagcatgtccgtgatcttgcccttgccctcgtcgccccagttggcgcctacgatcgcttttaccatatctgttacctccgtggaccgggattcgcaaccgcacagcggatttgccttatccggccaacatgacagcattcttattatacttcctctaaaagagggatgcaagggaaaaagctgtttttcccatgtatttttccgaacaacggcagaaatggagcccatgagtctgcggagacgatagggcgggagaacattgacagaatggtaaaaaaacattaaaataaaaaaagcgccttttttggtcggaatggacaaagctctgcggtgagccggcgcggagtagaagaaattttccccgggacaggcgctcagacaccccggactgcacatgcggtccgggagaaatagggaggtagcagagtatgagagcaatgacaagacgcgcgctggcgctggtgctgaccctggctatggcgctgtccctgtgtctggcggcccaggccgccggcccccaggtgacggtgaccctggatgggacggcgctggagctggaggtccccgcctatatcgacgggcaggaccggacccaggtccccgccagcatcggcccccagctggggctgacggtccagactggtgacgggagcgtcaccttcaccaaaggagaggccagcctgaccttccaggacggggccaaggaggcgggcggcgtgaccatggacaccgccgccgacctgtccggcgaggtgggctatgtgcccctgacctatctggcccagttcttcggcttccaggtggcctggaacggcgtcacccgcactgcggcggtcaccagcacggccgcggaggaggagaccgctgtgaccaagctgccccagctggtgtattcagagctggagagcctgatggcccagcaggcagcccagtatcagaccaaggacaacgtggtgcccatgctgtggcagggcgtgctggaaatggacgtccaggtgggcgatgccgcccgcaccgccaagctctatgtgccccagggcacgccccagggcgccatgttcgtggtgatgaacgtccctgagggcctgaacgccgtgagcttcatggagaccagcggctggatggacaaggcggacgaggagggcttttgcctgttcgtgctggaacccgcccagggtactccctggggaactctggaggaggagcaggcatacatcaatgccggcatcagcgccgccaaggcgggcaagtggctccagcccggtcccagcatgtacctggtgggctacggtgccatgggtacctgcctgcagaagtacgccatggagaatcccctgaatatcgccggagcggtgttcctggatgccagcctcattgacgccggctacatggcgtccaacggggatgtgtcctttgataccgataccaagacctacggcgtcacccgcaaggaggtgccggtgcccgtcaagatcgtggaaagcaccatgacggagcaggcaaaggctgtggcggactactggcaggccgcagccaacgacaagaacgccgtggagcgctttgctcctgaaggcggcgagatcctggcggccgccgtggtcaccgaagaggggaactatgactacgccctgcctgccaccaccgacatgatctgggacttcatgggccagttctaccgctacggcggcggtgtgctgtccaacgctatctcctggaaggtggactatgaggagatgggagtggagttccgaagcttcaccgactcccagggcatcgaccggcagtatctggtctatatccctgaggcttaccgcggcagcggcgagcagctgcccgtggtcattgcctatcacggagcctccacctctatgcgcaatttctttgagaataccttgtggtacaatatcgccgatgaggagggcatcatgctggtgttccccgagtccaccctggtgccggtgccccccaccctgggcggcggcgaggccaaccccaccgcctaccgcgcgctgtggcaggtggaggaccctgagctgcgctacaccgacgtggtgtatgccgaggacctgctggaccagctgatcgcagtctatccccaggtggatcagggccgcatctactgcaccggccactccatgggctgcatgatgacccactacctgggcagtgccgaggtctcccaccgcttcgccgccatgggcgccacctctggccccctgatggccagggaggagacgggatcccagaccgtgcccatgttcatgaccatggcccagtacgacatgtggagctatgacctgaaccaggacgacaccatgaccacccaggcggtggacatgtggctggtccgcaacgggctggcggccgcctccaacgtggtcgaggtccgtaagaccggggccactgagacctatgtggagggccgctacaacaactccgtctgggagaatgaggacggcatccctctgttccgctacgcctgggtcaccggcaaggaccatgtgaacctgccggcagagaaccagctgctgtgggacgagtggttcagccagatcaccctggacactaagacaggcgtgcgcgcctatcagggacaggccatcggctgagtcagacaagagaacagaagcgaccggga
